United States Patent Application Publication US 2012/0017338 A1 - sequence listing, part 14

SEQ ID NO: 55851 - protein, 533 aa, Zea mays
  Coding DNA Sequence Number=SeqID_14072
  Gene Ontology: Cellular component=intracellular; Biological process =signal transduction
  Homolog annotation: Hit_ID=Q6UQ72; Match level="QueryCoverage=73%, HitCoverage=84%, E-value=1e-126, Identity=63%"; Hit description=Rho GTPase activating protein 2
  Pfam annotation: Domain name=PBD; Domain location=91-143; Score=48.4; E_value=2.5e-11; Accession=PF00786.18; Description=P21-Rho-binding domain
  Pfam annotation: Domain name=RhoGAP; Domain location=160-299; Score =86.4; E_value=8.5e-23; Accession=PF00620.17; Description=RhoGAP domain
  Pfam module annotation: Pfam domain module=PBD::RhoGAP; Domain location=91-143::160-299
MAPFQMRFGLQISPARSDDDEEEDDDDDNEEEYDEMASEGTASPPMMLRPGRGGGGLVSAVVGALRRSLVMCSAGAVDIDDDDDEEEGGIEIGRPTDVHHVSHVTFDRFGGFLGLPADLEPEVPRRTPSARSNSTCSVSVFGVSPTSLQCSYDPRGNSVPTILLMMQRKLYDRGGLKVEGIFRINAENSQEVYVRDQLNSGVVPNEVDLHCLAGLIKAWFRELPSGVLDALTPEQVMHCNTEGGCALLASMLPPVEAALLDWAINLMADVVEQENYNKMNARNIAMVFAPNMTQIIQGSYYTYTYANPGAFLFQMADPLTALIHAVQVMNFLKTLILKTLKERNKKDEALEALQPCSSSPNDQDEHQVSEHLEKPSVLPNQKGFGFHMNDSATPVQVLGAEKTLHHHSQIRSHEPKKFGTDMDHKKRQSDASSLLGSDSSNRFNSSGREFGSRNGASDRFSFRKGVERLCRHPVFQLNRSMKKSTDAVVFDAPRETRQAWMPETARRGPRYPAASEVRTVVMLLSPLLKQSGQ

SEQ ID NO: 55852 - protein, 123 aa, Zea mays
  Coding DNA Sequence Number=SeqID_14073
  Subcellular localization annotation: CTP_CleavageSite=12; ConfidenceScore=5.08e-01
MHVFFFFSGLPQVMRRSGKGRDASKAVGSSDVSSSEIGLAMSPSLFVAKTGHIIATSETWLCQAGRCRDDDGAGVEAPGRVGVGQRCVKRRRQSKRASRQTGLGGIENIRVEVIDARTGLERI

SEQ ID NO: 55853 - protein, 87 aa, Zea mays
  Coding DNA Sequence Number=SeqID_14074
MPWVAISPDPDRVALPVPVPVPGSRSVRVQTAECSGDVHSLGKRCVMDSQWTIDDHRCARQYLVAPGDWGSRLPHVQYQGYQDRQES

SEQ ID NO: 55854 - protein, 1095 aa, Zea mays
  Coding DNA Sequence Number=SeqID_14075
  Gene Ontology: Mol. function=protein serine/threonine kinase activity; Cellular component=integral to membrane; Biological process=protein amino acid phosphorylation
  Homolog annotation: Hit_ID=O65510; Match level="QueryCoverage=96%, HitCoverage=97%, E-value=0.0, Identity=50%"; Hit description =Putative receptor protein kinase
  Pfam annotation: Domain name=LRRNT_2; Domain location=35-76; Score =52.1; E_value=1.8e-12; Accession=PF08263.3; Description=Leucine rich repeat N-terminal domain
  Pfam annotation: Domain name=LRR_1; Domain location=104-126; Score =11.7; E_value=1.8; Accession=PF00560.23; Description=Leucine Rich Repeat
  Pfam annotation: Domain name=LRR_1; Domain location=128-151; Score =13.1; E_value=1; Accession=PF00560.23; Description=Leucine Rich Repeat
  Pfam annotation: Domain name=LRR_1; Domain location=160-182; Score =13.3; E_value=0.86; Accession=PF00560.23; Description=Leucine Rich Repeat
  Pfam annotation: Domain name=LRR_1; Domain location=184-206; Score =4.4; E_value=44; Accession=PF00560.23; Description=Leucine Rich Repeat
  Pfam annotation: Domain name=LRR_1; Domain location=208-231; Score =12.7; E_value=1.2; Accession=PF00560.23; Description=Leucine Rich Repeat
  Pfam annotation: Domain name=LRR_1; Domain location=235-255; Score =5.0; E_value=33; Accession=PF00560.23; Description=Leucine Rich Repeat
  Pfam annotation: Domain name=LRR_1; Domain location=258-280; Score =9.9; E_value=4; Accession=PF00560.23; Description=Leucine Rich Repeat
  Pfam annotation: Domain name=LRR_1; Domain location=282-304; Score =16.6; E_value=0.09; Accession=PF00560.23; Description=Leucine Rich Repeat
  Pfam annotation: Domain name=LRR_1; Domain location=306-328; Score =5.5; E_value=26; Accession=PF00560.23; Description=Leucine Rich Repeat
  Pfam annotation: Domain name=LRR_1; Domain location=330-352; Score =16.4; E_value=0.11; Accession=PF00560.23; Description=Leucine Rich Repeat
  Pfam annotation: Domain name=LRR_1; Domain location=354-376; Score =16.4; E_value=0.11; Accession=PF00560.23; Description=Leucine Rich Repeat
  Pfam annotation: Domain name=LRR_1; Domain location=378-400; Score =0.5; E_value=2.3e+02; Accession=PF00560.23; Description=Leucine Rich Repeat
  Pfam annotation: Domain name=LRR_1; Domain location=402-424; Score =17.3; E_value=0.055; Accession=PF00560.23; Description=Leucine Rich Repeat
  Pfam annotation: Domain name=LRR_1; Domain location=426-448; Score =15.1; E_value=0.26; Accession=PF00560.23; Description=Leucine Rich Repeat
  Pfam annotation: Domain name=LRR_1; Domain location=450-473; Score =13.7; E_value=0.68; Accession=PF00560.23; Description=Leucine Rich Repeat
  Pfam annotation: Domain name=LRR_1; Domain location=475-497; Score =12.1; E_value=1.6; Accession=PF00560.23; Description=Leucine Rich Repeat
  Pfam annotation: Domain name=LRR_1; Domain location=499-521; Score =15.6; E_value=0.17; Accession=PF00560.23; Description=Leucine Rich Repeat
  Pfam annotation: Domain name=LRR_1; Domain location=523-545; Score =17.8; E_value=0.04; Accession=PF00560.23; Description=Leucine Rich Repeat
  Pfam annotation: Domain name=LRR_1; Domain location=547-569; Score =22.4; E_value=0.0017; Accession=PF00560.23; Description=Leucine Rich Repeat
  Pfam annotation: Domain name=LRR_1; Domain location=571-593; Score =20.2; E_value=0.0072; Accession=PF00560.23; Description=Leucine Rich Repeat
  Pfam annotation: Domain name=LRR_1; Domain location=595-617; Score =13.7; E_value=0.68; Accession=PF00560.23; Description=Leucine Rich Repeat
  Pfam annotation: Domain name=LRR_1; Domain location=619-641; Score =18.7; E_value=0.021; Accession=PF00560.23; Description=Leucine Rich Repeat
  Pfam annotation: Domain name=LRR_1; Domain location=643-662; Score =8.3; E_value=8.1; Accession=PF00560.23; Description=Leucine Rich Repeat
  Pfam annotation: Domain name=LRR_1; Domain location=80-102; Score =3.7; E_value=59; Accession=PF00560.23; Description=Leucine Rich Repeat
  Pfam annotation: Domain name=Pkinase; Domain location=787-1049; Score= 58.2; E_value=2.8e-14; Accession=PF00069.15; Description=Protein kinase domain
  Pfam annotation: Domain name=Pkinase_Tyr; Domain location=787-1073; Score=10.0; E_value=4.4e-13; Accession=PF07714.7; Description =Protein tyrosine kinase
  Pfam module annotation: Pfam domain module=LRRNT_2::LRR_1::LRR_1::LRR_ 1::LRR_1::LRR_1::LRR_1::LRR_1::LRR_1::LRR_1::LRR_1::LRR_1::LRR_1: LRR_
  Pfam module annotation: Pfam domain module=Pkinase::Pkinase_Tyr; Domain location=35-76::104-126::128-151::160-182::184-206::208 -231::235-255::258-280::282-304::306-328::330-352::354-376::378 -400::402-424::426-448::...
  Pfam module annotation: Domain location=450-473::475-497::499 -521::523-545::547-569::571-593::595-617::619-641::643-662::80 -102::787-1049::787-1073
MPPSRSLFLLLMLALAPLASLTAPAPAPVARTAGVQAEIDALLAFRRGLRDPYGAMSGWDAASPSAPCSWRGVACAQGGRVVELQLPRLRLSGPISPALGSLPYLERLSLRSNDLSGAIPPSLARVTSLRAVFLQSNSLSGPIPQSFLANLTSLDTFRRDLHYLWLDGNLLEGTIPAALANCSALLHLSLQGNSLRGILPSAVAAIPTLQILSVSRNQLTGAIPAAAFGRQGNSSLRIVQLGGNEFSQVDVPGGLAADLQVVDLGGNKLAGPFPAWLAGAGGLTLLDLSGNAFTGELPPALGQLTALLELRLGGNAFAGAVPAEIGRCGALQVLDLEDNHFTGEVPSALGGLPRLREVYLGGNTFSGEIPASLGNLSWLEALSIPRNRLTGGLSGELFQLGNLTFLDLSENNLAGEIPLAIGNLLALQSLNLSGNAFSGHIPTTISNLQNLRVLDLSGQKNLSGNVPAELFGLPQLQYVSFADNSFSGDVPEGFSSLWSLRDLNLSGNSFTGSIPATYGYLPSLQVLSASHNHISGELPPELANCSNLTVLELSGNQLTGSIPSDLSRLGELEELDLSYNQFSGKIPPEISNCSSLTLLKLDDNRIGGDIPASIANLSKLQTLDLSSNNLTGSIPASLAQIPGLVSFNVSHNELSGEIPAMLGSRFGSASAYASNPDLCGPPLESECGEQRRRQRRQKVQRLALLIGVVAAAVLLLALLCCCCVFSLLRWRRRFIESRDGVKKRRRSPGRGSGSSGTSTENGVSQPKLIMFNSRITYADTVEATRQFDEENVLSRGRHGLVFKACYSDGTVLAILRLPSTSADGAVVIDEGSFRKEAESLGKVKHRNLTVLRGYYAGPPPDVRLLVYDYMPNGNLATLLQEASHQDGHILNWPMRHLIALGVSRGLAFLHQSGVVHGDVKPQNILFDADFEPHLSDFGLEPMVVTAGAAAAAAAASTSAATPVGSLGYVAPDAAAAGQATREGDVYSFGIVLLELLTGRRPGIFAGEEEDIVKWVKRQLQRGAVAELLEPGLLELDPESSEWEEFLLGIKVGLLCTASDPLDRPAMGDVVFMLEGCRVGPDIPSSADPTSQPSPA

SEQ ID NO: 55855 - protein, 114 aa, Zea mays
  Coding DNA Sequence Number=SeqID_14076
MTHHPSFTIAPCGLTGDLTATGARHLTVDRPSRAPTGQIDPTTVTPYPCLCYATTLNRINGEEPLSSSSVAGKEGSDPPEIVAPEEGHELDLLEIELSCQESFNEGQVHSTLDA

SEQ ID NO: 55856 - protein, 460 aa, Zea mays
  Coding DNA Sequence Number=SeqID_14077
  Homolog annotation: Hit_ID=Q75I58; Match level="QueryCoverage=53%, HitCoverage=100%, E-value=1e-125, Identity=81%"; Hit description =Expressed protein
  Subcellular localization annotation: CTP_CleavageSite=33; ConfidenceScore=5.19e-01
MRSTLVPYDPTVQPINQIQSTANRPYCAAPRVRCGSTWTRGHAQPSSVSSFFDASVQLDVPEMPLPAAPHRCRPHRTKSDADWARAQGRLRNPAPRPVASAVPSPHRAAPRTAGPCPVTAPRGWSVLPLAPSRRTHPSGGRPIWCAQATPTTNPSPRAGFAQPRGDAPVSYSRWVENAVRLYPAAREESHLGDIGGSPRKHFVLLVRALQVMMVLVVKQHRCTHSASCVCIKGHLSEDALFLVFRHMNWNPRLIAILSCVCKWFDEVAKQVLWKEFCHARAPKMMLDLHSGGSHIVDGNWKALGKLLIYCNGCTKGGLFNNIHVPGHFVFRTRFSRTAGRSFLPLPCKSDVLYVSDPCEHLDQGEEGDIGFFRGIFMSFATSRVKKMLIEKRARFHPRELCPYCKAKLWNMFQENMIPRSASARLGAYDDSVEYFVCLNGHVIGLGTLLPLSDSEEAADE

SEQ ID NO: 55857 - protein, 39 aa, Zea mays
  Coding DNA Sequence Number=SeqID_14078
MGSLPIPSQHFYSPTLLQPKELQRLRTAQQTAFKKYVDI

SEQ ID NO: 55858 - protein, 966 aa, Zea mays
  Coding DNA Sequence Number=SeqID_14079
  Homolog annotation: Hit_ID=Q1SZ88; Match level="QueryCoverage=31%, HitCoverage=21%, E-value=5e-72, Identity=47%"; Hit description=IMP dehydrogenase/GMP reductase
  Pfam annotation: Domain name=Extensin_2; Domain location=176-466; Score=-117.4; E_value=0.0098; Accession=PF04554.4; Description =Extensin-like region
  Pfam annotation: Domain name=FH2; Domain location=582-875; Score =110.1; E_value=6.7e-30; Accession=PF02181.13; Description=Formin Homology 2 Domain
  Pfam module annotation: Pfam domain module=Extensin_2::FH2; Domain location=176-466::582-875
GHKFGSTGQEDTKGVIAQTLVTTVDLSGSDGIHCQTDEQTKMSEYPDLDYTAFGSPRSLSRTDGDAHMRTKKNEGLQNGDIKIITENTISVDNELVIYEEKTIVVNGNAIQVVKNVVNEESIAAKIGKPITESRTSLDNDNGKIQTAKPSDIANGKLDGCRLESCLETVPTKKTTVHDRIVVLPATGVATEIKAKQEVLVDKQDFGIVLPQSRTVARARESEAWKPSHPPSRYYSSPAALGIRSISTDGKISVVNDAPLLSLKQPYGSNLTREATSAQSAPSPPQKSLLLGAQSASRSQVSPPPPPPPPPATNYSSSSTPMHMGLASTGLSNLPQGASPPRSPVAQKHAFAPPAPPPPPPPPPRSGVGGNTPPPPPPRLNNSAIAPPPTPIHHNTIKCSSSTTTTTINVTFCSSATSAATTIIQHHLPRHLLLAEEHPHPFPLVEEHLHPHPHHHHLAEEHPHPHLLLAGEHPCPHLLPLAEEHPRPHLLLFHVQDLHHLRLLQVLAVDLHLLHPLQVQVLHLHLLLQERGQELHLPHPHLEVVEEDLYHLVHQRTWGCTPYGISYWGCCLTQVNFEAIALGQSDKGPSSVSEFDVSELESLFPAAVPKSDDSSKSERRKSLGSKPEKVHLSAALTLDQSTLDVDQVENLIKFCPTKEEMELLKNYTGDKQILGKCEQFFLELMKVPRMESKLRVFSFKIQFGSQVADLRRNLDIIDSSCNEMGTDDVDVGVSNAEGSTGNRCDGSGTITSQTTGVGLKEVVLAARSPQLLNFYADLVSLDAASKIQLKMLAEEMQAVSKGLEKVQLEYDASERDGPKLKEFTDNAGSDVQSLSSLFSEVGKKADALIKYFGEDPVRCPFEQVISTLLTFVTTFRKAHEENLKQAELEKKKAEKEAEAEKAKNAQLTGKNGKKADAMIKHFGEDPIRCPFKQVDEDEAAVERSDAVEDVLEESRTSQSFFTPSPPL

SEQ ID NO: 55859 - protein, 92 aa, Zea mays
  Coding DNA Sequence Number=SeqID_14080
  Homolog annotation: Hit_ID=Q339R3; Match level="QueryCoverage=59%, HitCoverage=9%, E-value=4e-07, Identity=47%"; Hit description=Zinc finger family protein, putative, expressed
  Subcellular localization annotation: CTP_CleavageSite=59; ConfidenceScore=5.03e-01
MRRHGWQLPYHPLQVVAVSVFLALAFAFYVFFAPFVGRNVFQYVVIGLYTPLARCCLMGLAMVAGGLELRKAPNKCGLIMKRVAWQSCVFFW

SEQ ID NO: 55860 - protein, 101 aa, Zea mays
  Coding DNA Sequence Number=SeqID_14081
MKKVVYYETDSSSPSTSGTESSTTSKRHERKKYSDRWRCSSRYSAGTPDSPVNYIGVAPRIPEGERFGVGFSGAPDIVRWHTGQFGAPDQGTLRLSFALFV

SEQ ID NO: 55861 - protein, 566 aa, Zea mays
  Coding DNA Sequence Number=SeqID_14082
  Gene Ontology: Mol. function=iron-sulfur cluster binding; Biological process=electron transport
MELDWTAFLEWNMHIAGSVDQMSSSSNGHYPANGAKILHRKEKNKEKVQLDKNSATWVCQKDRHYVEKLETELMNCYQEIDYLQDQLNIRSVEANFMGEHIHSLELKLTELEKFPERVRAMDNELIRSDSQCWLLMEEVRCKEEELQKAASQIEKLESTALDSQCEIESLKLDLTNLEQRLFDAERFSQHAGEHKAQFDKLLGEHELQLHEAQKTIHQLVWENKQLKELLPVRAPKQSPPGSGWKVNKTLENGVHAECESGDVILENMAKRNEESELLIEQLKEELREQKLKAKEDAEDLTQEMAELRYQITGMLEEEYKRRSCIEQAAIKHIQELETQVSKEKTKLSGALKRLQESHELARTQAMEIKKLKAALERLNSVTNLGTVCKSCSCGFSAMLVELSNCSIEGPSGSARSLNSNHIDEKSQNQALIEWRPREASDDDGGWSIRAFAEKINRKSRLLPPSARQERELPLQPNDLLRVGVAGPAVAEQPTNLPASRRQSTPPTPLPRRCWTTSRGTWQLAQCRVLPSTSVTVAEQATNSPYVVAYTPSEHLLRYLAASSVRE

SEQ ID NO: 55862 - protein, 274 aa, Zea mays
  Coding DNA Sequence Number=SeqID_14083
  Gene Ontology: Mol. function=DNA binding; Cellular component=nucleus; Biological process=RNA-dependent DNA replication
  Homolog annotation: Hit_ID=Q9LGH0; Match level="QueryCoverage=98%, HitCoverage=86%, E-value=1e-57, Identity=39%"; Hit description=NAM -like protein-like
MEGNRYFSSLMDEANNNLSLDDISFLPEENPISNEQELSIVQSTPLSRPNQKRTKNFSEQEDALLVSAWLNISIDPVHGTNQTRGTFWKRVYDFFHKNKTFESSRTESSLLHRWGLIQENVNKFCGCVSNIEDRRQSGVTFQDKNVLRNQPKWNEKRKHIEAIKQVPNKKMKSSFNSSLGNAITIVADSTNKDVDVNASPKANAPKRPNGTKKAKEAVRHGDAYIEASDYFWAKKKEADAEKERNKQERFNQSYELEKERLFVEQVRAANETKN

SEQ ID NO: 55863 - protein, 1118 aa, Zea mays
  Coding DNA Sequence Number=SeqID_14084
  Homolog annotation: Hit_ID=Q67V89; Match level="QueryCoverage=75%, HitCoverage=98%, E-value=1e-171, Identity=64%"; Hit description=Zinc finger protein-like
  Subcellular localization annotation: CTP_CleavageSite=83; ConfidenceScore=5.05e-01
MAMWMTWVQGGGSSHKIPNLLSRSGANSDSSRWHDKLQHPSPSINANVGVDGSGSGETTNVHGEGCNDVSTSPSGLNSGLNASASEDRVERLEELAVAEKTSESPENDLADHADPSLPHEPSTCSGSPAKCADLSQHVKCSPKTESVGVLSITPVKFGDFDEVPGLSLPSDSYRDNNTSRGHRHTEDVAHLKNVQKDASELKPETDTCTTIDEASPIMVQGTETPNHDSGLIASVDSVTLSCSKNDHEVPVTSSSVPVASMEGRTLLHDEAPASADFGSETAESKERFRQRLWCFLFENLNRAVDELYLLCELECDMEQINESILVLEEAISDFQELKSRAEHFDNTKKSPGVPKEGMPMAVKADHRRPHALSWEARNTVFISRGLPENPIGTGMQAGWELLENKFDRLKSTDVVKKTTAHLEKEKQITAPWKSMDAWKEKRNWEDILKSPVRSSRVSHSPGVGRKVTDRARVLHDKLMSPEKKKRSALDMKKEAEEKHARALRIRSQLESERVQRLQRTSEKLHRVNEWQAVRSSKLREVMNARHQRGESRHEAYLAQVAKRAGDESTKVNEVRFITSLNEENKKFLLRQKLHDSEMRRAEKLQVIKTKQKEDTAREEAVLERRKFLEAEKMQRLAEIQRKKEEAIFRREEERKASSAAREARAAEQQRRKEIRAKAQQEEAELLAQKLAEKLRESEQRRKYYLEQIRERASMDLRDQPSPFQRRFPSKDCQNRSSSANSGEDSQTTGNSSAADSMVKSSNNAQIKRRIKKIRQRLMALKHEFIEPSIGESTGITHRSGLGAAKAKLSRWLQDLQRLRQARKEGAASIGLIVSDIAKYLEGKDLELHASRQVGKGNEMNLKQPAMLLLSALAETGLVTLPSLLTAVLLQANNNRSSSEQTLAILPSNFEEVATGVLKVLNNMARLDITLLQHMLSLCYFLATFLCSMLGTKLFFGGERVPLYFTSDPELMPILAAALIAVCYGCDQNLSVVQQEISTDMLRCLLKSCQTSGSNSPDSIAVDGSGNNSTESILDIRNSQGDIPTRSSRKIGRPVIGKGVSGGIRFNRNKVQKDGRGTRAIDDGPLKQRAQEAASNFMLHRKIPASFLDRAEEFFCSET

SEQ ID NO: 55864 - protein, 110 aa, Zea mays
  Coding DNA Sequence Number=SeqID_14085
MAWLSSIHRPPISGGADAVAPWPTHDRSPLPSPKLEPSWWYRERRVWAEMIQSMRHSGSMIHGGPTAMPKHRCGIPGPGYSRGVKARPRTNLRGHDECLLSRGSSQVQRW

SEQ ID NO: 55865 - protein, 436 aa, Zea mays
  Coding DNA Sequence Number=SeqID_14086
  Gene Ontology: Mol. function=ATP binding; Cellular component=nucleus; Biological process=septin ring assembly
  Homolog annotation: Hit_ID=Q8H1Q2; Match level="QueryCoverage=77%, HitCoverage=96%, E-value=1e-149, Identity=76%"; Hit description =Nucleotide-binding protein
  Pfam annotation: Domain name=ArsA_ATPase; Domain location=152-359; Score=-171.6; E_value=0.042; Accession=PF02374.6; Description=Anion -transporting ATPase
  Pfam annotation: Domain name=CbiA; Domain location=154-340; Score =25.0; E_value=6.2e-07; Accession=PF01656.13; Description=Cobyrinic acid a,c-diamide synthase
  Pfam module annotation: Pfam domain module=ArsA_ATPase::CbiA; Domain location=152-359::154-340
MERPHHADRSSREILGAADRGRGSKSRIRTETPWKASTRCRDWERQIGHRTQSSWRLGAPTAPYTESETTTPRDDTNPSLGTVGKEGEMENGGGKGDVPNDANEHCPGTQSEEAGKADACAGCPNQQICATAPKGPDPDVVAIVERLATVKHKLLVLSGKGGVGKSTFSAQLSFALAEMDHQVGLLDIDICGPSIPKMLGLEGQDIHQSNLGWSPVYVESNLGVMSIGFMLPNPDDAVIWRGPRKNGLIKQFLKDVDWGEIDYLVVDAPPGTSDEHISIVQYLQATGIDGAIIVTTPQQVSLIDVRKEINFCKKVGVPVLGVVENMSGLRQPLSDLSFVKPGEAGETDATEWALNYIKEKAPELLSVMACSEVFDSSKGGAEKMCREMGVPFLGKVPMDPQLCKAAEEGRSCFSDQKCGASAPALQSIVKKLIKTG

SEQ ID NO: 55866 - protein, 212 aa, Zea mays
  Coding DNA Sequence Number=SeqID_14087
MMSAGDDARHEYDGDTRVSGFDGGMTTLREPRANKFITLAQEAERHSPRGREQPGNVQIDARRKLAPRRNGEFAQQASKTRRRVVVDKACRRVNATRKQERSWRRPERGEEEKNDASFIGEGGEWFVARFNTPLTQIEEQCYLIEETAAAINGDGARWMKRSAQGVTALHRRLGRAEKGIVDGDNNGGDEVGLHVFREPHLRVPTARVGVDQ

SEQ ID NO: 55867 - protein, 106 aa, Zea mays
  Coding DNA Sequence Number=SeqID_14088
MLGEESQKMKEKEVDNNKKNEVEKPQGNNEKSIDSSHKKNDGKNKRMKKVVYYETDSSTSTSTSTSSTRKCLPGEVLEKFLYHEMMVRNSKYIKDLAQGNISSNEP

SEQ ID NO: 55868 - protein, 325 aa, Zea mays
  Coding DNA Sequence Number=SeqID_14089
  Homolog annotation: Hit_ID=Q852E9; Match level="QueryCoverage=20%, HitCoverage=27%, E-value=3e-21, Identity=67%"; Hit description =Expressed protein
MADKRSRTYKPQSELRYGHSRNLIGVSFGSLVRTQPEGQRISTIVLKVDLECERCYRKIRKVLCKIQDKMNIKTISFDEKSNAVTISGPFDADTVCNKLCCKAGRVIKAMDVKGKDKDGGKAGKEGGGDKPKDAGKPAAAEKDAGKAGKEGGAKAEKKEEKAEKKKEEKADKKEGGKGDKEAKPAEKGNKDGKAEAKKVKFAEVPAADAKPGKAMPPGMTKADLGPLLEKMMAAKAGSEPQPIAPPPGAAQGVAVPSVWPAPAGSVSGYGYGYNPGYEAPPPPSYYAAGAGGGYGCGCGRLQRLLPVRQAGRARARRVLRRAGVR

SEQ ID NO: 55869 - protein, 441 aa, Zea mays
  Coding DNA Sequence Number=SeqID_14090
  Gene Ontology: Mol. function=hydrolase activity; Biological process =metabolic process
  Homolog annotation: Hit_ID=Q69J38; Match level="QueryCoverage=53%, HitCoverage=74%, E-value=1e-53, Identity=46%"; Hit description =Putative PrMC3
  Pfam annotation: Domain name=Abhydrolase_3; Domain location=185-359; Score=91.6; E_value=2.3e-24; Accession=PF07859.3; Description =alphabeta hydrolase fold
MRCEVTQQESGDSPQARRNGSLSRPASPMRGSLGDKRCDGGSGGPRAWETKTSDYKRPSMTRTRHLLHCHCPYHHSSAACLHEIPRDRTGRSMAASDQPPRPEKPPLPWRARLLVGAASALHAASLRRDGTVNRFLLSLFDRAAPPTPTAPLGGVASTDHAVSDHLRARLFVPETPGGGNELPVVVYFHGGGFVFHSAASAIPAVIASVDYRLAPEHRFPAPYDDGEAALRWALAGAAGALPYPPDAVAGLLAVQPFFSGEAPTGSEMRLRDAPFGSPERLAWLWRAFLPPGATRDHEAANVPAAIRRDAGAGADRWRAFPPTLVCVGGWDVHQDRQRAYADALRARVLRGGSTSGGASLTAEPDLVDGGVGLRLRTRSSSASRERQKGCTGNKGVTTTIEKSNRKFQGQRKRISETLEETPCDEHIKLYVYLESQDLILP

SEQ ID NO: 55870 - protein, 76 aa, Zea mays
  Coding DNA Sequence Number=SeqID_14091
MSKSWMVGCVKNRIVSAKRSTNCLDRKIITDLVDSSQLLKRCSITCVSHGTLVDFAVLAIIEPDSVIASYVAIPVN

SEQ ID NO: 55871 - protein, 113 aa, Zea mays
  Coding DNA Sequence Number=SeqID_14092
MAMWGIGVSRAEMGCCVVSFHRWSEEEEEVAESADADAVRGRGGGGGGGIGGCEISGRGGVSRRLGVLCGRQLRVQRLDLLSREKEKKNLSEFPYLIWRISHGLPQIMGLLVS

SEQ ID NO: 55872 - protein, 68 aa, Zea mays
  Coding DNA Sequence Number=SeqID_14093
MELELEGEDPGVQKLARRKHADAWACNIGEIKQGARRLGAGASSEERLRFPLYFLSIPTCRRFETGGP

SEQ ID NO: 55873 - protein, 506 aa, Zea mays
  Coding DNA Sequence Number=SeqID_14094
  Gene Ontology: Mol. function=transcription regulator activity; Cellular component=nucleus; Biological process=regulation of transcription
  Homolog annotation: Hit_ID=Q5ZAK6; Match level="QueryCoverage=21%, HitCoverage=27%, E-value=2e-22, Identity=54%"; Hit description=BHLH transcription factor-like protein
  Subcellular localization annotation: CTP_CleavageSite=67; ConfidenceScore=5.53e-01
MAASSSRHQQQQQQHGGGRTTSSGGGADDDLSASNATMTSSSFTNTSATNRSGLSMDDDSGGGGPAEAAAAAAAESHHLWNQVLIMGGGGGEVGRSMHDAHDDSENFLELLNSRTLVPELFADPPACDYLKKMEYGSSHGGGGWPDHHQFTTAAALEKHLSSGYGGGALAHQHQHAAAGGAPERLTANLSDLVSNWSIAPPNPCLGDAHHHHRTGVVAAACDNDNAKAGMFLGSGGGVCNHEIGGHGAMLEGAATGGGGGGGQEFLRPAAGAGYSSMLGLSRNNRTMYMEAPWGSNAAGATRSLSDLISFGGAPLGKAEEPAPPTSTKALAEYKKQGHDIPSPAKTSSGGGSKGSSEGKKKRSEQQGSSEGNTKKSKSEVSSPTSSLKASSQVPKVKLGDKITALQQIVSPFGKTDTASVLYEAINYIKWLHEQVQLLSDPYMKTSSKDYNYNAWGRLEDKEGAEMVDLRSRGLCLVPVSCTPQAYRDSNDGPDYWTPPYRSCLYR

SEQ ID NO: 55874 - protein, 659 aa, Zea mays
  Coding DNA Sequence Number=SeqID_14095
  Homolog annotation: Hit_ID=Q1SD81; Match level="QueryCoverage=27%, HitCoverage=12%, E-value=7e-19, Identity=34%"; Hit description=H+ -transporting two-sector ATPase, alpha/beta subunit, central region; TonB box, N-terminal
MAPLRSTGRFFQRHPSAICLLIFLLVLYKYFFGWFTLIVTTSPIFLIAGIFLGIVLVYGEPNNPEKDHVYKKNDNTRSLNIHDSSKSIRGVPLPRIPSGEERAPKHKNSVKKIRKQSRGVASSSEPGSSESGGSDTDIAPMLHAFHHLRSGSNSSNSSQDGDSDSSTEDTTENQQGNDGRISREGKQHVKVVAWTADDQKNIIKIGCLEIERNQRLETLIARRRARKYADRNLAEFGSTDSLPTIEELSKFNVQIPAVFAPRKNPFDLPYNEDNFPDSAPSAVLETRYPFDLPSEQANESSSYGANSSHDEPIPVACHLQSALLRRHESFTEGAPFLSDFLQDTQPSRFRPYFMTEKMANEEMTDPVLEGETSEKSNSKASSAQDSDSTSSVADQESQKDVLEDCSNQGQQSSFSQTEEHAHIARHAREVSLSLDMEPPVLISDSSDDDISLSGEHINDWEEAQQSENFSLSQNTWQEDPNVMQHHQEIDITSNGLNQMSPHSNDLELTSSSTETTDDPFEVNDIEPPAKEVVVVDDTHVVDPVYDSSPSGSERPAPTGLVIDGPVLKDGHACTLVVEATIEEGGSSSRMEVSSSEVAGPSLSSVEQSESPEKEASEIREQSMVGHVEAHGGSVSHADPSVSDISSQPSTESSTNGKSH

SEQ ID NO: 55875 - protein, 697 aa, Zea mays
  Coding DNA Sequence Number=SeqID_14096
  Homolog annotation: Hit_ID=Q947C1; Match level="QueryCoverage=22%, HitCoverage=21%, E-value=6e-85, Identity=100%"; Hit description =Fructose-6-phosphate-2-kinase/fructose-2, 6-bisphosphatase
  Pfam annotation: Domain name=CBM_20; Domain location=48-143; Score= -23.4; E_value=0.026; Accession=PF00686.10; Description=Starch binding domain
MGTSGSKGIDGVGAVSGVGAGAAGLGGVGAGGDGGEGAAAEAWHGGAQLYVSLKMENALISGDLVPHVYGSEPIIGTWDPSRALAMERELASMWVLSFVVPPDHETLDFKFLLKPKDAETPCIIEEGPTRLLTGGMLEGDVRVALFKLNGDDEVLEFGVVNKADLVSPLELAASWRVYKENFQPSKVRGIPDISINVTPTNGAEVIAFVLDIVCFPVVMHMVAKFCANDRDRAKPMHMVAKFCENDRYPCRALDMCFGMVAERVHHALHLATVLPHGEVPLREQVELGVEVEHPSVPVLEELVLESEPRLACGVRLVTDDVLLLDGDGRRVEHNGHGGLNVVDPSGLSVEGGDGGGVEVGGVESLRGHRWGGGGGRAAIEEEALCRNHLSGQEARSRSRVRVAACSRSWEASTTAWMVAIASTNTDEASGGTDDVGPCGGGPPAHGEVAVSRGEEAMADGEPPGGGGLCAQARGVGAQACGGGCPLGRAGENSSEGEIGHGGGGAGGTTAGGPVARAVAGDSAAGGEPVARGGGWSAITVDDGWSAAAVITVDATQMLWLEWKPLRLPKQGGSPLCQCRGSQGRGRGSVVEVSWRRVAVVEEAVEDVTKARCIEADEGVDAGAMCQAAMDDACSRVDEVVEDEMMRLATRMCWKKRRGATPAQGVDIACWRTHNAEQRADDVRVRDDDDDVDGGVSR

SEQ ID NO: 55876 - protein, 105 aa, Zea mays
  Coding DNA Sequence Number=SeqID_14097
MDAKCSRVEDVKEPHQGGQQQRTGLRRSWCPRPRQNRRGTTDLVEKATATTDPAGKTQSVQRDDGSGREGRNNVDPAGKAATATDPAKAMKGWAARRVQPGKGLR

SEQ ID NO: 55877 - protein, 119 aa, Zea mays
  Coding DNA Sequence Number=SeqID_14098
MRSWFCSPLGKGSGAAMWLMGLQHKPSEGSKLATCIQCERMTHAPTAHRVWSGFLLGYTGMNDRFGCYRCRQLCVSFERMTCTVRHMISRQAIVSLRRACGWCHHEQLLPQVVHSRHSH

SEQ ID NO: 55878 - protein, 153 aa, Zea mays
  Coding DNA Sequence Number=SeqID_14099
MHAAECKTGMVAGRVRVTISEAIRLRWKGMAGSVARMAWAASAQINGEPGRSPRALMEGMAGHEHGTRGDDGGELRHRRAHTIGFAGGDHDRGAVISRGLGRRAGSGRRQGEERGCGRAGVVEDGRGVDDELGAAAVSELGVRGDFHGEDSLD

SEQ ID NO: 55879 - protein, 396 aa, Zea mays
  Coding DNA Sequence Number=SeqID_14100
  Gene Ontology: Mol. function=transferase activity; Cellular component= nucleus; Biological process=regulation of transcription, DNA-dependent
  Homolog annotation: Hit_ID=Q5VPG5; Match level="QueryCoverage=73%, HitCoverage=86%, E-value=3e-80, Identity=50%"; Hit description =Putative CCR4-associated factor 1
  Pfam annotation: Domain name=CAF1; Domain location=147-374; Score =225.6; E_value=1.1e-64; Accession=PF04857.10; Description=CAF1 family ribonuclease
MDGKAGLHVHEVDGAVPAGHLQHAARAQEREQRRGDDRRRPVPHRVGCAEPYSVYSVLLQTLTKGGPLRRCPNARDVRLPLPIKPGHHAHVPRSKRLDKAQPPEAMPMYSKSELIHVPPPPCSRPRYVMAPPLVFTSIGASMNAAVRDVWASNFDEELSNLSAVLPRYPCVCVDTEFPGAVHDSNLPRYMRGPRESYELVKRNVDDLNLLQVGIALSGPAGRFPIAWQFNIRGFDPALHPHAPASIAMLREQGMDFAMLNEFGIDPEDFAAGFRRSGLACGWLTWTAFSGSYDFGYLAKALTGGQPLPDTLDGFLALVRRLFGHSVFDVKHLARCCAMRGGLEQVATALGVKRAAGRAHCAGSDSLLTTDVLLLMMHRFFRNVDVLAHAGTIVDLT

SEQ ID NO: 55880 - protein, 72 aa, Zea mays
  Coding DNA Sequence Number=SeqID_14101
  Subcellular localization annotation: CTP_CleavageSite=30; ConfidenceScore=5.24e-01
MARLSAPKSPGVGPARSVRSPPLSLTPLARLSALARPRVTINKLIYDYVLECSGGDAGNMEEFEEFQDYDEF

SEQ ID NO: 55881 - protein, 150 aa, Zea mays
  Coding DNA Sequence Number=SeqID_14102
  Homolog annotation: Hit_ID=Q5JKG7; Match level="QueryCoverage=83%, HitCoverage=25%, E-value=4e-25, Identity=53%"; Hit description =Pherophorin-dz1 protein-like
MTYAFDGPFILTVGSSNQSEFMQGVQEQHNILRNSIEQLKLSESLRATLISHLKEALNEQELKVEQVRSLLQAAQPRFKRAAELCVGLGSNMEMHEPSNQGHKRSSLSDPLSTVAPGAEKSLQKGQSSAVLYSQEGNGFEHIMTETKLAA

SEQ ID NO: 55882 - protein, 161 aa, Zea mays
  Coding DNA Sequence Number=SeqID_14103
  Gene Ontology: Mol. function=phosphoinositide binding; Biological process=intracellular signaling cascade
  Homolog annotation: Hit_ID=Q75HY6; Match level="QueryCoverage=47%, HitCoverage=20%, E-value=2e-17, Identity=91%"; Hit description =Unknow protein
MQWEWRDGESSVYPPWQRNLAKWVTLTCRSAKHTASICIRKNGSLKSARSPEEVTDTFGAPSKWAREGLSLLCPYEVWDRSFKLHRSLGFSECGFTDIYFHRHSLSYPNIVRRQAFWVAKKILQLGMGDTFDDWLVDKIQLLRKGRIIAFAIKRIEQDHPP

SEQ ID NO: 55883 - protein, 97 aa, Zea mays
  Coding DNA Sequence Number=SeqID_14104
  Gene Ontology: Mol. function=protein serine/threonine kinase activity; Biological process=protein amino acid phosphorylation
  Homolog annotation: Hit_ID=O04417; Match level="QueryCoverage=79%, HitCoverage=15%, E-value=3e-16, Identity=61%"; Hit description =Calcium dependent protein kinase
  Subcellular localization annotation: CTP_CleavageSite=31; ConfidenceScore=5.19e-01
MRGGRLMCGLCVQGVGLTAGRGAPPNLGSVRNNPTSNLRNLYVLSRRSGRPTGAVQHHTYLFTELATRIDYAYKSISKRGLITRDDSDDVHHEIQIM

SEQ ID NO: 55884 - protein, 245 aa, Zea mays
  Coding DNA Sequence Number=SeqID_14105
MALALRIRDAGLALIYSEASARSVKRGRPVRQRTEARAEYMSGEAASGFHLSSSYALEFSTRLQSFVSPLGAPKIRLVLGDCIWTSSHFSQSSPLSWYIHCIYVAGLTALENLENPGVSHGWREERQERAPPYRWEAQAPPSHPSEDFGDSEYSEEVSSEYDCSSVPASLMVSSDESDDSMGLSAIERAYIRSVERAGLSGSDDSKEASLEEVEDSSDSEEGSDSEGGDNSRGGGNDYSRGGDGS

SEQ ID NO: 55885 - protein, 234 aa, Zea mays
  Coding DNA Sequence Number=SeqID_14106
MGKHQALVNWETAMDEQRRLMVGPARTGSREQGSSMPGRGERRRRGVARSAMASRGSRRWGREERGRAELRLGARRRGRSSAGEAQRPWSLGQSTELVEGGARGKALRAGGIEAELGEHPGSREEGAEQGANAPWLGAWGKEKPRRAGALARRALEPGHRAPWEDARAAPELEQGKRGQEIHPEIERKRKAVGRHGWCWNSTREMRGGARQPWNRAEEGARCKGERGVAGRQNL

SEQ ID NO: 55886 - protein, 75 aa, Zea mays
  Coding DNA Sequence Number=SeqID_14107
MELGTRVEDPSHRSKDADEEDTTRSPRRRGSEALIPLVMPLATGVIARTVSDYLQLSTPIFRPDNRMLQRRGGGR

SEQ ID NO: 55887 - protein, 110 aa, Zea mays
  Coding DNA Sequence Number=SeqID_14108
  Homolog annotation: Hit_ID=Q2QY62; Match level="QueryCoverage=35%, HitCoverage=5%, E-value=1e-10, Identity=74%"; Hit description=Zinc finger family protein, putative
MTGRLSKKLRGQPLPDKDPHSMPSRLQTISFWEIVGPVTKRFAAKTPRPLLAKSYKVTSRQPFQASPIQLHQATYENFRYHYDKDNPYQKSIAEKFSEVFFTKIPPLRLR

SEQ ID NO: 55888 - protein, 61 aa, Zea mays
  Coding DNA Sequence Number=SeqID_14109
MGSRLRREMEMAQQGGRSSKRSGQGSSTSGGLRRTPANSGDDGKLWQQRLIMLDLSTLEFM

SEQ ID NO: 55889 - protein, 95 aa, Zea mays
  Coding DNA Sequence Number=SeqID_14110
MNSREWLVRQSWSGAPDTVRCPTGQSERWGREWLAEVLRAAAALEHGSDDEIDGAAEALRAATSPILCIHFSLLSGERIAVDLGEKDAGAWHERG

SEQ ID NO: 55890 - protein, 459 aa, Zea mays
  Coding DNA Sequence Number=SeqID_14111
  Gene Ontology: Mol. function=heat shock protein binding; Cellular component=intracellular; Biological process=protein folding
  Homolog annotation: Hit_ID=Q2QQ93; Match level="QueryCoverage=78%, HitCoverage=61%, E-value=1e-101, Identity=56%"; Hit description=DnaJ domain containing protein, expressed
  Pfam annotation: Domain name=DnaJ; Domain location=12-77; Score=95.3; E_value=1.9e-25; Accession=PF00226.21; Description=DnaJ domain
MASAAAGAPKRCYYEVLGLSRDCSPTDIKLAFRRLALSLHPDKQPPGSDLALATAAFQELQHAHSVLSDPQERAYYDSHRSQIIFSHPASAGAKSASTVPDLFAFFSSSAFSGFSDTGRGFLQGLRGRLRQGLRAGACLCSPDGGSRARCAAGHWGTLDSPYAQVTAFYSYWLGFGSGMDFGWAAAWDAARGESRRVRRLMEEDNKKAMRKARREYNDAVRGLAAFCKKRDKRVVDMVLKKKLEEEKRKAEEKERRKEEDKRKKERAMAYQEHEWARAEEGLYDEDEEEEMRAKKELLYCAACNKKFKSDKQWKNHEQSKKHRNKIAELRKAFREEESLKKAEEGEGDWNEVDMGFDFKPTQESDDASAFSDAAEELAEEFESNYAGNGHHGKYEVQPEGSVHVNDVDDIMEGPSSSNVNNGAVIMCYNGCSISGVILRAGQPSLEQNCPDLVWKQWEH

SEQ ID NO: 55891 - protein, 189 aa, Zea mays
  Coding DNA Sequence Number=SeqID_14112
  Gene Ontology: Mol. function=RNA-directed DNA polymerase activity; Cellular component=mitochondrion; Biological process=RNA-dependent DNA replication
  Homolog annotation: Hit_ID=Q8S463; Match level="QueryCoverage=96%, HitCoverage=10%, E-value=2e-60, Identity=65%"; Hit description =Putative prpol
  Pfam annotation: Domain name=RnaseH; Domain location=6-134; Score =14.4; E_value=2.7e-06; Accession=PF00075.14; Description=RNase H
MALIQVELWTMYFDGSLMKIGAGTGFLFSSPLGVHLCYVIHLHFDASNNVVEYEALVNGLRIAIELGVRRLNVRGDSQLVIDQVMKNLSFHDARMEAYCREVQCLEDKFFGLELNHIACHYNEVADELTKIALGQTTVPPNIFSRDVYKPSIVMKEALKPAPNTSTPLADVLEAMQIDGEKDQAIPVPK

SEQ ID NO: 55892 - protein, 78 aa, Zea mays
  Coding DNA Sequence Number=SeqID_14113
MGDCDWTRGDLRLGDRRCSLIGGEVTGDEANVATGGLGSPARAGTGEEGLANSLAGLRPREWDPRRENGRGRCSGQVG

SEQ ID NO: 55893 - protein, 554 aa, Zea mays
  Coding DNA Sequence Number=SeqID_14114
  Gene Ontology: Mol. function=protein serine/threonine kinase activity; Cellular component=integral to membrane; Biological process=protein amino acid phosphorylation
  Homolog annotation: Hit_ID=Q2QLL2; Match level="QueryCoverage=94%, HitCoverage=94%, E-value=0.0, Identity=70%"; Hit description=Leucine- rich repeat family protein, putative, expressed
  Pfam annotation: Domain name=LRRNT_2; Domain location=52-92; Score =50.6; E_value=5.1e-12; Accession=PF08263.3; Description=Leucine rich repeat N-terminal domain
  Pfam annotation: Domain name=LRR_1; Domain location=121-143; Score =8.7; E_value=6.8; Accession=PF00560.23; Description=Leucine Rich Repeat
  Pfam annotation: Domain name=LRR_1; Domain location=145-167; Score =8.5; E_value=7.2; Accession=PF00560.23; Description=Leucine Rich Repeat
  Pfam annotation: Domain name=LRR_1; Domain location=169-191; Score =13.9; E_value=0.59; Accession=PF00560.23; Description=Leucine Rich Repeat
  Pfam annotation: Domain name=LRR_1; Domain location=193-214; Score =11.7; E_value=1.9; Accession=PF00560.23; Description=Leucine Rich Repeat
  Pfam annotation: Domain name=LRR_1; Domain location=97-119; Score =1.0; E_value=1.8e+02; Accession=PF00560.23; Description=Leucine Rich Repeat
  Pfam annotation: Domain name=Pkinase; Domain location=264-534; Score =144.1; E_value=3.7e-40; Accession=PF00069.15; Description=Protein kinase domain
  Pfam annotation: Domain name=Pkinase_Tyr; Domain location=264-534; Score=111.9; E_value=1.8e-30; Accession=PF07714.7; Description =Protein tyrosine kinase
  Pfam module annotation: Pfam domain module=LRRNT_2::LRR_1::LRR_1::LRR_ 1::LRR_1::LRR_1::Pkinase::Pkinase_Tyr; Domain location=52-92::121 -143::145-167::169-191::193-214::97-119::264-534::264-534
MDNIEVRRRKKKGRSSGRRQGGRVQAVLRAGLVAMAFALLCLCSSTPSAIALTPDGEALLELKLAFNATVQRLTSWRPSDPNPCGWEGISCSVPDLRVQSINLPFMQLGGIISPSIGRLDKLQRLALHQNSLHGPIPAEIKNCTELRAIYLRANYLQGGIPSEIGELVHLTILDLSSNLLRGTIPASIGSLTHLRFLNLSTNFFSGEIPNAGVLGTFKSSSKKSIGGNYVKMDKQTVPDGAKLVTYQWNLPYSSSEIIRRLELLDEEDVVGCGGFGTVYRMVMDDGTSFAVKRIDLSRESRDRTFEKELEILGSIRHINLVNLRGYCRLPTAKLLVYDFVELGSLECYLHGDEQEEQPLNWNARMKIALGSARGLAYLHHDCSPGIVHRDIKASNILLDRSLEPRVSDFGLARLLVDSAAHVTTVVAGTFGYLAPEYLQNGHATEKSDVYSFGVLMLELVTGKRPTDSCFIKKGLNIVGWLNTLTGEHRLEDIIDERCGDVEVEAVEAILDIAAMCTDADPGQRPSMSAVLKMLEEEILSPCMSELCYEQHLEL

SEQ ID NO: 55894 - protein, 142 aa, Zea mays
  Coding DNA Sequence Number=SeqID_14115
  Gene Ontology: Cellular component=plastid chromosome; Biological process=positive regulation of transcription, DNA-dependent
  Homolog annotation: Hit_ID=Q2QLK4; Match level="QueryCoverage=86%, HitCoverage=25%, E-value=2e-36, Identity=56%"; Hit description =Pentatricopeptide, putative, expressed
MAYNPSLNNELRKGYPKAARQFIALKKLLDEMSQAHCKPTLVTYNRIIHAYCRANYLKEDVKVKARNYEKIVKLYKDMQVAGFHPDKITYIIVMEVLGHCGHQDEAEAVFIEMRCDWDPDELVYGLLVDLWGKAVNVYKAQG

SEQ ID NO: 55895 - protein, 93 aa, Zea mays
  Coding DNA Sequence Number=SeqID_14116
MATRKPRDAANKAGAAVEENDSSQADELPAAMSEPSTDVESKCQDAHEHGIHQIRKWYSTMAQCHSVDLLQNHYHGKEANMDIHPQEDDRGYH

SEQ ID NO: 55896 - protein, 510 aa, Zea mays
  Coding DNA Sequence Number=SeqID_14117
  Gene Ontology: Mol. function=RNA-directed DNA polymerase activity; Cellular component=mitochondrion; Biological process=RNA-dependent DNA replication
  Homolog annotation: Hit_ID=UPI00005A975E; Match level="QueryCoverage =91%, HitCoverage=27%, E-value=0.0, Identity=84%"; Hit description =PREDICTED: similar to Retrovirus-related Pol polyprotein from transposon 297
  Pfam annotation: Domain name=rve; Domain location=222-381; Score =121.5; E_value=2.3e-33; Accession=PF00665.16; Description=Integrase core domain
MEAYCDEVRRLEDKFYGLELNHIARRYNDTADELAKIASGRTTVPPDVFSRDLHQPSVKIDDTFEPEAPSAQPEVPSAQSEVPSARPEAPSARSEAPSVQPEVPSAPEGELPLDRAKARRLARRAKSFVLVGDGKELYHRSPSGILQRCISIAEGQELLREIHSGACGHHAAPRALVGNAFRQGFYWPTAVADATRIVRTCEGCQFYARQTRLPAQALQTIPITWPFAVWGLDLVGPLQKAPGGYTHLLVAIDKFSKWIEVRPLNSIRSEQAVAFFTNIIHRFGVPNSIITDNGTQFTGRKFLDLCEDHHIRVDWAAVAHPMTNGQVERANSMILQGLKPRIYNDLNKFGKRWMKELPSVVWSLRTTPSRATGFTPFFLVYGAKAILPTDLEYGSPRTRAYADQSNQASREDSLDQLEEARDMALLHSARYQQSLRRYHARGVQFRDLQVGDLVLRLRQDARGRHKLTPPWEGSFVITKVLKPRTYKLANSQGEVYSNAWNIQQLRRFYP

SEQ ID NO: 55897 - protein, 133 aa, Zea mays
  Coding DNA Sequence Number=SeqID_14118
  Pfam annotation: Domain name=PGAM; Domain location=5-127; Score=-4.0; E_value=0.0076; Accession=PF00300.12; Description=Phosphoglycerate mutase family
MPRRRLILLRHGESTAGGRSTRDHDRPLSKAGRADAISVSNKLQQMGWIPELILCSTTNTLNTVLGITNNQSEHYHGWRCQRRGSLWTPLKKRLREDYPVPPTVTETLGQPHLTNIRPHQPLMLDECTGLIPG

SEQ ID NO: 55898 - protein, 408 aa, Zea mays
  Coding DNA Sequence Number=SeqID_14119
  Gene Ontology: Mol. function=RNA-directed DNA polymerase activity; Cellular component=mitochondrion; Biological process=RNA-dependent DNA replication
  Homolog annotation: Hit_ID=UPI00004C1733; Match level="QueryCoverage =90%, HitCoverage=28%, E-value=1e-170, Identity=78%"; Hit description= UPI00004C1733 related cluster
  Pfam annotation: Domain name=RnaseH; Domain location=37-165; Score= -5.2; E_value=0.00018; Accession=PF00075.14; Description=RNase H
  Pfam annotation: Domain name=rve; Domain location=233-390; Score =99.1; E_value=1.3e-26; Accession=PF00665.16; Description=Integrase core domain
  Pfam module annotation: Pfam domain module=RnaseH::rve; Domain location=37-165::233-390
MGETISFAPRKAIKSQVLADFVAEWVDTQLPTAPIQPELWTMFFDESLMKTGASAGLLFISPLGKHLRYVLRLHFPVSNNVAEYEALVNGLRIAIELGDRRLDARDDSLLVIDQVMKNSHCRDPKMEAYCDEVRRLEDKFYGLELNHIARRYNETVDELAKIASRRTTVPPDVFSRDLHQPSVKTNDAPEPEKALAQPEAPSAQPEAPSAQPEAPLAPEGQTHLPAQALQTIPITWPFAVWGLDLVGPLQKAPGGYTHLLVAIDKFSKWIEVRPLNNIRSEQAVAFFTNIIHRFGVPNSIITDNGTQFTGRKFLDFCEDHHIWVDWAAVAHPMTNGQVERANGMILQGLKPRIYNDLNKFGKRWMKELPSVQDPKKRMRVHVSGKADRAEGLLHLWDTDTSLVTYHET

SEQ ID NO: 55899 - protein, 38 aa, Zea mays
  Coding DNA Sequence Number=SeqID_14120
MARMRDSNLSTRDQRRSGMAMTTPIMSTRETDAGEKGE

SEQ ID NO: 55900 - protein, 140 aa, Zea mays
  Coding DNA Sequence Number=SeqID_14121
KRKKAWCDIKALSVFIVHNIGNTWHPIVVVDGEDGVWQGEDPLDIVVPCRSDCRHTHFNTGLAFPLRPLRQPKVAVEILCRTDKIVFKLFDKVPRKVRYCLNISEDEYRKTIKIIGAEGGLYPGATTYGNSLGATKPVYT

SEQ ID NO: 55901 - protein, 82 aa, Zea mays
  Coding DNA Sequence Number=SeqID_14122
MGRLRLRDTGMGQARIGREISGGRGEGEGRGVDHAAPMSPLVTVAAGMRRRGGRGSAGARLRAAGTGRARIGSEISETYLSH

SEQ ID NO: 55902 - protein, 77 aa, Zea mays
  Coding DNA Sequence Number=SeqID_14123
  Gene Ontology: Mol. function=protein binding; Cellular component =ribonucleoprotein complex; Biological process=rRNA processing
  Homolog annotation: Hit_ID=Q6ZJR6; Match level="QueryCoverage=80%, HitCoverage=21%, E-value=3e-19, Identity=74%"; Hit description =Putative U3 snoRNP protein IMP4
MLRRNIRQRREYLYSKSLEGPQRALFEKKRRIRAALEEGKPIPTELRNEEHDLRRQIDLEDQERQGHIRNCGGLPLT

SEQ ID NO: 55903 - protein, 187 aa, Zea mays
  Coding DNA Sequence Number=SeqID_14124
MAPGHATATSVRALGLRPHRCSAWLEAPCRGHVPALWSCAASAPGHAGGCRTAGTTPPRAPLGACSSEPPGPGARPRVPRGATLRARRGRVPRPRTARARRRGGGGPRPCALRNARRSREGRAPRDYALGGRATCHRGGRTPRPAGGPRAAVRRGRGCHALVGLTLTGGAPQRLGPGETAPPGATSA

SEQ ID NO: 55904 - protein, 74 aa, Zea mays
  Coding DNA Sequence Number=SeqID_14125
  Homolog annotation: Hit_ID=Q9S7C5; Match level="QueryCoverage=47%, HitCoverage=5%, E-value=1e-07, Identity=80%"; Hit description =Protein phosphatase 2A A subunit
MLNSSITSPIYRDLHTLVNPRLLSVVASLHALPTTIDFLSQTLLRVIVELAKDMHWRVRLAIFEYIPLLALRVS

SEQ ID NO: 55905 - protein, 137 aa, Zea mays
  Coding DNA Sequence Number=SeqID_14126
  Homolog annotation: Hit_ID=Q67UX6; Match level="QueryCoverage=47%, HitCoverage=24%, E-value=3e-16, Identity=69%"; Hit description =Putative homeodomain leucine zipper protein
  Pfam annotation: Domain name=Homeobox; Domain location=87-137; Score =43.3; E_value=8.1e-10; Accession=PF00046.19; Description=Homeobox domain
MYSTREEEGVGKSWLGLGIGGGSGGCDLMQRNNRPPVQFDLLFPPQGVVEGVAASKKAEKGGGGRKRLKVVTGTADEDGQQPPGARKKLRLTKAQSTLLEDTFRAHSILSNAQKQELARQVDLSARQVEVWFQNRRA

SEQ ID NO: 55906 - protein, 154 aa, Zea mays
  Coding DNA Sequence Number=SeqID_14127
MKHLRASPQQAHCLELDLLLLELDPHLVLMEMLEWKMNVYFVLVYALRMVRAIQTTHVNTNYIPLPRQALVYPVVVEEVPVDIHHFRVENGVILEDNLEEILVTPNLLLESQAFAVGASSLTPPTPVAQAPTPGGDDPDDSSDGGEDDDEEEEK

SEQ ID NO: 55907 - protein, 236 aa, Zea mays
  Coding DNA Sequence Number=SeqID_14128
  Homolog annotation: Hit_ID=Q18DN4; Match level="QueryCoverage=62%, HitCoverage=1%, E-value=3e-07, Identity=28%"; Hit description =Halomucin precursor
MEGLAKKLRVLSGTIIRGTLKTPNSQLGRSDRCHSTAPLASLTEGQRRLRHSDCSATRQSESDRQSGLATANYAPPDPRARTRAKTRKTANSAPPDPRARTRAKTRKTANFAPPDPRARTRAKTRKTANYAPPDPRARTRAKTRKTANSAPPDPRARTRAKTRKTANSAPPDPRARTRAKTRKTANSAPPDPRARTRAKTRKTANSAPPDPRARTRAKTPEDGELRSARPQGSDSG

SEQ ID NO: 55908 - protein, 308 aa, Zea mays
  Coding DNA Sequence Number=SeqID_14129
  Gene Ontology: Mol. function=protein serine/threonine kinase activity; Cellular component=integral to membrane; Biological process=protein amino acid phosphorylation
  Homolog annotation: Hit_ID=Q5JN27; Match level="QueryCoverage=73%, HitCoverage=38%, E-value=2e-87, Identity=58%"; Hit description =Putative receptor-like protein kinase 1
  Pfam annotation: Domain name=LRRNT_2; Domain location=34-74; Score =34.5; E_value=3.7e-07; Accession=PF08263.3; Description=Leucine rich repeat N-terminal domain
  Pfam annotation: Domain name=LRR_1; Domain location=132-154; Score =10.3; E_value=3.3; Accession=PF00560.23; Description=Leucine Rich Repeat
  Pfam annotation: Domain name=LRR_1; Domain location=156-178; Score =13.3; E_value=0.91; Accession=PF00560.23; Description=Leucine Rich Repeat
  Pfam annotation: Domain name=LRR_1; Domain location=180-202; Score =10.1; E_value=3.7; Accession=PF00560.23; Description=Leucine Rich Repeat
  Pfam annotation: Domain name=LRR_1; Domain location=204-226; Score =16.1; E_value=0.13; Accession=PF00560.23; Description=Leucine Rich Repeat
  Pfam annotation: Domain name=LRR_1; Domain location=84-106; Score =2.7; E_value=89; Accession=PF00560.23; Description=Leucine Rich Repeat
  Pfam module annotation: Pfam domain module=LRRNT_2::LRR_1::LRR_1::LRR_ 1::LRR_1::LRR_1; Domain location=34-74::132-154::156-178::180 -202::204-226::84-106
MGQNMLQPQVLCLCSIILTLFFTLLQPTAAQITAPWEVDALKAIRGSLIDPHGNLSSWNRGDPCMGNWSHVICYNATGSDGYFHVKELQLLSLNLSGILAPELGQLSQMKIMDFMWNSIGGTIPKEVGNITSLELMLLNGNQLNGSLPEEIGFLPNLNRIQIDQNHISGLIPKSFANLNKTKHFHMNNNSLSGQIPPELSRLPSLVHLLLDNNNLSGYIPPELSKLPNVLIMYPSGYMCLGSTSGPRFDSLWEQKQPSSALSLSYACEPPAARCPWPHACVLGVRLWGVSRPKFLLNAMLWGGFSPRR

SEQ ID NO: 55909 - protein, 210 aa, Zea mays
  Coding DNA Sequence Number=SeqID_14130
  Homolog annotation: Hit_ID=Q6Z1K3; Match level="QueryCoverage=45%, HitCoverage=20%, E-value=2e-10, Identity=38%"; Hit description=Zinc knuckle domain containing protein-like
MADRAYDKGMIVDISPSLRAHVMRWSRLLNSSAAALQYQVEVELRGIPIHAWDLASMETLLNEWCWITEIHPVSAHQREVFRVIAWCSSPSSIPKKLHLEIIEPLESMLPPFATLTMKDDRDRSKLQRRRRSRRSSLDDSYSDQGTLAPSLPWVSAMRGWAHISETSDWRHPRRLVCRSMRGSAPLGNPAVGLLFALLGLRWRSNPPKRI

SEQ ID NO: 55910 - protein, 177 aa, Zea mays
  Coding DNA Sequence Number=SeqID_14131
  Subcellular localization annotation: CTP_CleavageSite=88; ConfidenceScore=5.76e-01
MALLPLPPSGSPPPAGSPPPADSPPALPCATLPQPSSEAEPQQASAFPTSPMSFLSPRRRKALRWRESSPTSSSCEEEDPTSFKEVLLAGMVSISDPEALDGVAHQGAPDETWQAFALQRVSAKFQFQKAADGANPKSQKFLKDHEGFTIVESRRVQKMRRRLECQPIRQSGTFRKL

SEQ ID NO: 55911 - protein, 148 aa, Zea mays
  Coding DNA Sequence Number=SeqID_14132
MGKSKKGSGSSHHSSDKRKREPTPPSEDFGDSEYSEEEFSSGSEGSPAPVSPPASSDDSDDSQRITAEVWTYIRVVERAGLEGSDESEYSSDEEDSSDSSEEGSNGNGGDDGDDGGDGNGGGDSGRGGDDGSKGGDGGGSKGSNKASG

SEQ ID NO: 55912 - protein, 74 aa, Zea mays
  Coding DNA Sequence Number=SeqID_14133
MTIYSWKDEKDQVASASPALLGGKNGTQAAVTKQAKVNKLVNKLIAEGCSCGCWNAERKEQPEKHELDLRELEK

SEQ ID NO: 55913 - protein, 115 aa, Zea mays
  Coding DNA Sequence Number=SeqID_14134
MADRRWGSLRTPIGRTPDETPPHRIRAAVQVPAAMAWRSDRRSRHRGGRGAFGRGNHRAEERWVCGDDEETAAPNLIPARAPQRSEKGGMRTGFGAAPMNSRRLRSNLLHGADLG

SEQ ID NO: 55914 - protein, 82 aa, Zea mays
  Coding DNA Sequence Number=SeqID_14135
  Homolog annotation: Hit_ID=Q6QP54; Match level="QueryCoverage=37%, HitCoverage=10%, E-value=3e-09, Identity=96%"; Hit description =Putative kinase
MTVRGEASRDRWASAVKGREMRSWAKMLSFTNYNLGITQWLGLSLGHGRQTRPRLRRSLHVAQPRAQASHVNRKRHHHPTPS

SEQ ID NO: 55915 - protein, 64 aa, Zea mays
  Coding DNA Sequence Number=SeqID_14136
MWRKPPPGGKINDFFPAWRKNNIRVGPALLAKEERAGQPSQQEVASSLSSESHPMNQWGAMGHS

SEQ ID NO: 55916 - protein, 142 aa, Zea mays
  Coding DNA Sequence Number=SeqID_14137
MHQRVSSNSYELNAHFTRLKVWRANVVKITVANELAIEVMIVRELDTLWQADKIRARGKQRKSELSMRRELDNPQQGLAGRELRAEKKCRRAEGEKGPSRGTLCRGELSRAKLEHRGAQGRARERGALGKKLHGLEKIKTGR

SEQ ID NO: 55917 - protein, 56 aa, Zea mays
  Coding DNA Sequence Number=SeqID_14138
MAMRDLSSTLAEHSRVHRTCPLNYAEQSMRTARDWRVRSRASMEHGTLYGVHRTVQ

SEQ ID NO: 55918 - protein, 579 aa, Zea mays
  Coding DNA Sequence Number=SeqID_14139
  Gene Ontology: Mol. function=nucleic acid binding; Cellular component= mitochondrion; Biological process=DNA integration
  Homolog annotation: Hit_ID=Q7XBC6; Match level="QueryCoverage=99%, HitCoverage=36%, E-value=0.0, Identity=64%"; Hit description =Putative copia-type pol polyprotein
  Pfam annotation: Domain name=RVT_2; Domain location=172-427; Score =516.0; E_value=4.2e-152; Accession=PF07727.4; Description=Reverse transcriptase (RNA-dependent
SNTKAYRVFNKSSGLVDVSSDVVFDETNGSPREQVVDLDDIDEEDVPTAAMRTMVIGDVRPQEQLEQDQPSSSTMVHPPTQDDEQVHQEEACDQGGAQDDHVREEEAQPAPPTQVRATIQRNHPVDQILGDISKGVTTHSRLVNFCEHYSFVSSIEPFRVEEALLDPDWVLAMQEELNNFKRNEVWTLVPCPKQNVVGTKWVFRNKQDEHGVVTRNKARLVAKGYAQVAGLDFEETFAPVARLESIRILLAYTAHHSFRLFQMDVKSAFLNGPIKEEVYVEQPPGFEDERYPDHVCKLSKALYGLKQAPRAWYECLRDFLIANAFKVGKADPTLFTKTCDGDLFVCQIYSDDIIFGSTNQKSCEEFSRVMTQKFEMSMMGELNYFLGFQVKQLKDDTFISQTKYTQDLLKRFGMKDAKPAKTPMGTDGHTNLNKGVATPCFGIWYPKGSNFDLIGYSDSDYAGCKVDRKSTSGTCQFLGRSLVSWNSKKQTSVALSTAEAEYVAAGQCCAQLLWMRQTLRDFGYNLSKVPLLCDNEGAIRIAENPVEHSRTKHIDIRHHFLRDHQQKGDIEVFYVSTEN

SEQ ID NO: 55919 - protein, 87 aa, Zea mays
  Coding DNA Sequence Number=SeqID_14140
MAIRCLRRSSAQFEGSGKLYRARGKLAKELDWMEVGRSGQSTVGGLERPMARRLSDLCEFQVKIWSGVGDMVAPSQGCICKVTGTSM

SEQ ID NO: 55920 - protein, 133 aa, Zea mays
  Coding DNA Sequence Number=SeqID_14141
MTLVCYFTLALLSSTNTTSFAKSIYQEISPCDLIHHQGKEIGINMLSTRQDKFFHRTYYFYEFSLDKQHVALMATVNSGKDKAPSTAQQDNQISCTERTVWTYIAGATAPEMKWDSAVRIEGSITVLVIERRC

SEQ ID NO: 55921 - protein, 202 aa, Zea mays
  Coding DNA Sequence Number=SeqID_14142
MTWQGHRDCPVCTGLSGDYQGEGERAEDEGGEDSPPFSCYCGGGLTMRLLRGARAGCGEAGARAGEGEGEGERMGSVSGSGVLRGGVMSSYSSSSSSMSSPLLRGLILLRVGALRRWRCVLGFGVWRDGEGTERLDQTTLQDQVKSSRRARTGIERSEGSVERRTERGSERRHQPLIGDWTSVMPTTDVAEPEGRFPSRFNI

SEQ ID NO: 55922 - protein, 139 aa, Zea mays
  Coding DNA Sequence Number=SeqID_14143
  Subcellular localization annotation: CTP_CleavageSite=25; ConfidenceScore=5.39e-01
MAPAALLPLAPLPHHPNPPRRPLCRCGASRRGFTVHTVIAIASVSDSASDPTAAAEATSPSPPPSLPTQTPSSKPGPPALGGIANTRSWSQYYGSGFSIRVPPSFDDILEPDDYNAGMTYYGDKAKPRAYAARFASPDR

SEQ ID NO: 55923 - protein, 224 aa, Zea mays
  Coding DNA Sequence Number=SeqID_14144
  Gene Ontology: Mol. function=nucleoside-triphosphatase activity; Cellular component=integral to membrane; Biological process=transport
  Homolog annotation: Hit_ID=Q8GU87-2; Match level="QueryCoverage=83%, HitCoverage=59%, E-value=2e-99, Identity=61%"; Hit description =Isoform 2 of Q8GU87
  Pfam annotation: Domain name=ABC_tran; Domain location=19-224; Score =19.6; E_value=3.2e-09; Accession=PF00005.17; Description=ABC transporter
MAPHWFLWDTKLSLHMHCSGKTTLLLALAGRLGPGLKMSGNITYNGHHLNEFVPQRTSAYVSQQDWHASEMTVRETLEFAGRCQGVGIKYDMLVELLRREKNAGIKPDEDLDVFMKALALEGKQTSLVAEYIMKILGLDVCADTIVGDEMIKGISGGQKKRLTTGELLVGSARVLFMDEISTGLDSATTYQIIKYLRNSTHALDGTTIISLLQPAPETYELFDD

SEQ ID NO: 55924 - protein, 107 aa, Zea mays
  Coding DNA Sequence Number=SeqID_14145
MAQGHISLSSEHTLFPMDGFGDDGFGDDGLRDLFPWLDRTVHLGGYDFFSQSESSVPHGDPHGFQALDLNSQVSSKAVALESLEEGEPLVLPDCALHARAPVEEGGP

SEQ ID NO: 55925 - protein, 449 aa, Zea mays
  Coding DNA Sequence Number=SeqID_14146
  Gene Ontology: Mol. function=nucleoside-triphosphatase activity; Cellular component=integral to membrane; Biological process=transport
  Homolog annotation: Hit_ID=Q8GU87-2; Match level="QueryCoverage=99%, HitCoverage=79%, E-value=0.0, Identity=49%"; Hit description=Isoform 2 of Q8GU87
  Pfam annotation: Domain name=ABC2_membrane; Domain location=149-386; Score=191.7; E_value=1.8e-54; Accession=PF01061.14; Description=ABC -2 type transporter
  Pfam annotation: Domain name=ABC_tran; Domain location=1-98; Score= -34.0; E_value=0.00018; Accession=PF00005.17; Description=ABC transporter
  Pfam module annotation: Pfam domain module=ABC2_membrane::ABC_tran; Domain location=149-386::1-98
MELVELNPLSGALVGLPGVNGLSTEQRKRLTIAVELVANPSIVFMDEPTSGLDARSAAIVMRTVRNIVNTGRTIVCTIHQPSIDIFESFDELLFMKRGGQLIYAGPLGAKSRNLVDFFETREIVEALSRPSSESKELTFATKYAQPFCAQYMACLWKHNLSYWRNPQYTAVRFFYTVIISLMFGTICWKFGSRRGTQHDIFNAMGAMYAAVLFIGITNATSVQPVISIERFVSYRERAAGMYSALPFAFSLVTVEFPYILVQSLIYGSIFYSLGSFEWTAAKFLWYLFFMYFTLLYFTFYGMMTTAITPNHTIAPIIAAPFYTLWNLFCGFMIPRKLEGALAALLTDRLFSLVNALHVQRIPVWWRWYYWANPVSWTLYGLLTSQFGDLDQPLLMADGVTSTTVVAFLEEHFGFRHDFLGAVAAMVAGFCVLFAVVFALAIKYLNFQRR

SEQ ID NO: 55926 - protein, 194 aa, Zea mays
  Coding DNA Sequence Number=SeqID_14147
MPFPTFHDVQNEVLLDELTMVTEAPAPAPTLYSTPLNGQAPSGGGGSCPHRSGFLSTLLLWSLRLLVRFPPPIEVVALAWETAGVAASPRVVPPTRVATRRGHHSTTPGPGPFPCGRARPRVPPSFGAGPPDSTSLRRASDASLWRATNDSRSILALAPGTPTSTPLSPLAGGWNSASLTTAFSTMAMTPPSSD

SEQ ID NO: 55927 - protein, 297 aa, Zea mays
  Coding DNA Sequence Number=SeqID_14148
  Gene Ontology: Mol. function=homoserine dehydrogenase activity; Cellular component=chloroplast; Biological process=aspartate family amino acid biosynthetic process
  Homolog annotation: Hit_ID=P49080; Match level="QueryCoverage=67%, HitCoverage=21%, E-value=1e-100, Identity=92%"; Hit description =Bifunctional aspartokinase/homoserine dehydrogenase 2, chloroplast precursor (AK-HD 2) ...
  Homolog annotation: Hit description=(AK-HSDH 2) [Includes: Aspartokinase (EC 2.7.2.4); Homoserine dehydrogenase (EC 1.1.1.3)]
  Pfam annotation: Domain name=AA_kinase; Domain location=90-296; Score= -39.8; E_value=0.007; Accession=PF00696.18; Description=Amino acid kinase family
  Subcellular localization annotation: CTP_CleavageSite=22; ConfidenceScore=5.01e-01
MQSLTVARALPPAVATARRRPRASSSSREAVLQCWKYELSQDQYLGGSLRIGSSQGSLDIHRSTNLLRPAAASVSVEQDEVNTYLPKGDMWSVHKFGGTCMGTSQRIQSVANIVLGDSSERKLIIVSAMSKVTDMMYNLVQKAQSRDDSYTIALEEVFEKHMVAAKDLIDGEDLARFLSQLHSDVSNLRAMLRAIYIAGHATESFSDFVVGHGELWSAQMLSYAIKKRGWDAENPNVTGGDTLAGEVQTRVACWGGGAVELLEMLAQPESLGHTVGYNAVLGLSAGESDNELSLGGP

SEQ ID NO: 55928 - protein, 441 aa, Zea mays
  Coding DNA Sequence Number=SeqID_14149
  Homolog annotation: Hit_ID=Q1S398; Match level="QueryCoverage=33%, HitCoverage=33%, E-value=1e-48, Identity=65%"; Hit description=HAT dimerisation
  Pfam annotation: Domain name=hATC; Domain location=332-423; Score =17.0; E_value=0.00052; Accession=PF05699.5; Description=hAT family dimerisation domain
MGIDLGEILSPSGYGWLGFGRYKLKPDYPWGRFFPGFHIPLHHFFPVATTPLLGSSRAAACSMPRACAAACLLVTQKVTSPLAQCERASTCTAALPNLEGAEVHGYGSRELIPDGEFPIDISSPTMGRRPSDTNRNVALVNLANDAADAVDWRTPFVTYMRNLSVRTNRNIQRIAFKYVLIDNELYRRTPIDVLLKCLGPVDAILVVAEIREANDLAIGDNPDLMMNDIDEVTDKRLIALKENEKDKIMVAKAYNKKANSLSEIVAQALLHVVSVQVPSSPSVAIATTDILTWFSCLDPKNNFSRFDANKIRLAKIYDADFSNIDHAMLSQQLEAYILHVRRHTSFATCKDVASLATKIVETEKHLVFPLVYKIIELALLLPVSTASVERSFSAMKITKTKLRTKINDDWFNHLMVCYIEREIFKGLDNVTTTRRFQRHKD

SEQ ID NO: 55929 - protein, 193 aa, Zea mays
  Coding DNA Sequence Number=SeqID_14150
  Gene Ontology: Mol. function=transferase activity, transferring glycosyl groups
  Homolog annotation: Hit_ID=Q575Z8; Match level="QueryCoverage=54%, HitCoverage=14%, E-value=2e-18, Identity=48%"; Hit description =Alkaline alpha galactosidase 1
MDPKRHSLIAGIAGHCALFDAPPMFNMSSSQPTGADKTLSRLVEWADMEHLVLERSQCHGQYGATGQRQQLPHMVHLHHGLAVPPTTVTGDVHGAMSDRIPGDTLMVLLGRTVLLIVARWFVLGARESKRETSYFLQVQAALRGVIPYFLGWLYMCGMLQVVSPEWRGANEMKMMGFPLGLIYTTVGHSLHTR

SEQ ID NO: 55930 - protein, 45 aa, Zea mays
  Coding DNA Sequence Number=SeqID_14151
MEDEDSGGARDGPARLQQTLMEEASKWMFNCCGERKRTRGKELLL

SEQ ID NO: 55931 - protein, 312 aa, Zea mays
  Coding DNA Sequence Number=SeqID_14152
  Homolog annotation: Hit_ID=Q84N08; Match level="QueryCoverage=10%, HitCoverage=3%, E-value=2e-08, Identity=90%"; Hit description =Replication factor C 110 kDa subunit
MRLSRCAKVLVRHCHGVTDLQADPPLQDRIALTRPEIDTEKEIQTAKSHILSTMLTATCLLEYRRLLNHRIADLTTHTADLTTHVLLLVAHAAPPLALQQTRQQCCAQVDVGLSDSSYERGWHIHCNLKYNFPCRNILVEQSAGNMIFSFIQDEAVQKVIEFMDTYSLSQEDFDTIVEVSKFKPAPSILLLASLPSSSVLLPTSTVDTVSSPPPPWLHPPLAIPRARWKGVTDPHAVPAALPPRRHALAGLADTAVHGVALVGGTTFSCRGLFWVLRIGSAVCLSREWQHKLERLMGLMLDQATLDDLLVRP

SEQ ID NO: 55932 - protein, 215 aa, Zea mays
  Coding DNA Sequence Number=SeqID_14153
  Gene Ontology: Mol. function=ATP-dependent DNA helicase activity; Cellular component=DNA-dependent protein kinase complex; Biological process=double-strand break repair via nonhomologous end joining
  Homolog annotation: Hit_ID=Q7F1M0; Match level="QueryCoverage=98%, HitCoverage=39%, E-value=3e-90, Identity=70%"; Hit description =Putative ATP-dependent DNA helicase II 70 kDa subunit
  Pfam annotation: Domain name=Ku_N; Domain location=29-213; Score =95.4; E_value=1.7e-25; Accession=PF03731.5; Description=Ku70Ku80 N -terminal alphabeta domain
MDLDPEGIFRDDSDEDEDSVQEREANKEMVVYLVDASPKMFTPATTQDNEKQETHFHTIVNCITESLKTQIIGRSYDEVAICFFNTKEKKNLQDSAGVYVYNVGDREQLDRPTAKLIKDFSLIEDSFMSTIGSRYGITAGSRENTLYNALWVAQALLRKGSVKTDAQDLGLSIELLPLSPPDDQFNMSLFYADLIGLDGDEMTEYLPSAGDKYYS

SEQ ID NO: 55933 - protein, 55 aa, Zea mays
  Coding DNA Sequence Number=SeqID_14154
MPPLNLLLHLPISFVDLMQLVKQLLMLCRHRLHAIAVAASRTTSALVEWFEQCCD

SEQ ID NO: 55934 - protein, 65 aa, Zea mays
  Coding DNA Sequence Number=SeqID_14155
MEQEHLHLAMVHSLYSSLSHLDSTNGCSCCWMANDNPSLHHAVFGLSNISVCSQRLEPLQVHLII

SEQ ID NO: 55935 - protein, 84 aa, Zea mays
  Coding DNA Sequence Number=SeqID_14156
  Subcellular localization annotation: CTP_CleavageSite=30; ConfidenceScore=5.12e-01
MSSSSVASSVLPATEKPTVAPFRPWRLPITADVVSGADRRLNGGSSADGAMGEGCRGEGSSAEGSGADAWAGVGNACTGTGLRV

SEQ ID NO: 55936 - protein, 617 aa, Zea mays
  Coding DNA Sequence Number=SeqID_14157
  Gene Ontology: Cellular component=Arp2/3 protein complex; Biological process=regulation of actin filament polymerization
  Homolog annotation: Hit_ID=O96623; Match level="QueryCoverage=75%, HitCoverage=91%, E-value=7e-13, Identity=33%"; Hit description=Actin- related protein 2/3 complex subunit 2
  Pfam annotation: Domain name=P34-Arc; Domain location=415-601; Score=- 40.2; E_value=1.2e-07; Accession=PF04045.5; Description=Arp23 complex, 34 kD subunit p34-Arc
  Subcellular localization annotation: CTP_CleavageSite=71; ConfidenceScore=5.12e-01
MQECVLNIQLMYMPPSRFLCPKGNVQTCRVGKDRQWPRIVVPASFTALVFPAASPRRILSVCSSFCFQQVLAFASNQRVLSQRWRPPSRACDRRPRVLTQPALEISCPPSRACDSATALLPPGKHCKMILLQSPSRFLLQILQDRVLSGEKGMDIDCHTVEFDDVRYHIQFSMRNPKVMVLSVALPLPPPEAILYDGLPLGAIEAIKAAYGPVVQILDPPKDGFDLTMKINLTKLPLDEEQRNTILTQIASIREVVLGAPLKLLLKHLASKTVAPNVNNLVALVHRPNESFFLAPQADKVTIVYPMRFQDSIDIVLATSFLQLEKQRERWVPTALTRHGHDVTVLPKHVRVSEQDRGSNILSGLRRQCKGEAALQRVRCEGDTSWTKQRSVKCVDSVVPDVWTRRRPEELVGDVAAKHDLRRFRTLVLSDLCLGKAFANIGLFTIRNYGNIAMIMCSVFSNSTSVDVVVTGQDASRRGELSGILIWDFWLQHNAFNHITNAEEFVEARRTAALNNVPSCMWSPVPPLELKGVSADALNANAGFVTFVVYPRHVEGKKLDRTVWNLLTFHAYCSEGFMHTRMRRRVESLIQVDLRRQSGAVFVGGDLVSLADRGDNGL

SEQ ID NO: 55937 - protein, 247 aa, Zea mays
  Coding DNA Sequence Number=SeqID_14158
  Gene Ontology: Mol. function=ATP-dependent DNA helicase activity; Cellular component=DNA-dependent protein kinase complex; Biological process=double-strand break repair via nonhomologous end joining
  Homolog annotation: Hit_ID=Q7F1M0; Match level="QueryCoverage=81%, HitCoverage=36%, E-value=1e-78, Identity=66%"; Hit description =Putative ATP-dependent DNA helicase II 70 kDa subunit
  Pfam annotation: Domain name=SAP; Domain location=168-202; Score =45.2; E_value=2.3e-10; Accession=PF02037.17; Description=SAP domain
MARFALAFYGNPTRPQLIALVAQEEVTSSGRQFEPPGMHMIYLPYSDDIRYPEEVHVTSDDAPRATDEQIKKASNIFKRIDLINFSACQFANPEIYLQSQGQLPGVANAIEEFKTSVYGENYDQEEAEAAAGKASRGNASKKRKEVTDAAAQISAAYDWAELADNGKLKEMTTVELRSYLTAHDLPVSGKKDVLISRILTHLGFMLRVLLHAAKWLWLQMSLETGEADEVMCWAILVIYRVASLVRI

SEQ ID NO: 55938 - protein, 83 aa, Zea mays
  Coding DNA Sequence Number=SeqID_14159
MRHKAERRRFTEEAIRTSRKAEGGDDVFAHRPLGFGFRVFQGSNGGFWYLRDINVIQVSSWEHFMTIPLKLLGFLNLGYVLPL

SEQ ID NO: 55939 - protein, 124 aa, Zea mays
  Coding DNA Sequence Number=SeqID_14160
MRGVTAAFKLHYIGEKRSWNEALVGSGSGVAALDVGWLQLLARRGLVHGARVAGAVLRASRGLGFAWARGSRQSRAQGLSGWLRGVAALVGRARSGRVLAGARSLLGRATSVGLARCVGVWGRV

SEQ ID NO: 55940 - protein, 56 aa, Zea mays
  Coding DNA Sequence Number=SeqID_14161
MVEAPWVRYLSQEYVPMLTWAANTYRSPSCPYFRVCRGRSPLALLIENLRFFHGSE

SEQ ID NO: 55941 - protein, 148 aa, Zea mays
  Coding DNA Sequence Number=SeqID_14162
MGKNNKRKREPTPPSEDFGDSEYSEEEFSSESEGSPAPIPLRESSDDLDDSQGLAADVWTYIRAVERSGLEGSDESEYSSDEEDSSEGGGGDGDDDDEDDDDDDGGSGGNDGDGGDDSDGGGSKDGDDGSSRGSNRGGSGRGSNRASG

SEQ ID NO: 55942 - protein, 244 aa, Zea mays
  Coding DNA Sequence Number=SeqID_14163
  Gene Ontology: Mol. function=protein binding; Cellular component =membrane; Biological process=protein transport
  Homolog annotation: Hit_ID=Q8GVS9; Match level="QueryCoverage=66%, HitCoverage=71%, E-value=2e-59, Identity=78%"; Hit description =Putative endosomal Vps protein complex subunit
  Pfam annotation: Domain name=Snf7; Domain location=48-205; Score =61.2; E_value=3.5e-15; Accession=PF03357.11; Description=Snf7
  Subcellular localization annotation: CTP_CleavageSite=40; ConfidenceScore=5.38e-01
MAAHDPASTRGFNPATTVTTTACGGVGSSRCRSTGADPSNADEGPSAHPTRALPPAEDDLPEGGTATAARRWQRKTPVALAKELVRSRRAVNRLYENKAQLNSVSMHLGEIVATARTVGHLSKSTEVMKIVNNLMKAPELATTMQEFSKEMTKAGVMEEMVNEAVDSALDSEDMEEEIEEEVDKVLASVAGETASQLPDAARTQKIHEASTSRVPEERQAVAEGADDDEEDLEEIRARLAKVRS

SEQ ID NO: 55943 - protein, 630 aa, Zea mays
  Coding DNA Sequence Number=SeqID_14164
  Gene Ontology: Mol. function=helicase activity; Cellular component =mitochondrion; Biological process=protein amino acid phosphorylation
  Homolog annotation: Hit_ID=Q8LQQ6; Match level="QueryCoverage=99%, HitCoverage=98%, E-value=0.0, Identity=76%"; Hit description =Putative PPR protein
  Pfam annotation: Domain name=PPR; Domain location=140-174; Score =41.1; E_value=3.8e-09; Accession=PF01535.11; Description=PPR repeat
  Pfam annotation: Domain name=PPR; Domain location=175-209; Score =45.4; E_value=2e-10; Accession=PF01535.11; Description=PPR repeat
  Pfam annotation: Domain name=PPR; Domain location=210-244; Score =46.1; E_value=1.2e-10; Accession=PF01535.11; Description=PPR repeat
  Pfam annotation: Domain name=PPR; Domain location=245-279; Score =28.0; E_value=3.2e-05; Accession=PF01535.11; Description=PPR repeat
  Pfam annotation: Domain name=PPR; Domain location=280-314; Score =31.4; E_value=3.1e-06; Accession=PF01535.11; Description=PPR repeat
  Pfam annotation: Domain name=PPR; Domain location=315-349; Score =45.9; E_value=1.4e-10; Accession=PF01535.11; Description=PPR repeat
  Pfam annotation: Domain name=PPR; Domain location=350-384; Score =36.6; E_value=8.4e-08; Accession=PF01535.11; Description=PPR repeat
  Pfam annotation: Domain name=PPR; Domain location=417-451; Score =36.8; E_value=7.5e-08; Accession=PF01535.11; Description=PPR repeat
  Pfam annotation: Domain name=PPR; Domain location=452-486; Score =46.9; E_value=7e-11; Accession=PF01535.11; Description=PPR repeat
  Pfam annotation: Domain name=PPR; Domain location=487-521; Score =27.5; E_value=4.6e-05; Accession=PF01535.11; Description=PPR repeat
  Pfam annotation: Domain name=PPR; Domain location=522-556; Score =24.1; E_value=0.00048; Accession=PF01535.11; Description=PPR repeat
  Pfam annotation: Domain name=PPR; Domain location=557-591; Score =24.4; E_value=0.00042; Accession=PF01535.11; Description=PPR repeat
  Pfam annotation: Domain name=PPR; Domain location=592-626; Score =22.6; E_value=0.0014; Accession=PF01535.11; Description=PPR repeat
  Pfam annotation: Domain name=PPR; Domain location=76-110; Score=13.2; E_value=0.2; Accession=PF01535.11; Description=PPR repeat
  Pfam module annotation: Pfam domain module=PPR::PPR::PPR::PPR::PPR::PP R::PPR::PPR::PPR::PPR::PPR::PPR::PPR::PPR; Domain location=140 -174::175-209::210-244::245-279::280-314::315-349::350-384::417
  Pfam module annotation: Domain location=522-556::557-591::592-626::76- 110
  Subcellular localization annotation: CTP_CleavageSite=27; ConfidenceScore=5.37e-01
MAALLQSSFLFPHATFPNPKPHHLAAAAATRPESPNVAPNPASARLRRLIAREDLAGAARLVELSASRDGEAPDVYLCTKLIRNLCRRGRTSDAARVLRAAEGSGSPVDVFAYNTLVAGVADALSLLDDMLRRGCQPNVVTYTVLLEAMCKNSGFEQAMAVLDEMRAKGCTPNIVTYNVIINGMCREGRVDDARDLLNRLFSYGCQPDTVSYTTLLKGLCASKRWDDVEELFAEMMEKNCMPNEVTFDMLIRFFCRGGMVERAIQVLQQMTEHECATNTTLCNIVINSICKQGRVDDAFKFLNNMGSYGCNPDTISYTTVLKGLCRAERWNDAKELLKEMVRNNCPPNEVTFNTFICILCQKGLIEQAIMLIEQMQEHGCTVGVVTYNALVNGFCVQGHIDSALELFRSMPCKPNTITYTTLLTGLCNAERLDAAAELVAEMLHRDCPPNVVTFNVLVNFFCQKGFLDEAIELVEQMMEHGCTPNLITYNTLFDGITKDCSSEDALELLHGLVSKGVSPDVITFSSIIGILSKEDRVEEAIQMFHLAQDIGMRPKALVYNKILLGLCKRHEIDNAIDFLAYMVSNGCMPNESTYIILIEGLAREGLLKEAQDLLSMLCSRGVVSKNLIEE

SEQ ID NO: 55944 - protein, 88 aa, Zea mays
  Coding DNA Sequence Number=SeqID_14165
MALHPAVSTRCTGVVRNDNASSAALGGCLTGDNRGMIVRAAKGTQMLGITKKDEKGEIMKAAIEMKIARIKDGYMAEVSTFKQRRLKF

SEQ ID NO: 55945 - protein, 125 aa, Zea mays
  Coding DNA Sequence Number=SeqID_14166
MQESLAGPPSQQNPPEGLPTLTTPLLPLPLSGKGYLCNFQGPICNCFKLCEDGGFITKKFRDSFEILPSEGVSRHVSRWISGQGPGLDRRNTEPAGYGDRRILILRFRFKIPRDRLRPARSRSNA

SEQ ID NO: 55946 - protein, 69 aa, Zea mays
  Coding DNA Sequence Number=SeqID_14167
MERMLLPTTDSSSADGYAWPDQVTRESGKFTSQQDGSNQRITRRPWNGALETGPCSARAAALEFPSEGD

SEQ ID NO: 55947 - protein, 443 aa, Zea mays
  Coding DNA Sequence Number=SeqID_14168
  Gene Ontology: Mol. function=oxidoreductase activity; Cellular component=mitochondrion; Biological process=electron transport
  Homolog annotation: Hit_ID=Q5W745; Match level="QueryCoverage=97%, HitCoverage=74%, E-value=0.0, Identity=86%"; Hit description =Putative NADPH dehydrogenase
  Pfam annotation: Domain name=Pyr_redox; Domain location=113-219; Score=65.8; E_value=1.4e-16; Accession=PF00070.17; Description =Pyridine nucleotide-disulphide oxidor
  Pfam annotation: Domain name=Pyr_redox_2; Domain location=1-266; Score=-2.7; E_value=0.00039; Accession=PF07992.4; Description =Pyridine nucleotide-disulphide oxidore
  Pfam annotation: Domain name=efhand; Domain location=272-300; Score =21.0; E_value=0.0043; Accession=PF00036.22; Description=EF hand
  Pfam module annotation: Pfam domain module=Pyr_redox::Pyr_redox _2::efhand; Domain location=113-219::1-266::272-300
MEWREDWWTERNGAFRFWEAECFKIDPTNKKVHCRSDVGTNINGNGEFVVDYDYLIVSVGARPNTFNTPGVTENCHFLKEVEDAQKIRKSVMKCFERAALPNLSEEERKKNLHFVIIGGGPTGVEFAAELHDFVNEDLAKLYPDVKKHVNISVIEAGGHILTMFDKRITQFAEEKFKRDGIDLKTNFKVVKVSNKDILMTNPATGEVAVPYGMAVWSTGIGTRPIIMDFMKQVGQENRRVLATDEWLRVQGCEDVYALGDCATIAQRKVMEDVAAIFRVADKDNSGTLTVKKIKDVLGDIYERYPQVELYLKSNQMKGFHDLLKDSDGSSKEFKELDIEQFKRALAQVDSQVKMLPATAQVAAQEGSYLADCFNRMKMCEEYPEGPIRIRGAGRHRFKPFRYKHLGQFAPLGGEQTAYQLPGDWVHVGHSTQWLWYSVYARAL

SEQ ID NO: 55948 - protein, 265 aa, Zea mays
  Coding DNA Sequence Number=SeqID_14169
  Gene Ontology: Mol. function=DNA binding; Cellular component=nucleus; Biological process=regulation of transcription, DNA-dependent
  Homolog annotation: Hit_ID=Q8GZA8; Match level="QueryCoverage=93%, HitCoverage=94%, E-value=9e-81, Identity=58%"; Hit description =Protein ULTRAPETALA1
MAAANGAAAVGAGAGLFSEEELREVSGVRWGEDFVEVTCGCTSHRYGDAVGRLRVCASGDLEINCECTPGCREGFAPSAFSRCVHHNSTTNCNVSADKLTPAAFEKHSGKETAGKWRNSVWVMVEGEKVPLSKTVLLKYYYLARKSGSGGGGGCGRRNGRPSHRDEFVCCTRCGKGRRFRLRSKEECRAYHDALAKAHWTCTDLTNDGVSCADEEERASRKVLRGCSRSPSCTGCMKCVCFGCETCRFVDCDCQTCVDFYRNSKE

SEQ ID NO: 55949 - protein, 124 aa, Zea mays
  Coding DNA Sequence Number=SeqID_14170
MTATPFCYTFQLCSFWTPSIQPTRGLRQGDPLSPYLFLSVAGAWCRGLFKLLPKESEEGAVRQMLQQYTKGRAGIGVIIRAYSTRLDQKSGASSLDGHLPCAGSHRMPRRSRLRCAIPAGDGVV

SEQ ID NO: 55950 - protein, 152 aa, Zea mays
  Coding DNA Sequence Number=SeqID_14171
  Gene Ontology: Mol. function=oxidoreductase activity; Cellular component=mitochondrion; Biological process=electron transport
  Homolog annotation: Hit_ID=Q5W745; Match level="QueryCoverage=77%, HitCoverage=20%, E-value=2e-43, Identity=76%"; Hit description =Putative NADPH dehydrogenase
MASNGSSLVRRAAAAVRRMPRWKKRLVFFAVGASTLTYACQDNRVLQICDVTGNKKKVVILGTGWAGASFLRNIDTSLYDVHVVSPRNYFTFTPLLPSVTCGTVEARSIVEPIRNIVRKHLKFASQVAQAHGYGPRHSALLSNVSQQVLESQ

SEQ ID NO: 55951 - protein, 89 aa, Zea mays
  Coding DNA Sequence Number=SeqID_14172
MGRTETQSTMARVRCDIETSMMAPMLFGTHAATHKERLGKPRRPRHIRTNTTLPRSNTPVYHNRVAPSLGSYRYSTPTLSNKKEEVAKT

SEQ ID NO: 55952 - protein, 39 aa, Zea mays
  Coding DNA Sequence Number=SeqID_14173
MTRDLTPYDQHLFSRSMAQGGAVGRTTGGGAVACGGRLL

SEQ ID NO: 55953 - protein, 33 aa, Zea mays
  Coding DNA Sequence Number=SeqID_14174
MEDKSHVAGKNGKDLLSMAKLQGEIRKAGSIRT

SEQ ID NO: 55954 - protein, 97 aa, Zea mays
  Coding DNA Sequence Number=SeqID_14175
  Subcellular localization annotation: CTP_CleavageSite=8; ConfidenceScore=5.31e-01
MAPPATERAAAVGVGAVVPSLLKQCSALTILFGKPYTSPFENKSPTLAPTSGELTSTVETMASFNNQAVAPSVTKLVLPITGGSSSEPANKKKKKEA

SEQ ID NO: 55955 - protein, 326 aa, Zea mays
  Coding DNA Sequence Number=SeqID_14176
  Gene Ontology: Mol. function=oxidoreductase activity; Cellular component=proton-transporting two-sector ATPase complex; Biological process=flavonoid biosynthetic process
  Homolog annotation: Hit_ID=Q9LU11; Match level="QueryCoverage=99%, HitCoverage=100%, E-value=1e-114, Identity=58%"; Hit description=IDS3
  Pfam annotation: Domain name=2OG-FeII_Oxy; Domain location=169-271; Score=106.9; E_value=5.8e-29; Accession=PF03171.10; Description=2OG -Fe(II) oxygenase superfamily
MEKLLHSTTSRTSLPDCFVFPADQVPPATSAAVSLPVIDMSCSRDEVVNHGISEQALLEMAAVGEEFFRLPAEEKLPFYSEDANKATRLFSGTTYETGGEKYWRDCLRFAYDFGAGDRIKDWPDKPRRLREVAENFTVLTRGLAMDLLRLLCEGLGLQHDYFEGDLTGGDVTLDINHYPPCPNPSVTLGLPPHCDRDLIAVLLPGPVPGLEVVYKGEWVKVVADPTVPHALVVNLGQQLEVVTNGVLRSIEHRVMTNSAMARTSVALFVAPTEDCLVGPAEKFLSQENPPCYRTLKFHEFKRTYNVVKLGSSINQRTNLRNTQKEI

SEQ ID NO: 55956 - protein, 56 aa, Zea mays
  Coding DNA Sequence Number=SeqID_14177
MRMRDGDARQGWGETTASPLLMLEKGAVRRRGALASGLRATSEQGNILIMNTQNWL

SEQ ID NO: 55957 - protein, 99 aa, Zea mays
  Coding DNA Sequence Number=SeqID_14178
MSWSEPRRGGHGRTNGGCWRARVKGVKGTLEDDPRAWLEGVYFRKSYPTKEKHSQGYAGLRESRLSKVTCTWSSFYPSSSTWPKLAIFYEPFISLDCYV

SEQ ID NO: 55958 - protein, 255 aa, Zea mays
  Coding DNA Sequence Number=SeqID_14179
  Subcellular localization annotation: CTP_CleavageSite=25; ConfidenceScore=5.33e-01
MSSSSSSLSSANVSSTTPSSEKTISDSAAVDLEPRNTVEFGTSRIYSSRVLEMQRLGYFGSGVGRAQGLKMSLRRRGSWLCLRLSLLLDFACQHIVDTECYGDAGEFKVVERGQDEEALRYIAHLGSGCDLVEEFITCEVWSLVHGWDLGEIIPRRMLTLGDKLVRSPAFTVDLCGRNAATFVPEVESEAVKIVRKYALKTEMLRSWDIRGSNIRLKCVFELNKLPYGPYPEGDSADAGDDRGKQVKPQADEGSL

SEQ ID NO: 55959 - protein, 92 aa, Zea mays
  Coding DNA Sequence Number=SeqID_14180
MALVSRGGLCTLALGDDAVGGDGQDNDDDSVSEVSHFTDNLASKIEELTMQVVLCFWLLSDAPHHLHYRDSGQNDAGLIPSGTQWWLGHKRG

SEQ ID NO: 55960 - protein, 174 aa, Zea mays
  Coding DNA Sequence Number=SeqID_14181
  Subcellular localization annotation: CTP_CleavageSite=56; ConfidenceScore=5.50e-01
MPLQTPAHPLDPPPNQPRSSLPQPMQHIAFATPLVSMTALHRNPPLPVSGEIPTLSHSTAGEQPSPCPLCVVAFAERLAPFELARSSFPLAEPCAPAYATVKSRLCSPAMISMVMVASIMAPISSLRDLGMGIVPQLFPEGRGDDEDDGFDYDYGMVSGILSVWKGYFWVNNLG

SEQ ID NO: 55961 - protein, 67 aa, Zea mays
  Coding DNA Sequence Number=SeqID_14182
MPLLFSWPPLLHPLSIFSHGFRTIAAAADMESPLCRAHGMLDEMSQPVTPRSMQPHPTMSSTLDLCE

SEQ ID NO: 55962 - protein, 162 aa, Zea mays
  Coding DNA Sequence Number=SeqID_14183
MAEAQGFDGATMADSSCARKRSGECGPDATGRERAHRRVSRAADSKAKLTVALDGARAQRRPRNRRWASADGGGAPCSRAQSEREGERAGQRAQMREGRWASRARGSKGAPGLGRDRRTHGRGRVNGGEIVGGRVFNSNSNQVSNSDQFKCMQQFKEYLGSI

SEQ ID NO: 55963 - protein, 153 aa, Zea mays
  Coding DNA Sequence Number=SeqID_14184
MGKKISKLEASNAEKDRRITTLEVELKLEKEEYKAQTSKIRRASVEAAVDLSVAQIGPKMLSDIWNKGRKEFSIEESMKNGEKALKAAKKLQALERIYRGRKTKTIIEVEHTEAEAEDGVIEAEAIAARVVKKVADDVVLKICEQVYNEMMRG

SEQ ID NO: 55964 - protein, 115 aa, Zea mays
  Coding DNA Sequence Number=SeqID_14185
MDPMLDAIIIGAEPVCVGATIFGVHTSDGGMTWNLCGTYLGAIDLGAEVGARSNRTLRLTGWGGDRGGAGLRGRRTRLGEGGGELGGGRAAGRGKLGGGGRGGAGSGGGELGKRT

SEQ ID NO: 55965 - protein, 101 aa, Zea mays
  Coding DNA Sequence Number=SeqID_14186
MDEVCQSKARHSKVTPASDIASDGSSDPSLRLLLLRDLCVVARTATDVVVIKGASLAEVQEKAASQTPPPAEARGKSPAAPASSIGAPAPRAGDDAVSPGG

SEQ ID NO: 55966 - protein, 1096 aa, Zea mays
  Coding DNA Sequence Number=SeqID_14187
  Gene Ontology: Mol. function=protein transporter activity; Cellular component=Golgi transport complex; Biological process=intra-Golgi vesicle-mediated transport
  Homolog annotation: Hit_ID=Q5ZAZ1; Match level="QueryCoverage=91%, HitCoverage=98%, E-value=0.0, Identity=72%"; Hit description =Putative low density lipoprotein B
MPAVPVPGGGGSSDAEELFRTKRIPEIRAVEGATRREISAKEEELRQLVGRSYRDLLDSADSILLIKQSSDAIFYNLARISDSLSSLSPPPEPSLAVSAVSPSPSAGGRARLYALAARAKYLVDTPEHIWGRLDEGLLLEAAGRYLRAQVVYGRLSRDAAAAARFPLLAHQAQLVEAFRPQIAQRARERLADRRLPVAAHADALAAVAAIDAPSLAPAPALLLFLTSRRAWISQDLAGLASDLSSYTSVLCDIARIVRITLGHVGQLFVPALSDMPLFFKTVTEKTPPEQLFGGIPDPDDEARLWKEHMNQLEAIMVLLKPDVVAAACTDWLKECCSEIFGVIAGEQKLVDAIGSGELLGSVQRLVRDALDGRDGLERSLEQWLKSVFGSDTESPWDQIRGLILKDDKDIFEDWMEEAFVRRMKDIVHSEFDILGSSVNVKESIHAIGANADPKDAGDFLAYLRKSSKGGGFWFSESKIKKGGVLAHLKPIADENDFRSCLTSYFGPEVSRIRSAIDSKCKNILEDLLSFVESHNSTTRLKELVPYLQEKCYKTISGVLKELEAELRKLSALLGTKKEGNDIPAASIIAERSLFIGRLLFALRYHSSHVPLILGSPREWVKEVGGAAFARLSSPTARHLRASFTPRRHTFDSPKSPGRQFSDSPRRQTIAAAVSLFGANDRSNPRLDELNKTLQSLCIMAHNVWIAWVSTELSHILSYDLNKDDSLSSATPLRGWEVTVIKQEETTEGPLEMQIALPSMPSLYIISFLYQACLEIHKVGGHILDRIILHNFAWELLQKVINIYENFLSSVESGNSPVSEKGILQILLDLRFIGDVLSGGTSSSTNTTEMQTKQDSLPSTISKTSFRRKQSQLHADSAVIEPINKLVNRLSQILDPIDWATYEPYLWENEKQSYKRHVVLFGFLVQLNHMYTGTMQKLPTKSNTDSNIMRCSQVPRFKYLPISAPAISSRSHKPSLQSLSSESTSKNPWKSYSNGDRSTTPEFDDNASLVGAAPLLKSFVTQVGTKFGENTSRWGSMLSDGQDEYRESLGFALIRAEIIGKQASKQDSGKFGWHEVFDWFSVSPLCIWMTYLGGKRL

SEQ ID NO: 55967 - protein, 72 aa, Zea mays
  Coding DNA Sequence Number=SeqID_14188
MAATLRLRILAAAAAAAVVASSLVGVATAAEAPAPSPAGPTGAAAQVYINCALAGVVPTSLTHEALGLLLQG

SEQ ID NO: 55968 - protein, 566 aa, Zea mays
  Coding DNA Sequence Number=SeqID_14189
  Gene Ontology: Mol. function=pepsin A activity; Cellular component =cellulose and pectin-containing cell wall; Biological process =proteolysis
  Homolog annotation: Hit_ID=Q5ZAZ8; Match level="QueryCoverage=75%, HitCoverage=84%, E-value=0.0, Identity=80%"; Hit description =Putative aspartic proteinase nepenthesin II
  Pfam annotation: Domain name=Asp; Domain location=90-451; Score= -36.1; E_value=1.8e-11; Accession=PF00026.14; Description=Eukaryotic aspartyl protease
MRPPEVAVAALLLVAAAAVAAAAAAAESAAPLPAALRLQRAVPHQGVPLEELRRRDAARHRVSRRRLLGGVAGVVDFPVEGSANPYMVGLYFTRVKLGNPAKEFFVQIDTGSDILWVTCSPCTGCPTSSGLNIQLESFNPDSSSTASRITCSDDRCTAGFQTGEAICQTSNSQSSPCGYTFTYGDGSGTSGYYVSDTMFFETVMGNEQTANSSASIVFGCSNSQSGDLTKADRAVDGIFGFGQHQLSVISQLNSLGVSPKVFSHCLKGSDNGGGILVLGEIVEPGLVYTPLVPSQPHYNLNLESIAVNGQKLPIDSSLFTTSNTQGTIVDSGTTLAYLADGAYDPFVSAIAAAVSPSVRSLVSKGSQCFITSSSVDSSFPTVTLYFMGGVAMSVKPENYLLQQASVDNSVLWCIGWQRNQGQEITILGDLVLKDKIFVYDLANMRMGWADYDCSMSVNVTTSSGKNQYVNTGQFDVNGSARRASYKSLIPAGIVTMLVHMLIFGTGSPKNLVGVNIRLSSNGRFSVRPSVATSGDDARDDVQKVFDDMLKPACSNPVVDVLLKQQE

SEQ ID NO: 55969 - protein, 105 aa, Zea mays
  Coding DNA Sequence Number=SeqID_14190
MSDRRYGYSYPPPQGKLYAEAEDNGLYYYRVHSVTYMHCLTVYAPGNAGYYNNGPPVMAPPPYQYAAPPPPRREPSFLEGCSMFLISLDLGHMNAVSPLCAAAAS

SEQ ID NO: 55970 - protein, 109 aa, Zea mays
  Coding DNA Sequence Number=SeqID_14191
MARWARAEAVMTVDEAVAPADRARAATNESVLGNGVPKESLGKSLRTAHSTKFPDEQVCEAERTTMSCSTERMTKSSVEQVSEAERTTKSPTEQVYEAERTTKSPTEQV

SEQ ID NO: 55971 - protein, 120 aa, Zea mays
  Coding DNA Sequence Number=SeqID_14192
MAVKEEAVAMRPGLAARRPLVVVGFGRGYEESSSLLAGALEWTRHRGSQGKGLTVTAVFYSSILITSEKSHESRDGNGYPRPDTRWVFTPLGNLHPMGKRVLERSTYTYTREPVGIKYPI

SEQ ID NO: 55972 - protein, 249 aa, Zea mays
  Coding DNA Sequence Number=SeqID_14193
  Subcellular localization annotation: CTP_CleavageSite=47; ConfidenceScore=5.41e-01
MASLTTTTSSPAALPAATTATAASSISPHAGSKRPLLAGDDAPWRATAATAAGQGIRPVPRIHHAPVLSVATQEDYAAYALDIMKHPNPIGEGLAMEAFAEAAGPECIVPGQQAPLRLMGLKVWPLDIDMKFLEPFGRELHSMKKDSQHVAVGGLVCNQCSCRLWRLSGHTILLPVHAWYRGADGDGDKHNCAKMATRIDERHLNGSVEIGALIHGNWQPSASGFQVPVVIQRCLPPVGIKRPMMFFLH

SEQ ID NO: 55973 - protein, 524 aa, Zea mays
  Coding DNA Sequence Number=SeqID_14194
  Gene Ontology: Mol. function=intramolecular transferase activity, phosphotransferases; Cellular component=cytoplasm; Biological process=glucose catabolic process
  Homolog annotation: Hit_ID=Q2QPB6; Match level="QueryCoverage=89%, HitCoverage=100%, E-value=0.0, Identity=81%"; Hit description =Metalloenzyme superfamily protein, expressed
  Pfam annotation: Domain name=Metalloenzyme; Domain location=338-449; Score=14.5; E_value=1.7e-05; Accession=PF01676.8; Description =Metalloenzyme superfamily
MAGAEGRGPRRSRVAFVLVDGIGDVSVPSLGGRTPLDAACAPRLDAVAAAGVTGLMDPVEPGLACGSDTAHLSLLGYDPREYYRGRGAFESMGAGLAMAPGDIAFKSNFATLDENTGVIISRRADRHFEEEGPILCAALDGMKLRSFPEYEVRVRYATEHRCGVVVKGPKLSGNISGTDPLKDNRLHLKAEPLDGSKEAKNTAAVVNELSMEITRILVSHPINAKRAAEGKNIANVVLLRGCGIRIEVPAFETKHGLAPCMVAPTKIIAGLGLSLGIDILEAPGATGDYRTLLTSKAKAIAKALSAPMDTPPRVFVPGEDGYKAGKENGYDFGFLHIKAKCIFRFFLLVLTIYVIVIALVIMSMQAIDDAGHDKAVKLKVRGLEAVDRAIGQLARLLWEAEKAGHYQYFLCVTGDHSTPVEYGDHSFEPVPFAICRLRDYAGAIGEDNIMNTQLDDFPLPSVKSGEDLLDSIESLEHKPGQLKAFSGDSVCEFNEIAAARGCLGRFPGSEMMGIIKKFIKAKND

SEQ ID NO: 55974 - protein, 958 aa, Zea mays
  Coding DNA Sequence Number=SeqID_14195
  Gene Ontology: Cellular component=nucleolus; Biological process =regulation of transcription, DNA-dependent
  Homolog annotation: Hit_ID=Q1S808; Match level="QueryCoverage=54%, HitCoverage=87%, E-value=1e-125, Identity=47%"; Hit description=Plus- 3
  Pfam annotation: Domain name=Plus-3; Domain location=596-686; Score =53.8; E_value=5.8e-13; Accession=PF03126.8; Description=Plus-3 domain
  Pfam annotation: Domain name=Shikimate_DH; Domain location=45-155; Score=44.0; E_value=5e-10; Accession=PF01488.10; Description =Shikimate  quinate 5-dehydrogenase
  Pfam module annotation: Pfam domain module=Plus-3::Shikimate_DH; Domain location=596-686::45-155
MPHKETALRCCDDVDPIARDIGAINTIIRRPDGKLVGYNTDYSGAISAIEDGIRASQPTDSITSPLAGRLFVVIGAGGAGKALAYGAKEKGARVVIANRTFELESYHPEKGMILANATSVGMHPNVDETPLSKHALKSYAVVFDAVFVPRETRLLREAAVCGATVIDGLEMLIRLVMVQFKLFTGGMTGCVRPAGHMYIADQTNNALTAHPDLIIVVFFHFDAARAGATISSSLLAASPSRRSTAPPSPSIPRIEPSSLPAPTGTSVASSPGACPIHPPRSCCELWFLPQIQDGPTVPVLSRFSEVWKDLLSWGCFGCVGIARGGGGSGFAMSKSNLDDLLLQAAGRTGKNHSRPSNPRWNSGGSGSDGFDDDDSDAAPTYSRKKPSSQVPLKKRHQPEQGGRRGSGGWKDEDDEDEDGRRSGGEDSDSAPSVGSDLYKDEDDKERLENMSELQREMILADRGTRLDDYKLKQRARASSSKTDKVGARKDSSPPPPPSRMRSSTRADKSGSAAKSALDELRAKQRMRQQAPEARRFTDLLPRSGSPTRRRAGSPPSDGSNDGDGRGRPNDHGRIADDSRDDEFDESPSRLDPLKFDDVKSITLRRSKAGIGQTKNGTPRYRLCIVRNVDASDPDRNYKLESYSTCKYLNVVWDSEANAARWQMTQVSDSPPNEEEFKEWLQEAEKHGARIPTRQEVLDKKEAIQEAYNFVYSAATVQQMLREKSAVRRPINIAAEKDRLRSELEMALSRRNEAEAERIRVKLKNLQSRPQPVSKDNKAAKLEAMNRKNRADNFKNASELKPVNTSLKAGEAGYDPFSRRWTRSRNYYASKPGGDNAEETANKSSSIVEPSNGDIKSKAQTGTSATTAAQVAAADAGKLTDTNAPVDLGTESNVMHTFELPISLSALQEFGGAKGLFDGYMARRQKIEATMGYKVPDNDGRRHALTLSVSDYKRRRGLL

SEQ ID NO: 55975 - protein, 54 aa, Zea mays
  Coding DNA Sequence Number=SeqID_14196
MGSGRFESRTGRLGRYKGEPEARPPKSATFGALSASGIKMIIKQQRNGIMIHML

SEQ ID NO: 55976 - protein, 111 aa, Zea mays
  Coding DNA Sequence Number=SeqID_14197
  Subcellular localization annotation: CTP_CleavageSite=56; ConfidenceScore=5.61e-01
MASIVLWSQPDLSVRSLFVHRVSHVLAFAVESSNPSSPCSTPPRQLALDTISSSFRASSRNTKRRVKTKLAAWCSPSSLEDMVAGVTWPYILPPGWTVEWDPASAEEEHEE

SEQ ID NO: 55977 - protein, 96 aa, Zea mays
  Coding DNA Sequence Number=SeqID_14198
MAWTNSSDGVDEQESEEHGAVLRGVAAGGSWRVWAGVLTQRGRRHLGGSRVSGLAGALDGPPGAAHGAESRREERAGWGDQGWRLGQQGRQGVGGG

SEQ ID NO: 55978 - protein, 140 aa, Zea mays
  Coding DNA Sequence Number=SeqID_14199
  Gene Ontology: Mol. function=protein serine/threonine kinase activity; Biological process=protein amino acid phosphorylation
  Subcellular localization annotation: CTP_CleavageSite=60; ConfidenceScore=5.07e-01
DESLLQDNSLSAELSSNLHFGDATGQGSGSIRSANFQGHVFATSNPVPTNQRADQLFHVSSQGLSAHSSVPVNYGGYNPPNYPPQNLRPRRGQPILHQRYNQATSSPMRPMGSHHSGQPAWPSFGMGDGVPWGNLPTPLS

SEQ ID NO: 55979 - protein, 234 aa, Zea mays
  Coding DNA Sequence Number=SeqID_14200
  Gene Ontology: Mol. function=protein binding; Cellular component =spliceosome; Biological process=mRNA processing
  Homolog annotation: Hit_ID=UPI0000DA43ED; Match level="QueryCoverage =79%, HitCoverage=98%, E-value=1e-18, Identity=32%"; Hit description =PREDICTED: similar to keratinocytes proline-rich protein
MGGVAGNDGASCDVVGLSPGLGEVEAPPRSRSSLSSKAEVESEPLGRARRRPSAEARAESEPWGRAKRSSSSSGAEPESEPWGRAKRSSSSCGAEPESEPWGQAKRSSSSCGAEPESEPWGRAKRSSSSSGAELESEPWGRAKRSSSSSGAEPESEPWGRAKRSSSSSGAEPSPSPRATFALNAPAIWSVGVAVWPRLLLGEDWTSGEPKLCADGGYQLRFRSLKGTPNYGPRQ

SEQ ID NO: 55980 - protein, 326 aa, Zea mays
  Coding DNA Sequence Number=SeqID_14201
  Gene Ontology: Mol. function=diacylglycerol kinase activity; Cellular component=intracellular; Biological process=protein kinase C activation
  Homolog annotation: Hit_ID=Q9LIE7; Match level="QueryCoverage=65%, HitCoverage=63%, E-value=1e-44, Identity=31%"; Hit description =Selenium-binding protein-like
  Pfam annotation: Domain name=PPR; Domain location=137-171; Score=2.1; E_value=4.2; Accession=PF01535.11; Description=PPR repeat
  Pfam annotation: Domain name=PPR; Domain location=211-245; Score =44.6; E_value=3.4e-10; Accession=PF01535.11; Description=PPR repeat
  Pfam annotation: Domain name=PPR; Domain location=282-316; Score=0.7; E_value=6.2; Accession=PF01535.11; Description=PPR repeat
  Pfam module annotation: Pfam domain module=PPR::PPR::PPR; Domain location=137-171::211-245::282-316
  Subcellular localization annotation: CTP_CleavageSite=68; ConfidenceScore=5.34e-01
MRQWAEAASCYATARGRGVTATRQRHRLMFPAPRCAVSLSQAHTNASGTSTCGGVGGGGGMKALRHPTASQVRRLCKQGRLDGARLLLLDALPSPPPPPLYNALLIAYVARALPEHALRLYALLNHAARPTPRSDHYTYSCALTACARTRRLRLGKSVHAHLLRRARSLPDTAVLRNSLLNVYASCVRYRGDGSVDVVRRLFDAMPKRNAVSWNTLFGWYVKTGRPQEALEMFVRMLEDGIKPTPVSFVNVFPAVAKEDPSWSFVLYGLLVKHGMEYVNDLFVVSSAIVMFSELGDVQSAWRVFEYAAKKNTEVWNTMITGRPSYW

SEQ ID NO: 55981 - protein, 364 aa, Zea mays
  Coding DNA Sequence Number=SeqID_14202
  Pfam annotation: Domain name=RRM_1; Domain location=213-284; Score =18.8; E_value=0.0026; Accession=PF00076.12; Description=RNA recognition motif. (a.k.a. RRM, RBD, or
MGACNSCEATAVAAAPGPATAEARVVLADGALRRFPGGTRASQAVKAAAAGAASWFLCSADGLELGGAVVPVRPEEALQPGQLYFVLPAAMRRRPLQAEEMAALAIRASAALAGDHDGPLVFPEAVAAAGAGARCGKGPARFTPFGLGGRRAHAAEAPTALAALRYATLRTAFLRFSGSPLRRKLLEMAAKSGYTRRLPLTGETAPPPPSAVLYVANCGPAVGVTDADVRSTFGAFGEVAGVQAADDSGARIIVRFHEPAAAEAAMAALHGRPCDLLAGRVLHIKTRNVDSKQFLGELPTFVSTVLEKIASFPGVKDCATRLVDQLTEKVVMPGITIYHIIKSMPWVVKSSKGIQGEFLSLSER

SEQ ID NO: 55982 - protein, 380 aa, Zea mays
  Coding DNA Sequence Number=SeqID_14203
  Gene Ontology: Mol. function=protein serine/threonine kinase activity; Cellular component=spindle pole body; Biological process =protein amino acid phosphorylation
  Homolog annotation: Hit_ID=Q9FGC1; Match level="QueryCoverage=73%, HitCoverage=46%, E-value=1e-67, Identity=55%"; Hit description =Protein kinase-like
  Pfam annotation: Domain name=Pkinase; Domain location=151-380; Score =3.9; E_value=8.6e-09; Accession=PF00069.15; Description=Protein kinase domain
  Pfam annotation: Domain name=Pkinase_Tyr; Domain location=151-335; Score=-137.3; E_value=0.00048; Accession=PF07714.7; Description =Protein tyrosine kinase
  Pfam module annotation: Pfam domain module=Pkinase::Pkinase_Tyr; Domain location=151-380::151-335
  Subcellular localization annotation: CTP_CleavageSite=84; ConfidenceScore=5.07e-01
MEESGGSCGKREDAAPPWRPSDSTAFGRFAAAASPPEASPSASANGAAARVSSLHGVRRKTGNPSFYQSAIACDILLWVSSLCSVARLTAGIIQTYLQCDPEFKYSEVLNPKRFLTNPSTPAHNDGLDNANWDLILYVNLELVNKMSNRRFIVKEMLGQGTFGQVVKCWDTETNDYVAVKVIKNQPAFYHQAIMEVSLLRTLNQKFDPDDQHNIVRMLDYLSFQNHLCIAFEMLGQNLYELLKRNHLRGLKLKYVQAFSKQILDAMVVMREAGIIHCDLKPENILLAPRGQPPDELLREAKNTARFFKHVGSIYPGNEAPTGLCSAYKSLSEEDVEVRDSKKPQMGKWYFPHLKLDKLICTYPWNNSELTVPRVKHHLFV

SEQ ID NO: 55983 - protein, 176 aa, Zea mays
  Coding DNA Sequence Number=SeqID_14204
  Gene Ontology: Mol. function=transporter activity; Cellular component= outer membrane-bounded periplasmic space; Biological process=transport
MWSFPAAKRMSNVAVVVPKSGSSLWADLWVCYGFPHPQCIVVSNCPFDCYGFIRRRQHRAPQDSRPTKSVAEPEAHLLHSSTSGSTSACRVLGAYPSAKTSSPEHLRTPLYLESPVPPEAPRDSNKRRTKLDTNLVRGVPPPEILERCEFLEPLSVVRVVEAEKWASKMTSQLSCF

SEQ ID NO: 55984 - protein, 148 aa, Zea mays
  Coding DNA Sequence Number=SeqID_14205
  Gene Ontology: Mol. function=transporter activity; Cellular component= outer membrane-bounded periplasmic space; Biological process=transport
  Homolog annotation: Hit_ID=Q4C6S9; Match level="QueryCoverage=87%, HitCoverage=47%, E-value=1e-07, Identity=26%"; Hit description=Twin -arginine translocation pathway signal precursor
ATHKDCRRRGGGTWEAALQNFKTKTYALSVPLRKGALRGSFPPSWIKDFVEVQGKKLKFSAELRANLDGIFSEMSRCMDKGQVQPKSAMAADVVSLGDSWLGYAICKELLEPVKNAEEQDWFRRLSDRWKDWEDLWRPELAGRISMVY

SEQ ID NO: 55985 - protein, 165 aa, Zea mays
  Coding DNA Sequence Number=SeqID_14206
  Gene Ontology: Mol. function=nucleic acid binding; Cellular component= mitochondrion
  Homolog annotation: Hit_ID=Q8H656; Match level="QueryCoverage=68%, HitCoverage=51%, E-value=9e-49, Identity=83%"; Hit description =Putative plastid protein
  Subcellular localization annotation: CTP_CleavageSite=42; ConfidenceScore=5.71e-01
MATAARALVAARPARPLLPSRRLPSSSSIRPARQRAGVGCVRCMARRPDSTYSPLRSGQGGDRAPTEMAPLFPGCDYEHWLIVMDKPGGEGATKQQMIDCYIQTLAQVVGSEEEAKKRIYNVSCERYFGFGCEIDEETSNKLEGDLFGSLFKSKYVQCDFIFCFS

SEQ ID NO: 55986 - protein, 70 aa, Zea mays
  Coding DNA Sequence Number=SeqID_14207
MAEALAAMAGGKELAGAKEGCLAGDGFELGIKVNTLDLWLKGSIRVFIGVAHFAFLKNSFVLNMILLSIS

SEQ ID NO: 55987 - protein, 146 aa, Zea mays
  Coding DNA Sequence Number=SeqID_14208
  Gene Ontology: Mol. function=zinc ion binding
  Homolog annotation: Hit_ID=Q109A4; Match level="QueryCoverage=73%, HitCoverage=46%, E-value=1e-32, Identity=64%"; Hit description=Zinc finger, C3HC4 type family protein, expressed
  Pfam annotation: Domain name=zf-C3HC4; Domain location=40-81; Score =38.0; E_value=3.2e-08; Accession=PF00097.15; Description=Zinc finger, C3HC4 type (RING finger)
MRDLVVPGVSLFLRPSAAALPPVLPYAAAAARKKGLPEDCPICLDAFGEDDGVRVVPACGHLYHAPCIDRWLDVRNSCPVCRCAVASLYAADRDRGADALTAFDDDNDDQEAVLQRVVAMIEAIRDEQQREDAVARRAPAGGGGGS

SEQ ID NO: 55988 - protein, 86 aa, Zea mays
  Coding DNA Sequence Number=SeqID_14209
MGSSSLRAEWESRLVGGYEIDGSGYDYGAASPLQPNRILAEYVDVYSPLLYTPNPPSPGCQHCNHCSGEDEAVKGDFQEFQDYDEF

SEQ ID NO: 55989 - protein, 340 aa, Zea mays
  Coding DNA Sequence Number=SeqID_14210
  Gene Ontology: Mol. function=metal ion binding
  Homolog annotation: Hit_ID=Q75KP7; Match level="QueryCoverage=72%, HitCoverage=55%, E-value=2e-21, Identity=32%"; Hit description =Putative RING-H2 zinc finger protein
  Pfam annotation: Domain name=PHD; Domain location=110-155; Score=0.8; E_value=0.048; Accession=PF00628.19; Description=PHD-finger
  Pfam annotation: Domain name=zf-C3HC4; Domain location=111-152; Score= 27.3; E_value=5.3e-05; Accession=PF00097.15; Description=Zinc finger, C3HC4 type (RING finger)
  Pfam module annotation: Pfam domain module=PHD::zf-C3HC4; Domain location=110-155::111-152
  Subcellular localization annotation: CTP_CleavageSite=75; ConfidenceScore=5.63e-01
MARWRVAPPLAVLLLVLLSTAARPSVAQPSNNNSTSSQHHSRTTAGGGFTPTTVIVLVAGGSAAPPGPPRVGGARAGLDKEVVESFPTAVYGDVKARVAARSGSGSGPLECAVCLAAFEDQDELRVLPACCHVFHPDCIDPWLAGAVTCPLCRADLTAAAAPYYPPASSDGSGSGSNLAARPHEAVREETDDEEERGEARLVAACTPESVVASLGAAPPYHEFHYRRTQSAMDVPDRHTLRLPEHVMKELTAVRGHRRAASLAAYPGAAERTPGWLASIWRSVSWQRPSRTDPDAVDDSGGSKRVVPINGAPAERPSGGSGDDATDDMEKPDHDALLNQV

SEQ ID NO: 55990 - protein, 747 aa, Zea mays
  Coding DNA Sequence Number=SeqID_14211
  Gene Ontology: Mol. function=ATP binding; Cellular component=nucleus; Biological process=apoptosis
  Homolog annotation: Hit_ID=Q8H7P5; Match level="QueryCoverage=79%, HitCoverage=99%, E-value=0.0, Identity=74%"; Hit description =Putative F-box containing protein TIR1
MKKSEHLNSLSERCMGDSDRKPYPAQLCPANAWHLRCARVANDKLLRQNMPCRRKSGPLRKAATFGASSRSAVRATAIAIFGSALLCSRDTVADPALLNLVLINKEQEQPPPLSLDRKEDGALRRSEIARDDCRHRMLIQLGLPQPAPRDVRGGRGPAAAQAAVRVAARGPGARQRARDGAPVPGRPAGPERRLAGLPLLAPRRVRHPRLRRRPQPPGRLGHPRRAPLPQRAEPPPQGPPALSPTSTSSRTAGTPPPSRPWAAAVAAGSFPALTSLYLKRIPVTDADLDLLSRPLPASFRDLTLHLCDGFTSRGLASIASHCRGLRVLDVVECDMAEEQEVVDWVAAFPPEPTNLESLSFECYEPPVAFATLEALVARSPRLSRLGVNLHVSLGQLRRLMAHAPRLSHLGTGSFRPAEGGEGEAEFGEVVSAFVSAGRARTLVSLSGFRDLAQEYLPIIDVVCSHLKSLDLSYAAVTPNQILMFIGQCYNLETLWVLDSVRDEGLDAVGIYCKKLQTLRVLPLDAHEDADELVSEVGLTAIARGCPALRSILYFCQTMTNAAVVDMSRHCPELKVFRLCIMGRHQPDHATEEPMDEGFGAIVKNCRKLTRLSTSGQLTDRAFEYIGRHGKSLRTLSVAFAGNSDVALQYILRGCSKLEKLEIRDCPFGDAGLLSGMHQFYNMRFVWMSGCNLTLRGCKEVARGLPRMVVELINGQPDESERKESVDILYMYRSLDGPREDVPPFVKI

SEQ ID NO: 55991 - protein, 55 aa, Zea mays
  Coding DNA Sequence Number=SeqID_14212
MGRLEPRAEWESQLVGKMCDLCRVLETGCLHCTQCSGGEAGNMDDFEEFQDYDEF

SEQ ID NO: 55992 - protein, 80 aa, Zea mays
  Coding DNA Sequence Number=SeqID_14213
MAYQMLLLWVHIYMPSALQLGGPRLSLTVAILAKGRNLRTWNKVVHDMKSVVREKDEPVPKLLEEKLRLDNGKSNCHTRF

SEQ ID NO: 55993 - protein, 116 aa, Zea mays
  Coding DNA Sequence Number=SeqID_14214
  Homolog annotation: Hit_ID=Q6QP51; Match level="QueryCoverage=45%, HitCoverage=28%, E-value=4e-15, Identity=84%"; Hit description =Putative growth-regulating factor 1
MPRLLDYGTGAATRGSPARDPTVPTGCNDHGPVSRGRKRDGWDRERGYFERDPSPQRKQAPSPPTDQGFEGWPLGRVRPPPQSTRAPSSLLIRGSNVGPSEGFDSHPRALGLLAPY

SEQ ID NO: 55994 - protein, 104 aa, Zea mays
  Coding DNA Sequence Number=SeqID_14215
MARPSLERWGSGSSMRAMDRDLAEVGPGRDAELGRLGAGRKELLLGPPALVELGHGGFCPCAREAREEGAMGGSAHRQSELVLGRTERRIIRTRNLICLASLEN

SEQ ID NO: 55995 - protein, 121 aa, Zea mays
  Coding DNA Sequence Number=SeqID_14216
  Subcellular localization annotation: CTP_CleavageSite=42; ConfidenceScore=5.47e-01
MGSWQVPSLQNVLTMVGPRVAHLGKVKAMMSGSDARMLAKASSAARRGSAATLTWESREGVVLGEGWARNGERVNSESLWRHGPRLVAAVARTPKERLRVHRGGGWARPACGALRELGHGC

SEQ ID NO: 55996 - protein, 327 aa, Zea mays
  Coding DNA Sequence Number=SeqID_14217
  Gene Ontology: Mol. function=carbonate dehydratase activity; Cellular component=extracellular region; Biological process=one-carbon compound metabolic process
  Homolog annotation: Hit_ID=Q6Z9S4; Match level="QueryCoverage=76%, HitCoverage=91%, E-value=1e-109, Identity=73%"; Hit description =Putative dioscorin class A
  Pfam annotation: Domain name=Carb_anhydrase; Domain location=93-319; Score=95.1; E_value=2e-25; Accession=PF00194.11; Description =Eukaryotic-type carbonic anhydrase
MKDIPSSFIRIIVHRDNECVDARAITIQREQYEASKKAKQSPQAERLQKGMGHLRGLTAARLLAAAFLLSVAVPAARAQEETEHEEEFSYVVGDENGPEHWGSIKAEWGNCSAGRMQSPIDLSHERVSLVRSLGYLTHSYRPAEAAIANRGHDIMVRFKGDAGFLVINGTAYYLKQMHWHSPTEHTVDGRRYDMELHLVHESSANKAAVIGMLYEIGAEDPFLQALEPSIHRIADRQDREEAIGVVDPRRARGRASVYYRYVGSLTTPPCTEGVIWTVVKRVRTVSRHQLELLREAVHDGMEKNARPVQDVNDRDISIFRPKPHKHY

SEQ ID NO: 55997 - protein, 148 aa, Zea mays
  Coding DNA Sequence Number=SeqID_14218
MDNVKGWESAHHLRHINELFPPHGAAPLRTSAFNEQSPMDQTLLSPWFMLLTFIEPRTTLWFNSPLDGSTTRVRSNNGGSTFFHRVLSLSLRSAMVLKSQARWSYGRGLVPAYIRDGNSAGRDCGEIMDEVPVELGGVCCDHTGRRGI

SEQ ID NO: 55998 - protein, 77 aa, Zea mays
  Coding DNA Sequence Number=SeqID_14219
  Homolog annotation: Hit_ID=Q10QZ3; Match level="QueryCoverage=62%, HitCoverage=6%, E-value=9e-17, Identity=73%"; Hit description=Copper- translocating P-type ATPase family protein, expressed
MMCGGCAAWVRSILAWTLVALCCGSLGIHIGHGTFLDLLHNPYVKCGIATTALFGPGRGSNRLILKGIEQTGSSVCK

SEQ ID NO: 55999 - protein, 89 aa, Zea mays
  Coding DNA Sequence Number=SeqID_14220
MAEGFGELNPGPSAVAWQAGLVTEAHDAGERSLTLGPHPLVTQGDITGTQRLRRWAHEAVSIVDWLGRWGEKLGCTVGEVLGSWVWIPT

SEQ ID NO: 56000 - protein, 140 aa, Zea mays
  Coding DNA Sequence Number=SeqID_14221
  Gene Ontology: Mol. function=serine carboxypeptidase activity; Biological process=proteolysis
  Homolog annotation: Hit_ID=Q75HY2; Match level="QueryCoverage=86%, HitCoverage=27%, E-value=9e-33, Identity=59%"; Hit description =Putative serine carboxypeptidase
MVVMGSTSEKMYLCQPFFLTGEICMCKYIPTVGAHILHTNRELLEALCVNLRGMAISNGLTHPVAKVATHADLAYFLSNLNARQKQELEALQSELVSLTHAQRWVASSDMRGQVLSRLQNMTGQATLYDYAKRWDYGCPR

SEQ ID NO: 56001 - protein, 215 aa, Zea mays
  Coding DNA Sequence Number=SeqID_14222
  Pfam annotation: Domain name=PSI_PsaH; Domain location=82-209; Score=- 31.9; E_value=0.052; Accession=PF03244.4; Description=Photosystem I reaction centre subunit VI
  Subcellular localization annotation: CTP_CleavageSite=31; ConfidenceScore=5.42e-01
MQESLAGPPSQQNPPEGLPTLTTPLLPLPLSGSGLGAINQGTTGASAQVVSRLRILFVVLRVDSRKAQGLLSKFPGLKGYRMRTAVQITFNGLDFIASYTLHMRSDHDPVIHRAPRFTPYPNRSPTDLRSRSNRPGQYATHDLSRPSRINGLWSVFFPSFPADPNYGGARTPTADHGQRKPDSHTSVPITKLTDATPCRGRGESIGSNLTCANTE

SEQ ID NO: 56002 - protein, 122 aa, Zea mays
  Coding DNA Sequence Number=SeqID_14223
MPCASAKCALLRSPSVDSGRTTAGGGVRPPYHIPAPPALVGDAGSSSSAPMDADLATPPLPLPTAAVVARRSPSPPMPVVVGTIAARRGQPPRAVDVPRGRIIFTGYGPNGVAPSSSSNGRA

SEQ ID NO: 56003 - protein, 135 aa, Zea mays
  Coding DNA Sequence Number=SeqID_14224
  Homolog annotation: Hit_ID=Q6QP51; Match level="QueryCoverage=47%, HitCoverage=35%, E-value=2e-12, Identity=62%"; Hit description =Putative growth-regulating factor 1
  Subcellular localization annotation: CTP_CleavageSite=69; ConfidenceScore=5.56e-01
MAVAGGSSGHVVSQAYVPSWGSGASGKGSERRFAFARMTASKKGPGKGDTPKRTLLREGNRLRASLLIRGSKAGPSEGFNSRLKVRGLHTHYWSEVRRPAPRKGSTAASGHSGSAPTTDQGFEGWPSKGSQSPQT

SEQ ID NO: 56004 - protein, 135 aa, Zea mays
  Coding DNA Sequence Number=SeqID_14225
  Subcellular localization annotation: CTP_CleavageSite=54; ConfidenceScore=5.22e-01
MGARCMWLALPRVVCPLGRSAVVMRMMVMIMLMVMVVHVATTAQEKMKSWRRTSRSSKSTMSSKRGLATNPQSAACEGRVYEIKLKELSKGYCDAWSDSDFASMVKTAKPIAWELGAALHDTSQSRGSQGGPALS

SEQ ID NO: 56005 - protein, 132 aa, Zea mays
  Coding DNA Sequence Number=SeqID_14226
ELWARQACGVAIVGQACEASGSHMRPRKKRSDRLSACRCLAASLLCWMLVPSAVVRPACVPALVECWTLWSAERRRADAGRGQTVVHVLSTVQSPPQPRGMEPAGDLVPLLYYRDCCPPVRCWRSATGPHTL

SEQ ID NO: 56006 - protein, 106 aa, Zea mays
  Coding DNA Sequence Number=SeqID_14227
MARARTRREEEIGDAVARATDLVHAWDPRRSEKRLCQRVAGEDRGVEAVAPCPNFMAPSVNLAWIPAARSSLRVRKMTPTGRAHMSKRMRDSTERYARVKLGRRVG

SEQ ID NO: 56007 - protein, 102 aa, Zea mays
  Coding DNA Sequence Number=SeqID_14228
MKGLKGEEGSPHGDPEKDEMIDKKVVTLRQSLLKQTSRLALERRSSSSSSTPRLMVGSKEWARSATASSKFGHGRFQTNRGSLASSRPKLSAAASAGDIRRT

SEQ ID NO: 56008 - protein, 46 aa, Zea mays
  Coding DNA Sequence Number=SeqID_14229
MKSAGYGFGLVWVEPSRQFRTFGIGEYGPGRPPWPWVLVALWIEFA

SEQ ID NO: 56009 - protein, 348 aa, Zea mays
  Coding DNA Sequence Number=SeqID_14230
  Homolog annotation: Hit_ID=Q6ZA47; Match level="QueryCoverage=26%, HitCoverage=13%, E-value=4e-43, Identity=87%"; Hit description =Putative casein kinase 1, delta isoform 1
MYLIGTTGNSIDINKLGTLPLNLEAGQNGSIKKVTSIPVMPHSGHKGQDRIGCCCCTSSSTWHSKRGWAKWFHKKGYKYSCDATFWVTKGKITPKYLSNRTGRVAGQKEETQNSQGHDDKQMNTKDAKLVGYPHSDEEEHLDFTSLSSFERVEGHLNFVPLASYCNLLEPGKHTLYSGRFAPVGCLREVPVRGIEGHEGYIRLIEAKKKGKGYLLVHKIICTRRFISPQNNMYQDCKIVEGQLYTKRLNEKQITSLLKVQVGNTLEYITDRKLGKGGFGQVYVGRRVSGGAARTGPDAYEDALKLEHRNSKGCNYGPPYEWQVYNTLNGCYGIPSVHYKGRQGDYYIL

SEQ ID NO: 56010 - protein, 54 aa, Zea mays
  Coding DNA Sequence Number=SeqID_14231
MLPRRFPIIWSPLLLAQSRASPIRYSGKPAPRLFIYSVVTSRPPSSHWFSPRKM

SEQ ID NO: 56011 - protein, 453 aa, Zea mays
  Coding DNA Sequence Number=SeqID_14232
  Gene Ontology: Mol. function=protein binding
  Homolog annotation: Hit_ID=Q7XAK8; Match level="QueryCoverage=42%, HitCoverage=25%, E-value=1e-58, Identity=58%"; Hit description =Protein phosphatase regulatory subunit-like protein
  Pfam annotation: Domain name=LRR_1; Domain location=213-232; Score =4.3; E_value=44; Accession=PF00560.23; Description=Leucine Rich Repeat
  Pfam annotation: Domain name=LRR_1; Domain location=235-255; Score =11.5; E_value=2; Accession=PF00560.23; Description=Leucine Rich Repeat
  Pfam annotation: Domain name=LRR_1; Domain location=257-278; Score =16.1; E_value=0.13; Accession=PF00560.23; Description=Leucine Rich Repeat
  Pfam annotation: Domain name=LRR_1; Domain location=280-300; Score =9.9; E_value=3.9; Accession=PF00560.23; Description=Leucine Rich Repeat
  Pfam annotation: Domain name=LRR_1; Domain location=302-322; Score =7.6; E_value=11; Accession=PF00560.23; Description=Leucine Rich Repeat
  Pfam module annotation: Pfam domain module=LRR_1::LRR_1::LRR_1::LRR _1::LRR_1; Domain location=213-232::235-255::257-278::280-300::302-322
  Subcellular localization annotation: CTP_CleavageSite=34; ConfidenceScore=5.06e-01
MLKKRSSRQVLPSRSRKLWWQLFLWSHRNVHRRRGASAPTPTTLLWPSPGREGGGAAHRRDGYASDTLGTATADDAKEKGVAVEEEGPRVPTQWVAFSAEASPLDRVSAWVNSLGNGSFHAVDEDGGATGHGGDGASRLRPRPRRSEIVELPTSAAGGRRHPQPQARRRAAAAAAEAGQASGIIVQTLNTFSSVAHIAGMGLQAVPAIAAFSTLRAVNLSGNVIVRITAGSLPKGLHSLDLSRNKIAIIEGLRDLTRLRVLNLSYNRISRIGHGLSSCTAIRELYLAGNKIGDVEGLHRLLKLAVLDVSFNKIGTAKSLGQLVANYGSLRAINLLGNPVQANAGDDTLRRAVSGLLPRIEYLNKQAVKPQRAREVAKDSVAQAALGNAAGANSRRRPARRLGQSPAGSSAAKGRRGSRGSCRLQPSGVVGLQSAAMGNNNNTEVTRSTASREV

SEQ ID NO: 56012 - protein, 260 aa, Zea mays
  Coding DNA Sequence Number=SeqID_14233
MEPRSASYHGYNDKSPTALHNAPPEPDTSQFTLLISHPIGSACQFRGESPPLLRLKGQRLYGSLWPSPPVGSSTTARARAHDAGAIPASKNCLPAPCDGAAGMGKMSCFSGLLSCKKKALEGKNKGAYAKKASGNDCPKVKPVEFMDMVVADAVVDDVSRCRDSVPASACSSRLVAHAAAELARHATGENGDKAAAKRDSSSAAGSSSSGYSSDGTGDDAKSAEPDDGEPCSLGPHVDDGGIAKADALLLQHRRTTKICP

SEQ ID NO: 56013 - protein, 163 aa, Zea mays
  Coding DNA Sequence Number=SeqID_14234
MDRRGSAGRRAGLDYDGECVAPANSGDERYTPANYGLRELRVVDEGSARGEGEAPASFTGHQWRRYRREIREREKETGESDSELASFGNPLRYNSPDCPVSQRSNGYFAPTVVCNALNARQRAQRSGARAGGTPDSLQDLSGAPPDSQASPQARAPNGRNPTA

SEQ ID NO: 56014 - protein, 85 aa, Zea mays
  Coding DNA Sequence Number=SeqID_14235
MGSTSEKMYLCQVPNIGIVNDKDETGQGPFNWSDASSWVSFASGRPIQERPTRNGSGEMAGVACTLCGKRLDGGVSVLSVGVNPV

SEQ ID NO: 56015 - protein, 72 aa, Zea mays
  Coding DNA Sequence Number=SeqID_14236
MAGTPRAREPRRMGPGHPAHGSRGRRGGRRGGPRRRGQDRADVRAAGGPGPPRGEKGRAASIGVKAVTGEGA

SEQ ID NO: 56016 - protein, 44 aa, Zea mays
  Coding DNA Sequence Number=SeqID_14237
MAVMGSTSKKMYLCQVPNFGMNGIRALIGPSTRILSLEIAKQKL

SEQ ID NO: 56017 - protein, 98 aa, Zea mays
  Coding DNA Sequence Number=SeqID_14238
MALPLVWADWGSTLGPSYFRHAAQIRWDVPIRVDGSCVVRFRSLYTSHELTSSVSSCTLFPTTCLAMIFYELTLVIYKPPTGEQVVQKEAYNEEYELI

SEQ ID NO: 56018 - protein, 311 aa, Zea mays
  Coding DNA Sequence Number=SeqID_14239
  Homolog annotation: Hit_ID=Q84XU8; Match level="QueryCoverage=53%, HitCoverage=75%, E-value=1e-64, Identity=77%"; Hit description=Cold acclimation protein COR413-TM1
  Pfam annotation: Domain name=WCOR413; Domain location=121-290; Score =155.2; E_value=1.7e-43; Accession=PF05562.2; Description=Cold acclimation protein WCOR413
MPYISKLEDLKKIGDPIEARYKESTERGSSVDQLVYCINSFREAALSSDQKFGHIDISEKQKIFDKFDVIIISYSLKFYGLSEIRKNDEGGDGRAQVRLRPRARRLCVLGETKPATFMGPLIRRAFLQGMRLAAIEAAGSGPAVPEQGGAVVCHSSAHLSVRTIQWISAGTIAVLLVAKGTAIHKSFLVPFFALQTPCCIISWIKGDYGQWTAFLSLLVRLFFFIPGELELPLSTMLLVSVAPYQFMDLRGTQGGVVMSLVIAAYLAFQHFTRVGGPGKAFRARIHCCDLGHHLHHDCALDVAILICNELE

SEQ ID NO: 56019 - protein, 87 aa, Zea mays
  Coding DNA Sequence Number=SeqID_14240
MRLHTFREVLLTQGSVIQTIVVIQGNEMMCSLVAFWGICGSRGVTEVLKDVAPHIHYLGVIAQLFGSAHEDPRDLGATIGGKGLEVS

SEQ ID NO: 56020 - protein, 116 aa, Zea mays
  Coding DNA Sequence Number=SeqID_14241
MGNCLNTASKRSHRGMLLPEEEESLSEIRRISQLLREEEEDGYEVRALKVKIVLTRGELEWLMAQLKSGEQRLEDVLQHMQAAKGAGGGGGSFAGDNKAGWRPRLESILESSETQS

SEQ ID NO: 56021 - protein, 127 aa, Zea mays
  Coding DNA Sequence Number=SeqID_14242
MDLATGPTKRRAGKQCAWKWRWARPHSAQVEDATRAGSYTPPRAESVWVPGSQILSRSARIARSVHQSLGCLQGAHALRFLDVASSAVWFACGVEEDGPGDWAHKAASRQAMRVKVALGQTAFGPGR

SEQ ID NO: 56022 - protein, 77 aa, Zea mays
  Coding DNA Sequence Number=SeqID_14243
MAFFYLELMLVCREELGKGGQPSKGAGQGGLGVAPGFGVGAGDETRTMRLRRSGEARHGGSYPTSSTWQGRERRGRS

SEQ ID NO: 56023 - protein, 77 aa, Zea mays
  Coding DNA Sequence Number=SeqID_14244
MAFFYLELMLVCREELGKGVGRAREREQGSLGVAPGFGVGAGDETRTTRLRRSGEARRGGSYPASSTWQGRERRGRS

SEQ ID NO: 56024 - protein, 205 aa, Zea mays
  Coding DNA Sequence Number=SeqID_14245
MTFFYLELVLVCMEELGRGGRPSKGAGQGGLGVWRGSSMDAGDVTWTTRLWHGEKSSARGVGRARERDRGVSVSRRASAWALATRRGRRGSGAVARHDAVGKRGVGEGAEEGKRLAITTPFMAINGGLHYGEEMGREKEEVTTVLGAGEAEGTRASTARGTGSASGRARRCIQCGGTARARGRTPGRCRREEDGAAAGGPHLQER

SEQ ID NO: 56025 - protein, 153 aa, Zea mays
  Coding DNA Sequence Number=SeqID_14246
MARSLCVVFRTDLGELPNWGSMVINWRHERVDWMLNYLAEPMAGSIYRIHERWRLIRGKTRDGRREGVLWRKRLVAFTVAGSPTTIGWAKMTHCGMVKEPRHVAQGRKVANSGEPIQSSRDTSGYGGRSRIVAGVYPQCGISYLLAVIHLRGA

SEQ ID NO: 56026 - protein, 567 aa, Zea mays
  Coding DNA Sequence Number=SeqID_14247
  Homolog annotation: Hit_ID=UPI000019713A; Match level="QueryCoverage =28%, HitCoverage=15%, E-value=8e-19, Identity=42%"; Hit description =nucleic acid binding / zinc ion binding
  Pfam annotation: Domain name=DUF537; Domain location=40-158; Score =98.8; E_value=1.7e-26; Accession=PF04396.4; Description=Protein of unknown function, DUF537
MARQMLFLVLWLSFGTLRTVLFHVMYGQKMLLAMLGWLCACIPVVRGAVTMLSAYGDFNAFPRRLREGCQRTGVKLVDVPNGRKDAADKAILVDMFLFALDNHPPSSIMLISGDVDFAPALHILGQRGYTIVIAIPSSVTVSSALSSAGSFVWDWPSLARGEGVVIPRSLVRRLADYPCYVNSGNMGQFPDNQNEEEAIVYTGTSRNEYGGRPPVNQMYCYNTSQTTREPSKALYTVEDVNCGTSSRPHNLSCRQSESPETDQGLTDEQSWWVRPGDLQGLKGQLIRLFELSGGCVPLVRIPSEYLKLFGRHLYVSEYGAVKLVHLFEKLADSFVVVGKGHKKMICLCNSGDRNLKNYPSTPIILTKKNRGNSALEESTIGACQQLGSSSDELSEDEPIINPDINVACVFNEHLDSFRREIQELLVCYSCPVPAWVILRVYMSNGYKKIIDYESLGVTGLEELVEKGDSTNVGDDRGKQVKARANEGTSKGKAPVVATRKRKLGMGDDETGPRASGIFVEELMGTRNIGAIVSVVMEKYRQDAQWKKRKAPFGWWTHTKKLSWHEPA

SEQ ID NO: 56027 - protein, 241 aa, Zea mays
  Coding DNA Sequence Number=SeqID_14248
MAEPTGIRRGRGKGTRAWGPARSHWPDRDHVQWRTLGGGDSVLGGHGRQATGARGGRAGVAGPHPRPGRKGRGVAGLARPSPGHGKWSSHQAQMRGEEEGMERGRGGAHMGGWRRTAWATWPPTDGGLSATRRQWQEEGVEGRREVVALRVRDVGAEGGGLAVVPVGKRNSGLGATDRRARWLGGGWAQRLWFEGGVCLRRVGQVGRARQWAGGKGACWASQGERRGKWPGGLGPRGREGG

SEQ ID NO: 56028 - protein, 56 aa, Zea mays
  Coding DNA Sequence Number=SeqID_14249
MQVWEFTGSHRILASLAGTQNGVGPALWCVLRRGGSGWSVRHGGFGRPGLAGEEQE

SEQ ID NO: 56029 - protein, 328 aa, Zea mays
  Coding DNA Sequence Number=SeqID_14250
  Gene Ontology: Mol. function=amino acid transporter activity; Cellular component=membrane; Biological process=amino acid transport
  Homolog annotation: Hit_ID=Q7Y166; Match level="QueryCoverage=85%, HitCoverage=95%, E-value=1e-78, Identity=54%"; Hit description =Putative amino acid permease
MCTNLSCAPNIFSIQKTKLPSQRQQQQELPPEDGVIVQALTSQDEQQQAAQGRHGTVQGDQHHRSSSKLTVLPLIFLIYFEVAGGGPCGGPSLHAPRLPRLSPSRGASRSRLSRLSSPLRSPGNGGFVRWADLAFGPLAGSLLGTWKYLSCVINIAAYPALVADYLGRVIPAVAGTGRTRTCTVVGMTVFLSFVNYTGLSIVGWGAVALGLVSLAPFVLMTGIAVPKMRPRRWTVPVEGRKDWRLFFNTLFWNLNYWDSASTMAGEVERPEPTGATDAPPDTWANGYLVDAAGVIGGPWLKFWIEAGVVLSSIGMFEAQLSSGAFQLL

SEQ ID NO: 56030 - protein, 599 aa, Zea mays
  Coding DNA Sequence Number=SeqID_14251
  Gene Ontology: Mol. function=amino acid transporter activity; Cellular component=membrane; Biological process=amino acid transport
  Homolog annotation: Hit_ID=Q1RZ34; Match level="QueryCoverage=70%, HitCoverage=88%, E-value=1e-121, Identity=50%"; Hit description =Amino acid/polyamine transporter I
  Pfam annotation: Domain name=AA_permease; Domain location=61-480; Score=-96.5; E_value=0.0036; Accession=PF00324.11; Description=Amino acid permease
MKQGIHGSDNISPLHSKASPEALPGGDATQFPITGVAGTGSGTGHARGRNKLTLFPLIFLIFFEVAGGPYGAEPAVQAGGPLLALIGFTVFPFVWAVPESLVTAELSTAMPGNGGYVVWVDRAFGPFAGSLMGTWKYVCSAIGAAAFPALCSDYLTRVAPAVSRGGARVATVVTFNVALTLLNCTGLSVVGWTAVALGLAALSPFVLMVGAALPKVRPRRWGATTAAGGKDWKLLLNTLFWNLNGWDSVSTMAGEVERPGRTFPAALVSAVCIGSLGYVLPLLAATGAVDAPPEAWGDGYFADAAGLIGGKWLKYWTEVGAVLSSIGLYSSSMSSAAYLLAGMADLGHLPSLFAARAPAFGTPWASISVTGAIALGMSFLSFDSIVAVTNFLYSLGMLLEFAAFVWLRARRPDLPRPYRVPLGTAGVVAMCAVPSSFLVLVMAVAGWKVCVASAAFTAAGVVVYYVMAFCKDRGCLKFGARAEGEYEDTPAVFNRHYRNPALCRVLGALPNVALGKVLLLATTTFTESRALGTEIHSAKKSSVEKQYLCTGKTFLPSVVALTLGKEASFAECLLEHLAKKLTKGPAGGPFVECRLVDFV

SEQ ID NO: 56031 - protein, 73 aa, Zea mays
  Coding DNA Sequence Number=SeqID_14252
MPVDFCATECVPFDGEGASSQYGGWLGSCKQSPKGLGLADIIMFPRSLHYGMLKSDPAQAMFQVMPFLLLLIH

SEQ ID NO: 56032 - protein, 257 aa, Zea mays
  Coding DNA Sequence Number=SeqID_14253
  Homolog annotation: Hit_ID=UPI0000DA43ED; Match level="QueryCoverage =72%, HitCoverage=34%, E-value=1e-08, Identity=32%"; Hit description =PREDICTED: similar to keratinocytes proline-rich protein
  Subcellular localization annotation: CTP_CleavageSite=36; ConfidenceScore=5.01e-01
MQAACNCTKGAHPFDFDAFSMRAQAHTLAPRKGSTAASEHSGSAPTIGQRLAPEGFDSRLRRRARDDPGYVRYITKAQATLLRARPPSRLRKTTNSASPDPRARPPSRLRKTTNSASPDPRARTRPRLRKTTNSASPDPRARTRPRLWKTTNSALPDPRARTRPWLRKTTNSASPDPRARTQPWPQTMVSASPDPGLGLDLDLGRQTRPRPQRSLRLARPRARTNHVTGGGIITLPLASSGYGEQDRRHIWLAPVYK

SEQ ID NO: 56033 - protein, 452 aa, Zea mays
  Coding DNA Sequence Number=SeqID_14254
  Gene Ontology: Mol. function=pyridoxal phosphate binding; Cellular component=chloroplast; Biological process=amino acid metabolic process
  Homolog annotation: Hit_ID=O04982; Match level="QueryCoverage=99%, HitCoverage=100%, E-value=0.0, Identity=83%"; Hit description =Cystathionine gamma-synthase
  Pfam annotation: Domain name=Aminotran_1_2; Domain location=87-388; Score=-108.2; E_value=0.059; Accession=PF00155.11; Description =Aminotransferase class I and II
  Pfam annotation: Domain name=Aminotran_5; Domain location=94-407; Score=-193.2; E_value=0.017; Accession=PF00266.9; Description =Aminotransferase class-V
  Pfam annotation: Domain name=Beta_elim_lyase; Domain location=105 -364; Score=-105.4; E_value=0.0013; Accession=PF01212.11; Description= Beta-eliminating lyase
  Pfam annotation: Domain name=Cys_Met_Meta_PP; Domain location=59-450; Score=717.5; E_value=9.2e-213; Accession=PF01053.10; Description =CysMet metabolism PLP-dependent enzyme
  Pfam module annotation: Pfam domain module=Aminotran_1_2::Aminotran _5::Beta_elim_lyase::Cys_Met_Meta_PP; Domain location=87-388::94 -407::105-364::59-450
  Subcellular localization annotation: CTP_CleavageSite=72; ConfidenceScore=5.57e-01
MATVSLTPQAVFSTESGGALASATILRFPPNFVRQLSTKARRNCSNIGVAQIVAAAWSDCLAARPQSGGGPRGERLGRRIATDAITTPVVNTSAYWFNNSQELIDFKEGRHASFEYGRYGNPTTEALEKKMSALEKAESTVFVASGMYAAVAMLSALVPAGGHIVTTTDCYRKTRIYMENELPKRGISMTVIRPADMDALQNALDNNNVSLFFTETPTNPFLRCIDIEHVSNMCHSKGALLCIDSTFASPINQKALTLGADLVIHSATKYIAGHNDVIGGCVSGRDELVSKVRIYHHVVGGVLNPNAAYLILRGMKTLHLRVQCQNDTALRMAQFLEEHPKIARVYYPGLPSHPEHHIAKSQMTGFGGVVSFEVAGDFDATRKFIDSVKIPYHAPSFGGCESIIDQPAIMSYWDSKEQRDIYGIKDNLIRFSIGVEDFEDLKNDLVQALEKI

SEQ ID NO: 56034 - protein, 203 aa, Zea mays
  Coding DNA Sequence Number=SeqID_14255
  Subcellular localization annotation: CTP_CleavageSite=55; ConfidenceScore=5.68e-01
MVRGGDRPAVKRGSATTPVSGEQFPSSTRLAARLEGSSSFTASRRTSSPTRADPCASTEENHRRRWSSSAKAAFGGKFVDDANEYGTRGAAVEVDPPASEVSAGGKRSWCLGRARAEWAAPENRGQELHQPSVHRTVQCEPDSVRCPGWLSDELAALGNRRWHYGKNSSDCPVCTKQSDEPIVPAPTVDSMINGRCMARANGH

SEQ ID NO: 56035 - protein, 245 aa, Zea mays
  Coding DNA Sequence Number=SeqID_14256
MASPFFSYGSGARGFIVDMKSSLWVLQAQCPNMVNSARRDTQEGLDAADKIVSLIVFISINLEVHYRIEGFAECLKHSAKPEKHSAKSLPSVTLGKESSTNSTSATTSLPSTFYRALSKDFAECQSVLGKEKRLSRRRVTETAPLPSVLGDTRQRSYLFAECLQPALGNGSTSGARRQVLCQVPGPQHSAKKLYRCPGVASLPSAMALTLGKACSAKCQSFDTRQRSFFAECQRSALGKDNGRQL

SEQ ID NO: 56036 - protein, 100 aa, Zea mays
  Coding DNA Sequence Number=SeqID_14257
MREQVLCLNPIDGTTGKPTTPQVPLINQLRASHITLMVVLFSQVIIQRTGPYGEFPRFELHFLFYGKIRYNIMIAEGYLHSGTTDNRPLAPRCKLVVEDR

SEQ ID NO: 56037 - protein, 92 aa, Zea mays
  Coding DNA Sequence Number=SeqID_14258
MWGPWVSRPSRDDTSSGRWTSSGCQTRLTGGWAQQLKCVNHLADGARPGVDLPELADRSLVELYRDGQATKDPGAQQLENTEQELVEGKLCP

SEQ ID NO: 56038 - protein, 144 aa, Zea mays
  Coding DNA Sequence Number=SeqID_14259
MEVKKFIAIAKNHQESLGQTTTSTSVVTARDTKGHEDATLLSDLIRFGFFKDYTVWTFRVEGGDTSVGGSSSCGGNSSTTHVGGPPACTTFVGDINDADHRDYIIVNDLFGDNAGNIGAYEDVGATLLEPEDAELFKNIANRLH

SEQ ID NO: 56039 - protein, 109 aa, Zea mays
  Coding DNA Sequence Number=SeqID_14260
MTINDEHDADLDETYETFDFTFGLVIYYNAPPSLVAMIQMDTEMMGASMYAQLQCDLVEHMNSTPILFTLDWNCIHAFTFEQAEDLFFMTFVRGSLYPKGDNVSKDEGP

SEQ ID NO: 56040 - protein, 267 aa, Zea mays
  Coding DNA Sequence Number=SeqID_14261
  Subcellular localization annotation: CTP_CleavageSite=59; ConfidenceScore=5.51e-01
MGSPQAIASLAFSSQLCSGGSSDVHTALTDYVVASGRALKDFPFVNLFTNSLSSARYSRSSSTSTVDGGICEHAPTNPANKLAAESPVRSPARNWSHDLDHPRVLLRADLEVEGGQGHSLGGTEYGDGVLARSCPSSMNPSSNAPHPHALSPKLQAPGDIIVYLSPAYLLSSRLDIQAPSPRTPSCAHSMARSSRAAVPPHTMLGPTPALAGAPVVICLPSTVLSTSALARPGLLATTTKEYPVFAPEFVTSSLMVPSPKWNSFENF

SEQ ID NO: 56041 - protein, 111 aa, Zea mays
  Coding DNA Sequence Number=SeqID_14262
  Subcellular localization annotation: CTP_CleavageSite=50; ConfidenceScore=5.22e-01
MGNLLVKGLGYVTEPSSLSGNRASPPNKSQQQVQAPCSKPYRLHRLGFASSSYAANSELELEFWSGFGLGIGTMLENATASALEDFEDDFGMAAKAMVDILPLKDVIHESS

SEQ ID NO: 56042 - protein, 200 aa, Zea mays
  Coding DNA Sequence Number=SeqID_14263
MDKGKGCIMIWRSPQKHVVGVSNLAPTSQARDPLEWFPFGTPSPPIQFCHTQPRARYRGGPEIVSSTVAPDPRWEGGSARGLVSDQVPSDLNGSKEILWNVFLSEQDPDPLVVDLLGPSGVFVCYPQPVLGQGMFSEESSSQSRSPLPRTVVSASYEPVFELKVNRSNKIAVLSNFNNYDDACDHCSRTSPANSRGMHIR

SEQ ID NO: 56043 - protein, 104 aa, Zea mays
  Coding DNA Sequence Number=SeqID_14264
  Subcellular localization annotation: CTP_CleavageSite=88; ConfidenceScore=5.00e-01
MDRIVGRRRTILRPLDQRTPPKPPDRRSWSSKNPLFHFGSVIVAWTPASGASSSLDPGGAPSLVACLRATPPLALGIATARTAEGTTAADHTSEGTAVAAKTNP

SEQ ID NO: 56044 - protein, 39 aa, Zea mays
  Coding DNA Sequence Number=SeqID_14265
MRQFGEVQTIMCALTDNSASVNVKCVIVMVTQYGLPDPG

SEQ ID NO: 56045 - protein, 439 aa, Zea mays
  Coding DNA Sequence Number=SeqID_14266
  Gene Ontology: Mol. function=RNA-directed DNA polymerase activity; Cellular component=intracellular; Biological process=RNA-dependent DNA replication
  Homolog annotation: Hit_ID=UPI00004C1733; Match level="QueryCoverage =97%, HitCoverage=31%, E-value=0.0, Identity=92%"; Hit description =UPI00004C1733 related cluster
  Pfam annotation: Domain name=RVT_1; Domain location=56-225; Score =149.6; E_value=8.4e-42; Accession=PF00078.17; Description=Reverse transcriptase (RNA-dependent
MPGIPRDVAEHSLDIRAGARPVKQPLRQFDEEKRRAIGEEIHKLMAAGFIKEVFHPEWLANPVLVRKKGGKWRMCVDYTGLNKACPKVPYPLPRIDQIMDSTAGCETLSFLDAYSGYHQIRMKESDQLATSFITPFGMYCYVTMPFGLRNAGATYQRCMNHVFSEHIGRTVEAYVDDIVVKTRKASDLLSDLEVTFRCLKAKGVKLNPEKCVFGVPRGMLLGFIVSERGIEANPEKIAAITSMGPIEDLKGVQRVMGCLAALSRFISRLGERGLPLYRLLRKAECFTWTPEAKEALGNLKALLTNAPILVPPAAGEALLIYVAATTQVVSAAIVVERREEGHALPVQRPVYFISEVLSETKICYPQIQKLLYAVILTRRKLRHYFESHPVTVVSSLPPGGKSSSAERPRVEFAKWAVEIMGETISFALEHQSQSWRTSC

SEQ ID NO: 56046 - protein, 492 aa, Zea mays
  Coding DNA Sequence Number=SeqID_14267
  Gene Ontology: Mol. function=hydrolase activity; Cellular component =extracellular space; Biological process=biological_process
  Homolog annotation: Hit_ID=Q84V55; Match level="QueryCoverage=93%, HitCoverage=93%, E-value=0.0, Identity=79%"; Hit description =Secretory acid phosphatase
  Pfam annotation: Domain name=Metallophos; Domain location=189-386; Score=79.4; E_value=1.1e-20; Accession=PF00149.18; Description =Calcineurin-like phosphoesterase
MGPLPLRRRVGVLLFLALVLLGGGGGADAGTTSSYRRKLEATVEMPLDADVFRVPPGYNAPQQVHITLGDQEGTAMIVSWVTASEPGNSTVAYGEDPARMERRADGAHTRYDYFNYTSGFIHHCTLRNLKVHLFVCPQPFFHLLCILLMAAVDGLLQHATKYYYAMGFGHTVRTFWFTTPPKPGPDVPFKFGLIGDLGQTFDSNITLSHYESNGGDAVLYVGDLSYADNHPLHDNNRWDTWARFVERSVAYQPWVWTAGNHELDFAPELGETTPFKPFAHRYPTPYRAAGSTEPFWYSVKVASAHVVVLASYSAYGKYTPQWAWLQAELARVDRKTTPWLVVLTHSPWYNSNNYHYMEGETMRVQFERWLVDAKVDLVLAGHVHSYERSHRVSNVAYDIVNGKSTPVRSADAPVYVTIGDGGNIEGIADNFTRPQPGYSAFREASFGHATLDIKNRTHAYYSWHRNHDGAKVVADGVWFTNRYWMPTDDDTN

SEQ ID NO: 56047 - protein, 931 aa, Zea mays
  Coding DNA Sequence Number=SeqID_14268
  Gene Ontology: Mol. function=binding; Cellular component =intracellular; Biological process=nuclear mRNA splicing, via spliceosome
  Homolog annotation: Hit_ID=Q8W3F7; Match level="QueryCoverage=95%, HitCoverage=87%, E-value=0.0, Identity=82%"; Hit description =Putative pre-mRNA splicing factor
  Pfam annotation: Domain name=HAT; Domain location=336-368; Score=4.5; E_value=4.5; Accession=PF02184.7; Description=HAT (Half-A-TPR) repeat
  Pfam annotation: Domain name=HAT; Domain location=397-429; Score=4.2; E_value=5.2; Accession=PF02184.7; Description=HAT (Half-A-TPR) repeat
  Pfam annotation: Domain name=HAT; Domain location=537-569; Score =10.9; E_value=0.33; Accession=PF02184.7; Description=HAT (Half-A -TPR) repeat
  Pfam annotation: Domain name=HAT; Domain location=838-870; Score=6.6; E_value=1.9; Accession=PF02184.7; Description=HAT (Half-A-TPR) repeat
  Pfam annotation: Domain name=PRP1_N; Domain location=33-192; Score =260.1; E_value=4.4e-75; Accession=PF06424.3; Description=PRP1 splicing factor, N-terminal
  Pfam annotation: Domain name=TPR_2; Domain location=292-325; Score =10.4; E_value=2; Accession=PF07719.7; Description=Tetratricopeptide repeat
  Pfam annotation: Domain name=TPR_2; Domain location=413-446; Score =3.9; E_value=12; Accession=PF07719.7; Description=Tetratricopeptide repeat
  Pfam annotation: Domain name=TPR_2; Domain location=591-624; Score =5.5; E_value=7.6; Accession=PF07719.7; Description=Tetratricopeptide repeat
  Pfam annotation: Domain name=TPR_2; Domain location=658-691; Score =5.4; E_value=7.8; Accession=PF07719.7; Description=Tetratricopeptide repeat
  Pfam annotation: Domain name=TPR_2; Domain location=692-725; Score =13.4; E_value=0.85; Accession=PF07719.7; Description=Tetratricopeptid e repeat
  Pfam annotation: Domain name=TPR_2; Domain location=760-793; Score =12.0; E_value=1.3; Accession=PF07719.7; Description=Tetratricopeptide repeat
  Pfam annotation: Domain name=TPR_2; Domain location=824-857; Score =12.3; E_value=1.2; Accession=PF07719.7; Description=Tetratricopeptide repeat
  Pfam module annotation: Pfam domain module=HAT::HAT::HAT::HAT::PRP1 _N::TPR_2::TPR_2::TPR_2::TPR_2::TPR_2::TPR_2::TPR_2; Domain location
  Pfam module annotation: Domain location=692-725::760-793::824-857
  Subcellular localization annotation: CTP_CleavageSite=67; ConfidenceScore=5.53e-01
MSGTTPTPTPTPPPLPPPPAARPVRYDFLNSKPPANYVAGLGRGATGFTTRSDIGPARAAPDLPDRSAAAAGPAVGRGRGKPPGEDDGDDDGGDEEKGYDENQKFDEFEGNDAGLFSNADYDDDDREADAVWESIDQRMDSRRKDRREARLKQEIEKYRASNPKITEQFADLKRKLADLFVPVPDTLLEKARQEQEHVTALDPKSRAAGGTETPWAQTPVTDLTAVGEGRGTVLSLKLDRLSDSVSGLTVVDPKGYLTDLKSMKITSDAEISDIKKARLLLKSVTQTNPKHPPGWIAASRLEEIAGKLQIARQLIQRGCEECPKNEDVWLEACRLASPDEAKAVIARGVMSIPNSVKLWLQAAKLESSDLNKSRVLRKGLEHIPDSVRLWKAVVELANEEDARLLLHRAVECCPLHVELWLALARLETYDQARKVLNKAREKLPKEPAIWITAAKLEEANGNTQSVNKVIERGIRSLQREGMDIDREAWLKEAEAAERAGSVLTCQAIVKNTIGIGVDDEDRKRTWVADAEECKKRGSIETARAIYAHALTVFLTKKSIWLKAAQLEKSHGTRESLDALLKKAVNYNPRAEVLWLMAAKEKWLAGDVPAARAILQEAYAAIPNSEEIWLAAFKLEFENNEPERARMLLAKARERGGTERVWMKSAIVERELGNVGEERRLLEEGLKLFPAFFKLWLMHGQMEDRLGNGAKAKEVFENGLKQCPSCIPLWLSLATLEEKISGLSKSRAVLTMARKKNPATPELWLAAIRAELRNGNKKEADALLAKALQECPTSGILWAAAIEMAPRPQRKGKSTDAIKRSDHDPHVIATVAKLFWLDRKVDKARSWLNRAVTLAPDIGDFWALYYKFELQHGNVDTQKDVLKRCVAAEPKHGEKWQAITKAVENSHLPVEALLKKAVVVLDVEENANPGGA

SEQ ID NO: 56048 - protein, 129 aa, Zea mays
  Coding DNA Sequence Number=SeqID_14269
  Subcellular localization annotation: CTP_CleavageSite=89; ConfidenceScore=5.04e-01
MGALLDHLACSIAHRLTHVFKGNFRKANAVRTKAIQHHHPTPTAAGRARRCLVLVQVSPICVRQLVWHCRTGKRKKVPTRRSSRSRIVVSRMAQGRARCRQGDKEILKIVEKNKLRPGMVIDKLAYVRH

SEQ ID NO: 56049 - protein, 255 aa, Zea mays
  Coding DNA Sequence Number=SeqID_14270
MAGSKDHTKVSTTNIIKPAMEALPADDYHHMTMLMHTFVSSSQPPPPGMQQALGTVGLSESLLGQSGYVADRSTYFVDRPTVHRPAHGSLRSRHTWPDHPGTTPDNSSLSRTVWYNHGPFDPIADHLAPYDGRSRYETSQAAPYTVGQSGYTLGPFDPVADRLALTHGPSGHDWPSSVKPSYTSGVHCVVSRRVSVVTSWGIIDGGVKNPSLEYYCPAAPLSVVDHMPACAISGMDPVPEFALVTAISRTHLIGV

SEQ ID NO: 56050 - protein, 179 aa, Zea mays
  Coding DNA Sequence Number=SeqID_14271
MAAIITIPCPSHNQDPTFLGMATIHHCGKMSGVLHVCPCTLQWHAQLHNTIPHSLDFQDIRPMYTTLVIRDMHTTSQVSCSSMEGEHLHRPYLQVSSRVVPIGPILFETGVPGRGTFMSSSDYLHGRMGLGSSKNNHNTDLGANGRSVINDAATHGSGEPLHSTYHPVLVGTTLAISIP

SEQ ID NO: 56051 - protein, 148 aa, Zea mays
  Coding DNA Sequence Number=SeqID_14272
MGKSLATTAEWLHEEGLATAGRRKLRTTADDGGGPGRHGRPALGGGGRATLGVLGGAGATGEQRRGCSMRLAARELGGLGSGGAGAAGGGRSRETEKKRKKDSVGRFKSLIFCGQGLAAENKRLFSAAVSVAAENNLIFGGCVSDRRK

SEQ ID NO: 56052 - protein, 224 aa, Zea mays
  Coding DNA Sequence Number=SeqID_14273
MGTDDDDGSINYVSNRGFWYFLYEEDALGATYAQAEVGAVNPSDDNDDIDIEEEDSTTIQPTKPSHMNFGKSKIKGGHIEVLDRFGYVDNVNWVRLGGDDLVLNTKEDEEPKGVKIEDAIDLIAQKVVTLKLLSKSKEEEEEERIDPVMRSFFDIDEGESEEKDSAGTILATEDITLLPVVATIQSPKVDLAAIVVTPSAIVVVEEKIGSSNPAIAEDKGKGLQ

SEQ ID NO: 56053 - protein, 140 aa, Zea mays
  Coding DNA Sequence Number=SeqID_14274
MDKSKKSGSSSHHSSDKRKRELTPPSEDFGDSEYSEEEFSSESEGSPVWTYIRVVERAGLEGSDESEYSSDKENSSNSSEEGGGDGDGGDDDDDGGGDGDGGGDDGEGDGKGGDGGGKGGSGDGGDGSKGSSRGSNKASG

SEQ ID NO: 56054 - protein, 491 aa, Zea mays
  Coding DNA Sequence Number=SeqID_14275
  Gene Ontology: Mol. function=RNA-directed DNA polymerase activity; Cellular component=mitochondrion; Biological process=RNA-dependent DNA replication
  Homolog annotation: Hit_ID=UPI00004C1731; Match level="QueryCoverage =91%, HitCoverage=33%, E-value=0.0, Identity=78%"; Hit description =UPI00004C1731 related cluster
  Pfam annotation: Domain name=RnaseH; Domain location=37-164; Score =7.8; E_value=1.1e-05; Accession=PF00075.14; Description=RNase H
  Pfam annotation: Domain name=rve; Domain location=204-362; Score =101.5; E_value=2.5e-27; Accession=PF00665.16; Description=Integrase core domain
  Pfam module annotation: Pfam domain module=RnaseH::rve; Domain location=37-164::204-362
MGETISFAPRKAIKSQVLADFVAEWVDTQLPTTLIQLELWTMFFDGSLMKTGAGAGLLFISPLGKHLRYVLRIHFPASNNVAEYEALVNGLRIAIELGVRRLDARGDSQLVIDQVMKNSHCRDPKMEAYCDEVRRLEDKFYGLELNHIARRYNETADELAKIASGRTAVPPDVFSRDLHQPSVKIDDTPEPEAPSAQPEVPSAQSEAPSARPEAPSVQPEKAPGGYTHLLVAIDKFSKWIEVRPLNSIRSEQAVAFFTTIVHRFGVPNSIITDNGTQFTGRKFLDFCEDHHIRMDWAAVAHPMTNGQVERANGMILQGLKPRIYNDLNKFGKRWMKELPSAVWSLRTTPSRATGFTPFFLVYGAEAILPTDVEHGSPRTRAYADQSNQASREDSLDQLEEARDKALLHSARYQQSMRRYHARGVRSRDLQVGDLVLRLRQDARGRHKLTPPWEGPFVIAKVLKPGTYKLANSQGEVYSNAWNIQQLRRFYP

SEQ ID NO: 56055 - protein, 73 aa, Zea mays
  Coding DNA Sequence Number=SeqID_14276
MSERRHLDKGGSEATLVRCGKATGKLRDVTGQQWGDMVDVMVMSDSRVVVAQARGDGVDSGRLGAAGVVAAQT

SEQ ID NO: 56056 - protein, 68 aa, Zea mays
  Coding DNA Sequence Number=SeqID_14277
MAPEAGLSYCQPHFVEWHNSRSGTDDATFPVSRYAYGGPFGPRTLTVRVCAELMLFAHNGWNLVGDYK

SEQ ID NO: 56057 - protein, 248 aa, Zea mays
  Coding DNA Sequence Number=SeqID_14278
  Gene Ontology: Mol. function=transferase activity; Biological process= paclitaxel biosynthetic process
  Homolog annotation: Hit_ID=Q75KH0; Match level="QueryCoverage=75%, HitCoverage=37%, E-value=3e-18, Identity=34%"; Hit description =Putative benzyl alcohol benzoyl transferase
MEKEAAAELEIPGECQYAGDPVLVRPSQPTPRHTLHLSNLDDQRFLRFSIKYLYVFGADAAVPADALRAALGRVLADYYPLAGRLRPSAEEDGKLVVDCNAEGALFAEGRLPGLAAADFLSGSDRPHKSWRKLHYRVEAQSFVAVPPLVVQDEAFVPCSAAALGKSDGLSLAFAILKVTWLACGGMVLCTAINHCICDGIGTAQFLHAWARAVRGGGGRDALDAGGDDTALPFHDRRALRPALPTARR

SEQ ID NO: 56058 - protein, 54 aa, Zea mays
  Coding DNA Sequence Number=SeqID_14279
  Subcellular localization annotation: CTP_CleavageSite=35; ConfidenceScore=5.16e-01
MVITTWLLQGLEQPTTIHASTSSSVSGVNACAAIRAMTTQQAFTTSVTGTIMSR

SEQ ID NO: 56059 - protein, 109 aa, Zea mays
  Coding DNA Sequence Number=SeqID_14280
MERHREYLCMGEDVPGKKILGGMSIAHRSWAGGSRGPLRLGAEVEDDFVTIDFEIDGLDYIMDTPFMDWYGSVDLGSISCGSHAGALKEDLWIGIRPLALDTDSGIRII

SEQ ID NO: 56060 - protein, 118 aa, Zea mays
  Coding DNA Sequence Number=SeqID_14281
MVYRRGVVRRREPNPPHPNHRSRTALAPLETCRRLPLLPSSVKLPYSILSVSSSPLARPISARPSRRLPRAALFVSAHWAMSFSGSRPSLRRRFLHPWSIARRPIPFAVAVPQRRRLW

SEQ ID NO: 56061 - protein, 277 aa, Zea mays
  Coding DNA Sequence Number=SeqID_14282
  Homolog annotation: Hit_ID=Q2LJE0; Match level="QueryCoverage=23%, HitCoverage=48%, E-value=7e-09, Identity=46%"; Hit description =Chaperonin-like protein
  Pfam annotation: Domain name=RcbX; Domain location=168-256; Score= -38.9; E_value=0.00055; Accession=PF02341.6; Description=RbcX protein
  Subcellular localization annotation: CTP_CleavageSite=49; ConfidenceScore=5.21e-01
METRLINIARSSHEVATSILTTSPASQGSSRLCISPLLPSFSHPRPSILASAPGSLAPTTFDGSPQSAPFHRRNVPIPFHFARRASACRASQRLTVQLEDQPQGAGLLNEPPTVLLLPNHRQSHTLWWLGLQDSQVRRAGVAQARSRPPGSSCRPSTVPRCRPSTQLMNYFTYKAVRTVLTQLYELNPPSYRWSYNFVAVNKPTDGKHFLRALGKERQELAERVMVTRLHLYGKWMKKCDHAKTYEKISDENLALMQERLMETVIWPTDDSSTEKIG

SEQ ID NO: 56062 - protein, 84 aa, Zea mays
  Coding DNA Sequence Number=SeqID_14283
MKVFVFQVSKELWALVHCKPTKPSEEEDDEKVAAIDRDFSSPPSSPSSASQLCLMAKGEWKVQHENDIVEDCDSDSDDEYASPT

SEQ ID NO: 56063 - protein, 87 aa, Zea mays
  Coding DNA Sequence Number=SeqID_14284
  Homolog annotation: Hit_ID=Q10NM0; Match level="QueryCoverage=48%, HitCoverage=4%, E-value=6e-10, Identity=79%"; Hit description=SH3 domain containing protein, expressed
MMEKLNEIVFDILEKVADTKQKWKKGIFTKQGGDKEITFCSQLMIKGTNEIMPTLLHVMLVSQQKMILTNCQHACFQQSFREGKDGM

SEQ ID NO: 56064 - protein, 64 aa, Zea mays
  Coding DNA Sequence Number=SeqID_14285
LRRGFDTHFGVFCVSRDLAESRAILVRIARQRCRAASDPRFTVNKASTPPPLKSQWLRIPVFNR

SEQ ID NO: 56065 - protein, 108 aa, Zea mays
  Coding DNA Sequence Number=SeqID_14286
GKWERKEKEKDFSVKRSGWDFSPAKRAPAQAADPARLANRACREDGAVGAGPRASEGERETTSGGTAVHPRGGGTGRRWFNGVSAGGPVLGGRGGGIAQAGVGGHRGG

SEQ ID NO: 56066 - protein, 78 aa, Zea mays
  Coding DNA Sequence Number=SeqID_14287
MRQPMAPLAEGTRLSGVHRTVSGAPRGHQPKLFALGISRKPARYNSPDCPVCTGHVRCSKEARSTELVSLGFARQPLR

SEQ ID NO: 56067 - protein, 352 aa, Zea mays
  Coding DNA Sequence Number=SeqID_14288
  Gene Ontology: Mol. function=DNA binding; Cellular component=nucleus; Biological process=regulation of transcription, DNA-dependent
  Homolog annotation: Hit_ID=O04141; Match level="QueryCoverage=99%, HitCoverage=100%, E-value=7e-96, Identity=53%"; Hit description=Myb protein
  Pfam annotation: Domain name=Myb_DNA-binding; Domain location=14-61; Score=54.0; E_value=5e-13; Accession=PF00249.21; Description=Myb -like DNA-binding domain
  Pfam annotation: Domain name=Myb_DNA-binding; Domain location=67-112; Score=50.0; E_value=7.8e-12; Accession=PF00249.21; Description=Myb -like DNA-binding domain
  Pfam module annotation: Pfam domain module=Myb_DNA-binding::Myb_DNA -binding; Domain location=14-61::67-112
MGRAPCCERSGLKKGPWTPEEDEKLVAYIKKHGQGNWRTLPKNAGLARCGKSCRLRWTNYLRPDIKRGRFSFEEEEAIIQLHSILGNKWSAIAARLPGRTDNEIKNYWNTHIRKRLLRMGIDPVTHAPRLDLSALLKPAAAYYPTQADLDTLRALEPPLASYPDLLRLASALLSGRPAAPAIGEHRQQQLLPWILQQAVASISMAQHAVAAGAACQMPPPDLVHNTNPPTVQQHQLAAAQHQPQDVVCHSMQPPTAGYVDSPLDVPALMQAAQPDATNLQQWNSTVTSSGNNHNSVGSGVSTPTSSSPVPRLDHSTTCVATTFGGGGASTDDVAALFDMQLSELLDVSDYML

SEQ ID NO: 56068 - protein, 521 aa, Zea mays
  Coding DNA Sequence Number=SeqID_14289
  Gene Ontology: Mol. function=zinc ion binding
  Homolog annotation: Hit_ID=Q10LJ3; Match level="QueryCoverage=38%, HitCoverage=22%, E-value=1e-10, Identity=26%"; Hit description=JmjC domain containing protein, expressed
  Pfam annotation: Domain name=C1_3; Domain location=372-400; Score =8.9; E_value=0.046; Accession=PF07649.3; Description=C1-like domain
  Pfam annotation: Domain name=WRC; Domain location=228-273; Score =62.6; E_value=1.3e-15; Accession=PF08879.1; Description=WRC
  Pfam module annotation: Pfam domain module=C1_3::WRC; Domain location= 372-400::228-273
MPPRRGRGKGKGRAKPRAKPTEPEPESDPELDEAAKSEIEAGDAEAGEESSAESEDSKEDESESDTESMDAEASEEAGENGTEEMDAEPEAKAVEAKAETVATEAEAKPDASDEEAGETGSDREADGKGADPKAKAEESDGEDEEGATAVTDGDSEEEAAETGGESEEDGGDSDTEGDAEESPPSPPRRSRRRKRAATPDDEAEETPTPSRRRRRRKSGERGDSPPPLPDHLRCRRSDGKKWRCSGRALPTVSFCEYHYARANKGKKLPADEEVLAVVLQRQKNKRKGRRSINPPTSPQAATSDPQTRDLPNGLMTISPGSSGPAALSTPVKIGVEIPAPIQRCYRSKNAEPLPVGPVKVVPRAMSVTKTARTCHCCGMKKAARVANCKNCDKNFCNSCINKWVYIGDDLLVLCCSSVPDIADNVIGAPPISSCGGLLDACVRVGSVKLHFNKEPPKVERKILSIKISNHQFYKLLPVRLDQEQLDELELEAKIQGTKISNVCVQVAETGQSESLYWSINS

SEQ ID NO: 56069 - protein, 123 aa, Zea mays
  Coding DNA Sequence Number=SeqID_14290
MEFLKNGSGRVSSEWINDRDSSDSYRYVRASFHLKRKFSLLPIGYIAHLEAVWFVAKCATLCLSSEVKARGSLGKEALRFQFTAVIRTPLGASSQPSASNTTIAFTATPSIRHSICQIPGYAK

SEQ ID NO: 56070 - protein, 226 aa, Zea mays
  Coding DNA Sequence Number=SeqID_14291
  Gene Ontology: Mol. function=oxidoreductase activity; Cellular component=membrane; Biological process=electron transport
  Homolog annotation: Hit_ID=Q9FVM8; Match level="QueryCoverage=48%, HitCoverage=21%, E-value=3e-45, Identity=82%"; Hit description =Cytochrome P450
MKPCRRNAQALVPAGHATARKDHDMHARAGAEAERYLPSSQRASRNGTLGLSAAPHSSPPLPYSYSLLRGYRSRGALFTPSRHCFLPFARASEEAEAFSLLMTMARKTAALEFTTRTLRTVMFGWVSRSIHARLLPILADAHVIDLQDLLLRLTFDNICGLACGKDPETLARCLPDNAFASAFDRATEATLNRFIFPECVWRCKKWLGLGMEERLIIIVVIYYMCK

SEQ ID NO: 56071 - protein, 235 aa, Zea mays
  Coding DNA Sequence Number=SeqID_14292
  Homolog annotation: Hit_ID=Q6QP51; Match level="QueryCoverage=79%, HitCoverage=99%, E-value=3e-11, Identity=39%"; Hit description =Putative growth-regulating factor 1
MTASKKVRHITRFRILFLFLFLSLTTGTGKGDTPKGILLREGNGPRAPLLIRGSKAGPSEGFNSRLRALRLHAHYWSEVRRLAPRKGSTAASGHSGFTPTTDQEFVGWPSKGFDSRLRRRARDDPGVRLTAAKYGLGRHRKLCLARPQGSDSALAPEDDEFRLARPQGSDSASAPEDDELRLVRPQGSDSASAPEDDELRLARPQGLDSEEPPPRPTQGSDRPRHRRGHHYPTPS

SEQ ID NO: 56072 - protein, 61 aa, Zea mays
  Coding DNA Sequence Number=SeqID_14293
MDKANGEQNGSKSREAGAFLRNQAGASQTETRPVTNHAIRDWMSAARQPGCMDGPGCADAG

SEQ ID NO: 56073 - protein, 338 aa, Zea mays
  Coding DNA Sequence Number=SeqID_14294
  Homolog annotation: Hit_ID=P59278; Match level="QueryCoverage=56%, HitCoverage=36%, E-value=4e-10, Identity=28%"; Hit description =Uncharacterized protein At1g51745
MGFEKCDGGTWDWYNLEKSKRVKAFRCGEFDACIEKAEATQGTLVKKREKYARREDAILHALELERKQLASKYQTQGFRPGPPGNISACTKHHKDLGSTRYKSKKGKKRKDASVPPDVKKEVGQCFLPAGSKRNFSGSLTQGNLVSNHMGDFSPLGHSHGGATLENKESTVVKKNRSDGSDFEDSLVSKSDRRRPLSQVLQSSENLLPHLKQNDDFGALLIAESNNPSLAASWSRRNKYTYMASDSGETESHSDLPSIKMSSTRTDFENESYLQHPVYFSEEQTSDFIEKQITESSERECSESETEDDAELLQSMCIHLSEFCLFGFMLHCHRMLAIA

SEQ ID NO: 56074 - protein, 81 aa, Zea mays
  Coding DNA Sequence Number=SeqID_14295
  Homolog annotation: Hit_ID=Q6Z0Z4; Match level="QueryCoverage=58%, HitCoverage=9%, E-value=4e-11, Identity=64%"; Hit description =Putative HGA1
MGASAAGRQGQQDKQGVEGQGYIEREWRTRPYACYHDPVAMAHVHEYTLKPLSEPAVAPVCTRYHSVPGFLFSNGGFSGNL

SEQ ID NO: 56075 - protein, 103 aa, Zea mays
  Coding DNA Sequence Number=SeqID_14296
MEICLAAQLGLPLVPPDLISCEEQGEGINGIRRQSDVTCKSGTIGFAYAYTDCSTQEVVRSDAMPDCPMVNLNYQVVFAIIDAPCGGPSEAPDCSAGKAGWSA

SEQ ID NO: 56076 - protein, 475 aa, Zea mays
  Coding DNA Sequence Number=SeqID_14297
  Homolog annotation: Hit_ID=Q10RP7; Match level="QueryCoverage=93%, HitCoverage=88%, E-value=1e-150, Identity=64%"; Hit description=Appr- 1-p processing enzyme family protein, expressed
  Pfam annotation: Domain name=A1pp; Domain location=116-221; Score =106.0; E_value=1.1e-28; Accession=PF01661.11; Description=Appr-1"-p processing enzyme family
MQHRSPEAASASASPTAAAVEAMAPGVGGVEPAVTLDQVPRWSDPDQRISLLSPTAAGSETPASSFLSFSDPLTGDDAAAGAGGRGASRFPVDYEINSKIYLWRGHPWNLEVDAVVNSTNENLDEAHSSPGLHAAAGSGLAEECATLGGCRTGMAKMTNAYDLPARKVIHTVGPKYAVKYHTAAENALSHCYRSCLELLIENGLERLLPLYFPRDKQEEEIAALKLPADVGDENGETVIDERKIRIKPLPAGEANSKTPIPTLADIPLPDSSLTRRRNSFKLDSYLDPAFMSIIKDPDLRRKEQWEKSQANKGLNLANMLGFGDLGSPPLSAAEEYSLHSRYLAKANSMNLSDVAEMKIISLIKWWEWDGPRKEFESLIQKPYTIVYFHSVASLQPQPDLGFMKRLQQILGRKHKKNLHTIYILHPTLGLRTAVMAMQLFVDGEVWKKVVYVDRLVQLFRYVPREQLTIPDFVFQ

SEQ ID NO: 56077 - protein, 70 aa, Zea mays
  Coding DNA Sequence Number=SeqID_14298
DHGGFYGMLLTLRARSRRFGDWPVRHPGNHAIVVERAPVPSDEDCAERLTHGPKVSALVQMGWAEWAKKE

SEQ ID NO: 56078 - protein, 151 aa, Zea mays
  Coding DNA Sequence Number=SeqID_14299
  Gene Ontology: Mol. function=protein transporter activity; Cellular component=mitochondrial inner membrane; Biological process=protein transport
  Homolog annotation: Hit_ID=Q2QPW9; Match level="QueryCoverage=92%, HitCoverage=59%, E-value=1e-60, Identity=83%"; Hit description =Mitochondrial import inner membrane translocase subunit Tim17/Tim22/Tim23 family protein, putative, expressed
  Pfam annotation: Domain name=Tim17; Domain location=1-101; Score =62.0; E_value=2e-15; Accession=PF02466.9; Description=Tim17Tim22Tim23 family
MVKSFVIALEGKGLVMRKGFKGSFPDAASSAKIFAVLAGVQSLVACSLRKLRGKDDGINAGVAGCCTGLALSFPGAPQTLIQSCLTFGTFSYIIETLNKQQPALALPLATEIKDQKAGQSVLPPFTLPLPQDAMDGFSKFQNFLSSKFQGK

SEQ ID NO: 56079 - protein, 416 aa, Zea mays
  Coding DNA Sequence Number=SeqID_14300
MAQPENGVRPPLLRTDMEEPPRVSDGSATKERVRLLEREVASAKQREMKMLESLVQQTKELEQAKIALEEASLEVATLRQQQQQQGEGGAAAEPAVQAQQWSVMDLMFGGVDEEINGLRAKLRAAQQAEERSRKAADELAAALSAVTVEAKQVKAWLSGAQAEVEASNAEADRLRGLLQGAEAELWSATEQVGALTSNWKDAAAGWRAREKALVARARAAEEDAAAARRDNAGLRRALEQAVEEANAAAEALEAAGADNAGLQEAVAEKERALEALRRDNEGLRASEAAARARAEELQGQLAAKEREIPLVEKWRREDAQGKLVSSGMFLGSGRLVPGRKDRMFASLSNIAELKSAAAAAAAMDDYGYEFDHLDVGQPCDDATEHKIKRRSILRKVGDLFRRRRSPNLAPVLHDHY

SEQ ID NO: 56080 - protein, 73 aa, Zea mays
  Coding DNA Sequence Number=SeqID_14301
MAAGLGELAMEETPARRSEGGELELGDAMERGRELGTGSRGTDPTMARRVHRRGLVEEHRARLKEEEAGRVGR

SEQ ID NO: 56081 - protein, 157 aa, Zea mays
  Coding DNA Sequence Number=SeqID_14302
MDKGKRGHGSSRHAGDKRKQDPSPPSEAFGDSEYSEEEVSSESEGSLALASPPTSSDDSDDSQGIAAEVWTYIHSVERTGLEESDESEVSSNEEDSFGLSVEQSGDDSDDEGGDGGGDGGDGGEGEDGGGKGDEGDGGGNGGSGSGGGKASGKAPLV

SEQ ID NO: 56082 - protein, 112 aa, Zea mays
  Coding DNA Sequence Number=SeqID_14303
MDEMCRSSVNLKGRRTWRASTAGHGEHHRILANWGMARLRCRDRIGIVGARVPLCLGIVGDTVWFPSLVWSSSFRPTVTAPAMTGHYVNWNMERPPGKTVLPQGFNGTPLAD

SEQ ID NO: 56083 - protein, 100 aa, Zea mays
  Coding DNA Sequence Number=SeqID_14304
  Subcellular localization annotation: CTP_CleavageSite=49; ConfidenceScore=5.53e-01
MTTAVLSPLRKQGDVSKDPTAPTAVLLQGSSAPPTTTTSHEQGSSTSPTATMAWPSYEMVAAREDGLTDWLSLSLANAWTPRGRNADKRTKLSKWRTYQI

SEQ ID NO: 56084 - protein, 488 aa, Zea mays
  Coding DNA Sequence Number=SeqID_14305
  Gene Ontology: Mol. function=oxidoreductase activity; Cellular component=peroxisome; Biological process=hydrogen peroxide catabolic process
  Homolog annotation: Hit_ID=P12365; Match level="QueryCoverage=92%, HitCoverage=100%, E-value=0.0, Identity=89%"; Hit description =Catalase isozyme 2
  Pfam annotation: Domain name=Catalase; Domain location=18-359; Score =757.6; E_value=8e-225; Accession=PF00199.9; Description=Catalase
MDPYKHRPSSAFNAPYWTTNSGAPVWNNDSSLTVGARGPILLEDYHLVEKLANFDRERIPERVVHARGASAKGFFEVTHDITHLTCADFLRAPGVQTPVIVRFSTVIHERGSPETLRDPRGFAVKFYTREGNWDLVGNNFPVFFIRDGIKFPDMVHALKPNPRTHIQDNWRILDFFSHHPESLHMFSFLFDDVGIPPTTATWTDPGHATKDLTDAIAAGNFPEWTLYIQTMDPEMEDRLDDLDPLDVTKTWPEDAFPLQPVGRLVLNRNIDNFFAENEQLAFCPGLIVPGIYYSDDKLLQTRIFSYSDTQRHRLGPNYLLLPANAPKCAHHNNHYDGSMNFMHRHEEVDYFPSRYDAVRNAPRYPIPTAHIAGRREKTVISKENNFKQPGERYRAMDPARQERFITRWVDALSDPRLTHEIRTIWLSNWSQADRSLGQKLASRLSAKPSITLVEDRTRPKQHRHCIHGYCAEAELLVSVECLAGFPSE

SEQ ID NO: 56085 - protein, 176 aa, Zea mays
  Coding DNA Sequence Number=SeqID_14306
MEAIARQKVGLPPRIVAFGALPTVWRGITAAQRLRHKVTDVGYEFLYLWRCTVVTRHGPSFIRIGEGDIQPRSPWRAARVVATDFPKKRRWIWCVDLLEESRTRRKVRGLFEGDETDDPGPLASDTMKKKKKRGRKWAGGEEAGPRASESAQGRRRIKRFRLGVGNASGTQQLHKK

SEQ ID NO: 56086 - protein, 145 aa, Zea mays
  Coding DNA Sequence Number=SeqID_14307
MEAIARQKVGLPPRIVAFGALPTVWRGITAAQRLRLAFTVALMVEPCRRVHERPHQPLVMHPDPRGDSQAQGHRCRIRVSLPMAVHSGHEAWPFLYTHRGGRFPAEESVAGGARRRNRFPKEAEVDLVRGFARGVADTPQGPRFV

SEQ ID NO: 56087 - protein, 218 aa, Zea mays
  Coding DNA Sequence Number=SeqID_14308
  Pfam annotation: Domain name=DUF623; Domain location=110-179; Score =88.3; E_value=2.4e-23; Accession=PF04844.4; Description=Protein of unknown function, DUF623
MEEAEAEEENKSTKAAGMGCKKNVTRLQRSFLHLSRALGKLHGRRGHGNANGEASLSSSSSAATSSFLSGSTTRAARRQRSTVITATAGSEADEPKAVVRGAGVAVATLSAAPYEDFRRSMREMVEAAAGTGSGGAAAAAVDWDFMEELLFCYLRLNDRAVHKDILRAFTDTVAAIRRRRRAAKSSRTRRRRRRQPRPGGDGPGRGDDCDGAEAVTSS

SEQ ID NO: 56088 - protein, 92 aa, Zea mays
  Coding DNA Sequence Number=SeqID_14309
MAQKIEQLGADLETRDKNHFGINGVATRFALDSIGEPRLNTCTGTGLEIKFQPVSFDVVGLDYHLSAKVAAWADKFWILAWAPLGIGMDWNQ

SEQ ID NO: 56089 - protein, 272 aa, Zea mays
  Coding DNA Sequence Number=SeqID_14310
  Homolog annotation: Hit_ID=Q69NC3; Match level="QueryCoverage=12%, HitCoverage=6%, E-value=2e-07, Identity=88%"; Hit description =Putative monosaccharide transporter
MAKFPGAMPTEAQGGHDGGVLTSCGSTQGTAHAHIGLRHGDVFRDTPPRVRRRQYKLPSPRPGLSRNGAREFGQERAMREIYDPHRPELEESVHPMGRKRAADPVIFIPELGAYPRGSTTAGPATVRGPAMAVKVAVIRADFGGRRAGTARVATPYVSGNGAHDHAGERDGITGPRRGSEGRGGCDPCPQVWKRLGTEQGREHSAGGGHLPLRGGLQMMSRCATSVAVFVLFTSFIIAMSIFIILLLTETKHGTQIKATSTSSRENVQEHEH

SEQ ID NO: 56090 - protein, 41 aa, Zea mays
  Coding DNA Sequence Number=SeqID_14311
MEGHGKLELGTPPAANGERPVRHGRISEHEGKRRRLQKGNL

SEQ ID NO: 56091 - protein, 182 aa, Zea mays
  Coding DNA Sequence Number=SeqID_14312
MGRGKRGRGLPRRAGDKRKHTPSPPSEDFGNSEYSEEVSSGYEGSPALASPSTSYDDLNDSQGLSAAVWMYMRVIERAGLEGSDESEVSTDEENSSSSFEERSGEDSDDEGDGSGNDSDGGDGGEGDDDDGKGGGGGDGSSGGGGSDGDGGDKGDGGYGGSKGDSGDSGSGDNKASGIAPLV

SEQ ID NO: 56092 - protein, 562 aa, Zea mays
  Coding DNA Sequence Number=SeqID_14313
  Homolog annotation: Hit_ID=Q2R9D4; Match level="QueryCoverage=20%, HitCoverage=36%, E-value=2e-32, Identity=61%"; Hit description=Non -imprinted in Prader-Willi/Angelman syndrome region protein, putative, expressed
  Pfam annotation: Domain name=DUF6; Domain location=1-114; Score=-2.9; E_value=0.096; Accession=PF00892.11; Description=Integral membrane protein DUF6
  Pfam annotation: Domain name=DUF803; Domain location=15-249; Score =89.1; E_value=1.4e-23; Accession=PF05653.4; Description=Protein of unknown function (DUF803)
  Pfam module annotation: Pfam domain module=DUF6::DUF803; Domain location=1-114::15-249
  Subcellular localization annotation: CTP_CleavageSite=53; ConfidenceScore=5.48e-01
MAAPASAAAGRGGAMSSDNAKGLVLAVSSSAFIGASFIVKKMGLRRAADSGVRAGEIANFAAYAFAPAILVTPLGALSIIISAALAHAILQEKLHTFGILGCVLCVVGSITIVLHAPQERDIDSVKEVWDLATEPAARDDRAEVDTARPFRSVKLEVAVFSARIVVGSTNSHSRHSSGAKGEAEVMPAIVPMYSAPSSPASSLASSPPPVNKPCSGRGGDGRGDEAAPAGGLAIARSIQKLEADVSETRHEVSRFRKRCAETEVALASLRAQLHRGLSTLAGTEADRAAAAARRSVGGDTDDSASSSSLTLRSGRWGGGLAASECLSLGEVDYGVELVGSRRRNVKLVVPLIGDILFSRRRSTNEKGDGGFYKIRSVPLPPFMATPPPPCDANLHCYLLVLQDPQKANNKNRSELFRHVFFASFRSIPPPRRRAAADDPVDVIATHVASPFLTTRAGRPDTMPGKQEEGGQGPPGSSVCLWLVTVLLLLSLLAGGACLAAYVLLPPQETPAWLPAVGLALVALPWAFWILTCAYRCAAARAAERRTMAVAPSPGSMCSRSGS

SEQ ID NO: 56093 - protein, 242 aa, Zea mays
  Coding DNA Sequence Number=SeqID_14314
  Gene Ontology: Mol. function=DNA binding; Cellular component=oxygen evolving complex; Biological process=DNA integration
  Homolog annotation: Hit_ID=O24587; Match level="QueryCoverage=81%, HitCoverage=18%, E-value=4e-88, Identity=78%"; Hit description=Pol
  Pfam annotation: Domain name=rve; Domain location=138-242; Score =25.4; E_value=4.5e-05; Accession=PF00665.16; Description=Integrase core domain
MQSCAERREKPWKRGVQKGAKVDMDLDKGVRCESRQEKRDRRSDGYLAFKGLSDDKLYLVDFTKENVDLDACLLAKTNMGWLWHHRLAHIGMKKLHKLIKGEYVLGLNDIYFEKDIPCATCQAGKQVGTSHPSKNVMTTSRPLELLHMDLFGLVAYLSIGESKYGLIIVDDYSRFTWVFFLQDKSETQETLKRLRRHTQNEFELKEKKIRSDNGSEYKNLQVEEYLEEEGIKHEFALPTHHN

SEQ ID NO: 56094 - protein, 100 aa, Zea mays
  Coding DNA Sequence Number=SeqID_14315
MVLAHLAPKWPPRDLDVPSSSGTEGAQGYEEGKEQDEFQESNKPGFGERELPDEKDHKGHSTVASGKGGTASGDMVKTNDYGRYDPTPAFSKPRSKLIPN

SEQ ID NO: 56095 - protein, 185 aa, Zea mays
  Coding DNA Sequence Number=SeqID_14316
  Gene Ontology: Mol. function=protein serine/threonine kinase activity; Cellular component=integral to membrane; Biological process=protein amino acid phosphorylation
  Homolog annotation: Hit_ID=Q53KI1; Match level="QueryCoverage=84%, HitCoverage=17%, E-value=3e-75, Identity=83%"; Hit description =Receptor-like kinase RHG4
MAALGCVKPEKFVKLVGYCGIDKRAIDMYTATGKVTTKVDVYAYGVILMEMITGRKVLDDSLPEDETHLVTIFRKNMLDREKFRKFLDPALELSAESWNSLLEVADLARHCTAREPHQRPDMCHCVNRLSSLVDQWKPTNVIDDDEEGGTSEMGLHQQLERWRCGDFTISDSESFSTYNTSRKYH

SEQ ID NO: 56096 - protein, 277 aa, Zea mays
  Coding DNA Sequence Number=SeqID_14317
  Gene Ontology: Mol. function=transporter activity; Cellular component= membrane; Biological process=oligopeptide transport
  Homolog annotation: Hit_ID=Q53L71; Match level="QueryCoverage=92%, HitCoverage=39%, E-value=1e-100, Identity=71%"; Hit description=POT family, putative
MEEHQQSNHAVGRKGVGRKGANEVSERIVSASVGANLIIYLTTKYHLGAASSAIIIFVYLAAANFLPVCGAIVSDALLGRCRMVTLTLFSCTIGTTLLCLTSVIARLTPPDCVQPNEGCAPPTPMQLLVLCASLGFMALGASGVRPCCLAFAEDQIAHWDTAKKDRALRALFSWYYASVGFSQIVAVTVLVYFQDKMGWKVGFMVSAAIMASVTLVNCAAASFYVKVKPQKSMWVGLLKVVVVAVKNRDLVLPEADHGAQFHCLPGSTQTVPSNKIR

SEQ ID NO: 56097 - protein, 215 aa, Zea mays
  Coding DNA Sequence Number=SeqID_14318
  Gene Ontology: Mol. function=transcription regulator activity; Cellular component=nucleus; Biological process=regulation of transcription
  Homolog annotation: Hit_ID=Q2R5B7; Match level="QueryCoverage=81%, HitCoverage=47%, E-value=1e-37, Identity=48%"; Hit description =Expressed protein
  Pfam annotation: Domain name=HLH; Domain location=51-101; Score=35.6; E_value=1.8e-07; Accession=PF00010.16; Description=Helix-loop-helix DNA-binding domain
MAKRRKLSTDAARDEAGSHGNGKGKEVAPAAEPEPQPPKDYIHVRARRGQATDSHSLAERVRREKISERMKLLQDLVPGCSKVTGKAVMLDEIINYVQSLQCQVEFLSMKLSTVDPRRELDVGCFVVPKDDVTMQANRLCAPATSSSSSAFCYAARSVVTNAKGFETPLPLANHGVAADDRPLERRTRDAGPQSTCELDVSTTLYLYQTEWRLII

SEQ ID NO: 56098 - protein, 778 aa, Zea mays
  Coding DNA Sequence Number=SeqID_14319
  Gene Ontology: Mol. function=protein serine/threonine kinase activity; Cellular component=integral to membrane; Biological process=protein amino acid phosphorylation
  Homolog annotation: Hit_ID=Q53KI1; Match level="QueryCoverage=92%, HitCoverage=79%, E-value=0.0, Identity=64%"; Hit description =Receptor-like kinase RHG4
  Pfam annotation: Domain name=APH; Domain location=583-759; Score= -4.5; E_value=0.012; Accession=PF01636.13; Description=Phosphotransfer ase enzyme family
  Pfam annotation: Domain name=LRRNT_2; Domain location=27-65; Score =19.6; E_value=0.0078; Accession=PF08263.3; Description=Leucine rich repeat N-terminal domain
  Pfam annotation: Domain name=LRRNT_2; Domain location=326-364; Score =8.3; E_value=0.12; Accession=PF08263.3; Description=Leucine rich repeat N-terminal domain
  Pfam annotation: Domain name=LRR_1; Domain location=116-138; Score =15.6; E_value=0.18; Accession=PF00560.23; Description=Leucine Rich Repeat
  Pfam annotation: Domain name=LRR_1; Domain location=140-163; Score =0.2; E_value=2.6e+02; Accession=PF00560.23; Description=Leucine Rich Repeat
  Pfam annotation: Domain name=LRR_1; Domain location=165-187; Score =4.9; E_value=34; Accession=PF00560.23; Description=Leucine Rich Repeat
  Pfam annotation: Domain name=LRR_1; Domain location=189-211; Score =18.9; E_value=0.018; Accession=PF00560.23; Description=Leucine Rich Repeat
  Pfam annotation: Domain name=LRR_1; Domain location=240-261; Score =11.1; E_value=2.4; Accession=PF00560.23; Description=Leucine Rich Repeat
  Pfam annotation: Domain name=LRR_1; Domain location=263-285; Score =11.6; E_value=1.9; Accession=PF00560.23; Description=Leucine Rich Repeat
  Pfam annotation: Domain name=LRR_1; Domain location=287-308; Score =4.2; E_value=46; Accession=PF00560.23; Description=Leucine Rich Repeat
  Pfam annotation: Domain name=LRR_1; Domain location=367-389; Score =1.3; E_value=1.6e+02; Accession=PF00560.23; Description=Leucine Rich Repeat
  Pfam annotation: Domain name=LRR_1; Domain location=391-413; Score =19.4; E_value=0.013; Accession=PF00560.23; Description=Leucine Rich Repeat
  Pfam annotation: Domain name=LRR_1; Domain location=415-436; Score =14.8; E_value=0.32; Accession=PF00560.23; Description=Leucine Rich Repeat
  Pfam annotation: Domain name=LRR_1; Domain location=69-91; Score=2.5; E_value=98; Accession=PF00560.23; Description=Leucine Rich Repeat
  Pfam annotation: Domain name=LRR_1; Domain location=93-114; Score =12.7; E_value=1.2; Accession=PF00560.23; Description=Leucine Rich Repeat
  Pfam annotation: Domain name=Pkinase; Domain location=580-778; Score =58.4; E_value=2.4e-14; Accession=PF00069.15; Description=Protein kinase domain
  Pfam annotation: Domain name=Pkinase_Tyr; Domain location=580-778; Score=38.0; E_value=8.4e-15; Accession=PF07714.7; Description =Protein tyrosine kinase
  Pfam module annotation: Pfam domain module=APH::LRRNT_2::LRRNT_2::LRR_ 1::LRR_1::LRR_1::LRR_1::LRR_1::LRR_1::LRR_1::LRR_1::LRR_1::LRR_1: LRR_ 1::LRR_1::Pkinase::Pkinase_Tyr; Domain
  Pfam module annotation: Domain location=116-138::140-163::165 -187::189-211::240-261::263-285::287-308::367-389::391-413::415 -436::69-91::93-114::580-778::580-778
MRRARILLLPLLLLLAVAGPAAAATAMTADAGIILDLAKSLTNPPPSWTGTDVCGGVSFSGITCDGAGRVTGINLVKLHLSGTLSSSLANLTSLQSLQLQGNVLEGDVPSLARMGSLETLVLDGNAFSALPPDFLEGLPSLLKISMDNLPLNPWSIPDAIAGCAMLQTFSASNASVSGSLPAVLANLTSLQTLRLSYNNLTGVLPVGLEALGALETLQLNNQKSDGKLSGPIDVVAKLPSLKTLWLQSNLFTGPIPEFDPNSQLEIFNVRDNKLTGPVPPSLSGIASLQDVSLSNNFLQGPKPNFTAKTVDLKSGNGFCREDSGPCDPLVTTLLEVALGFGYPLQLAKWAGNNPCDPWPGISCIKMDVTQIKLPRQNLSGIISPAFASLNRLQRLDLSNNQLTGVIPDALTTLETLKYLDVSNNRLTGQVPEFKQPNIKLMTAGNRFGESGGDSGGGGSNDGSSSSNPTGSHNSKSNVGMIIGILLSVILLVICIGLFLHHRRKKNVDKFSPVPTKSPSGESEMMKIQIVGTNGHSSISGSVPTELYSHSSVDSTNIADLFESHGMQLPMSVLLKATNNFDEDYILGRGGFGVVYKGTLNGKLVAVKRCDSGTMGTKGLQEFMAEIDVLRKVRHRHLVALLGYCTHGNERLLVYEYMSGGTLREHLCDLQQSGYTPLTWTQRMTIALDVARGIEYLHGLAQETFIHRDLKPSNILLDQDLRAKVSDFGLVKLAKDTDKSMMTRVAGTFGYLAPEYASMFTSHFYKYFVLKYNQLLSRI

SEQ ID NO: 56099 - protein, 60 aa, Zea mays
  Coding DNA Sequence Number=SeqID_14320
MEERNVHMSERSDNVNDECSNPIPRRQKMRKAAKGSVATGDDCGGVVDSNGAYGDPPSMV

SEQ ID NO: 56100 - protein, 51 aa, Zea mays
  Coding DNA Sequence Number=SeqID_14321
MEARRASRYRVHGRRVLDLINGNLEQVLETLSFGVQHRPQIGQKEQNDEEG

SEQ ID NO: 56101 - protein, 78 aa, Zea mays
  Coding DNA Sequence Number=SeqID_14322
MEARRALRYRVHWRRSKRPRNPKPEVKKKTCKVKVDRVEKSYDALGITTLGRDLQPMRVLELIDDNLDQVLETWSFGV

SEQ ID NO: 56102 - protein, 82 aa, Zea mays
  Coding DNA Sequence Number=SeqID_14323
MDSGRIWYCLWPVGQDPASGNGCTQQRHAGTRQQREPMEISGRDQDPASGNGCTQQRHAGTRQQREPMEISGRDQVLGRAGM

SEQ ID NO: 56103 - protein, 62 aa, Zea mays
  Coding DNA Sequence Number=SeqID_14324
MERSPETTVQPQGLYGSVSRIFGFGMENFSYDRTKGNKEWAMKIEAKGLRLDMLTKLKYDND

SEQ ID NO: 56104 - protein, 71 aa, Zea mays
  Coding DNA Sequence Number=SeqID_14325
MTTVVRSIARRRQQDPSSTDSCASTGLKHFSNGHVIAYAGLKHFSDSHVGMEVQGLHAGKVERENELTEST

SEQ ID NO: 56105 - protein, 233 aa, Zea mays
  Coding DNA Sequence Number=SeqID_14326
MGLLPKAPTPLLKKKLARLGQDLEKGKGPAEIEEAKKAIELTHHSAKGPSTKSLVAEGTEFTTLWGRLQFGCAKKEKSFKILEKDFIESRTEVQRLETSNVEQKNRIASLEAEMERMKKDYKFEMTKLRQSSAKVAVNLCSAQVKIDDMKAEINHTGQRNFYLRFGKGLIIDESIKNREKVMIEVKHTEAEAMEFAIEAEAITARAIEKAKDDEILKISKQIYEEAMRSDLGN

SEQ ID NO: 56106 - protein, 237 aa, Zea mays
  Coding DNA Sequence Number=SeqID_14327
  Gene Ontology: Mol. function=transferase activity; Cellular component= membrane
  Homolog annotation: Hit_ID=Q2RB29; Match level="QueryCoverage=78%, HitCoverage=39%, E-value=1e-74, Identity=73%"; Hit description =Secondary cell wall-related glycosyltransferase family 47, putative, expressed
  Pfam annotation: Domain name=Exostosin; Domain location=58-237; Score= -26.6; E_value=1.3e-07; Accession=PF03016.6; Description=Exostosin family
MAPRGRTLLLPLAAATVLVASTIFLFAAVGARWRPADTGLPVPPDAFPTGHVTDGSLPPPRYPGGLNQQHSDEYWLTLDLLSSSSFSLSPPCGRHSAVRVTDPRDADLVFVPFFASLSYNRHSRPLPPEKVGRDKALQEKLVGYLTARPEWRRFGGADHVIVAHHPNSLLHARAALSPAVFVLSDFGRYPPRVASLEKDVIAPYKHMAKTFVNDSAGFDDRPTLLYFRGAIYRKEII

SEQ ID NO: 56107 - protein, 386 aa, Zea mays
  Coding DNA Sequence Number=SeqID_14328
  Gene Ontology: Mol. function=hydrolase activity, acting on acid anhydrides, catalyzing transmembrane movement of substances; Cellular component=proton-transporting two-sector ATPase complex; Biological process=ATP ...
  Gene Ontology: Biological process=synthesis coupled proton transport
  Homolog annotation: Hit_ID=Q84PC1; Match level="QueryCoverage=95%, HitCoverage=64%, E-value=1e-104, Identity=85%"; Hit description =Putative vacuolar ATP synthase subunit C
  Pfam annotation: Domain name=V-ATPase_C; Domain location=9-385; Score= 425.4; E_value=7.9e-125; Accession=PF03223.5; Description=V-ATPase subunit C
MAFPVDTYLTRFVWDEGKYPTMSSLKEIVGSIQSQVAKIEDDMKVFLGALTIWMAVENLLSKILRLRSFHKFHMVFWLADCRSVDQAVTAIRLVVSFPEKGMLVLINLLSCPDCDGDDGQMRSCVELQSKVATGEAFAGAWEGFQNILEVRAAEYNNVRSQLTAINRKQSGSLAVRDLSNLVKPEDMVCSEHLVTLLAIVPKYSQKDWLSSYESLDTFVVPRSSKQLYEDNEYALYTITLFAKVVDNFKVRAREKGFQVRDFEYSPEAQESRKQEMEKLLLEQEVMRTSLLQWCYASYSEVFSSWMHFCAVRIFVESILRYGLPPSFLSAVLAPSTKGEKKVRSILEDLCGNVHSIYWKGEDDVAVAGLGGESEVHPYVSFTINFV

SEQ ID NO: 56108 - protein, 207 aa, Zea mays
  Coding DNA Sequence Number=SeqID_14329
  Gene Ontology: Cellular component=chloroplast thylakoid membrane
  Homolog annotation: Hit_ID=Q2QYC9; Match level="QueryCoverage=64%, HitCoverage=40%, E-value=4e-37, Identity=68%"; Hit description=FHA domain containing protein, expressed
  Pfam annotation: Domain name=FHA; Domain location=103-192; Score =42.6; E_value=1.4e-09; Accession=PF00498.16; Description=FHA domain
  Subcellular localization annotation: CTP_CleavageSite=66; ConfidenceScore=5.79e-01
MAATSSLLLASGSRRWPATLPPSPSPQQQRLVIFCLAARTRPLDSKRGSWRRSSSATGGRSTAVSSSSERWVLDPAGDGDWRHIGYKVARPGAIEIVSEDTAVTVGRVADKADIVLPVATGQLAAVAIMLSSTHGRRQGGHAVSGAHARLEKKGGSLLVTDLDSTNGTYINERRLNPGFPASVDPGSLLIFGDIPLGHVPCKEDGGG

SEQ ID NO: 56109 - protein, 113 aa, Zea mays
  Coding DNA Sequence Number=SeqID_14330
MWPRGHQEVEERGTDTVVAGERDEHVLRAHNIAKDGGAGEILRRRLEAKAELVQRVGERQVGGEKGTILCGFRSPHLAASWWTGGCNGTRFPGRPIRRSQPSEKIYSNHGVGE

SEQ ID NO: 56110 - protein, 157 aa, Zea mays
  Coding DNA Sequence Number=SeqID_14331
  Subcellular localization annotation: CTP_CleavageSite=31; ConfidenceScore=5.30e-01
MSLGSSAQMDRSSKRSPGRHRRPQRRLPKLRVDQNTTTTRRDWSRDARPEPAVVKEPGGRPYDGGEHGACPLCARYQVAREHVRVLCCVKGSPTPGPRFATAKGDRRAETSVHSQLSKVLFGSRNVTYPLRYKYVNQTAPKLLERNAVCCTDAERNA

SEQ ID NO: 56111 - protein, 152 aa, Zea mays
  Coding DNA Sequence Number=SeqID_14332
  Gene Ontology: Mol. function=protein dimerization activity
  Homolog annotation: Hit_ID=Q2QRD1; Match level="QueryCoverage=35%, HitCoverage=5%, E-value=1e-09, Identity=47%"; Hit description=HAT family dimerisation domain containing protein
  Pfam annotation: Domain name=zf-BED; Domain location=90-140; Score =8.6; E_value=0.058; Accession=PF02892.5; Description=BED zinc finger
MRDLVSSMERRYDPTSINNELVLIVQVPDDVYDVHDGLDDHFCATAPTPTINLGDDSVVVEGATPLYGSSAATATASTIASIGRKRKCTSDVWEDMDKIFSTKNDVEVRVGARCHFRKKELHARSTIGIGHLARHMKKCKTAPWSHWEPVYD

SEQ ID NO: 56112 - protein, 128 aa, Zea mays
  Coding DNA Sequence Number=SeqID_14333
  Homolog annotation: Hit_ID=Q6F3B5; Match level="QueryCoverage=32%, HitCoverage=3%, E-value=3e-14, Identity=90%"; Hit description =Expressed protein
  Subcellular localization annotation: CTP_CleavageSite=34; ConfidenceScore=5.14e-01
MAQRLSGQPGTFLASLGRAWTHVLARDPNRHGPSQQRAGPGTTLFVPCLTGLEPAGNWARIRLHGPSFTASRYSGGQATKQELFTRYTFISIESQIRVLGDFAFMLRDYELALSNYRLLATDYKFDKA

SEQ ID NO: 56113 - protein, 152 aa, Zea mays
  Coding DNA Sequence Number=SeqID_14334
  Gene Ontology: Mol. function=GTPase activator activity; Cellular component=nucleus; Biological process=intracellular transport
  Homolog annotation: Hit_ID=Q10MW8; Match level="QueryCoverage=79%, HitCoverage=50%, E-value=3e-48, Identity=80%"; Hit description=Ran -binding protein 1, putative, expressed
  Pfam annotation: Domain name=Ran_BP1; Domain location=39-150; Score =96.6; E_value=7.3e-26; Accession=PF00638.9; Description=RanBP1 domain
MADPAEHRPAEEDEEAAAAGEDEDTGAQVAPIVKLEEVAVTTGEEDEDVLVDMKAKLYRFDKEANQWKERGTGTVKLLKHKETAKVRLVMRQAKTLKICANHLGFDTGLYCLSPSSERTVVATTKMQEHAGSDKSCVWHALDFADVADPEID

SEQ ID NO: 56114 - protein, 371 aa, Zea mays
  Coding DNA Sequence Number=SeqID_14335
  Gene Ontology: Mol. function=protein kinase activity; Cellular component=protein complex; Biological process=protein amino acid phosphorylation
  Homolog annotation: Hit_ID=Q10MW9; Match level="QueryCoverage=99%, HitCoverage=72%, E-value=1e-100, Identity=55%"; Hit description =Protein kinase domain containing protein, expressed
  Pfam annotation: Domain name=Pkinase; Domain location=3-263; Score =210.5; E_value=4e-60; Accession=PF00069.15; Description=Protein kinase domain
  Pfam annotation: Domain name=Pkinase_Tyr; Domain location=3-263; Score=50.4; E_value=1.5e-15; Accession=PF07714.7; Description =Protein tyrosine kinase
  Pfam module annotation: Pfam domain module=Pkinase::Pkinase_Tyr; Domain location=3-263::3-263
MEWQRGKCIGKGAFGTVHLAVYTATGRAFAVKSVDAESAAAMACLESEIRILKRLSSPHVVAYLGDDGAAGPTRNLHMELVPGGSAAEAAAALGGLGERGARGVLRRVAAALRYLHEDAGVVHGDVKGRNVLLGCRGCGAKLADFGAARLVSDAATATAPRGPRGTPAWMAPEVARGGAATPASDVWALGCTALELLTGRRPWSELGGATEVGELLLLVGFGGTRPAIPACLSDACLDFLDRCLRRDAAQRWSCEQLLRHPFLSTDAADDATDPWPSPSPSPFPSPRAVLDWAPSDSDSEALDDAEAESKHEVMARAKGRVAELASNGPPTSWDWEEEVGWGTGATLASDTWAPPPSSEAPRNGSANSDAC

SEQ ID NO: 56115 - protein, 43 aa, Zea mays
  Coding DNA Sequence Number=SeqID_14336
  Subcellular localization annotation: CTP_CleavageSite=36; ConfidenceScore=5.08e-01
MAAQGDSRWATSRRSTAISSPHTRDRRRGSSGRLAVAQGESTP

SEQ ID NO: 56116 - protein, 84 aa, Zea mays
  Coding DNA Sequence Number=SeqID_14337
MIVIESLPCFLLLLLAPASTLAFPMDGNASLMYLLNCLLFPSLCGQIVKVLVAANVVVDWSANVLVKSCMLQVQEQTFAKLNWF

SEQ ID NO: 56117 - protein, 210 aa, Zea mays
  Coding DNA Sequence Number=SeqID_14338
MEISGRAAAAEAEALIAGGMRDGVRLRQRQNNEVSIGAYIRITGNQRQLFSYLPKQRTTYCHRAKDDSVSIPCCVDRSSRRCSLHFVIRSASASVRSLEDTLVFAFYFQQACTHHILVNASLPGHAEKLFISTENPLFTADDVVQDTVDSSYSSPTDMDWTVSSFEAHEPYDYEHRTGTTGSREPFKAVLCAHLGIKSPHSSTKVAAAFR

SEQ ID NO: 56118 - protein, 481 aa, Zea mays
  Coding DNA Sequence Number=SeqID_14339
  Homolog annotation: Hit_ID=Q7XEN2; Match level="QueryCoverage=90%, HitCoverage=69%, E-value=3e-65, Identity=38%"; Hit description =Expressed protein
  Pfam annotation: Domain name=DUF593; Domain location=162-255; Score =163.4; E_value=5.7e-46; Accession=PF04576.6; Description=Protein of unknown function, DUF593
WSQINTSDKNIDVQSKAIPEEVLAELPKEKRSPGVEAAKDFNASANAGTRSSVDTHISWNNSPKIASACRGYYKSPRLSEIISARDTNSKTNEEVKTFLSQLSTARGFDSSLNEMTPRSSTHIDDYRQHDATGMTPFLDRNNSNLDSFDANTTSEDEGESSLEHLKKQAKFNKKKMGMLYKELEAERSASAVAVSEAMAMINRLQEEKASMHMEALQYLRMMEEQADHDQEAIEKLNDLLTEREKELLDLEAELEGYRSKLHDQPFDVGKFGATDGAMAFRVLEGSDFMRHTIFDFEDEKAKILESLHRLEEILGMPSIDMGDANDSLQNSLLSDQSMHISQDIENSELESLSLPREDMISESISSQCYDEQESVKYMHKHMHNHEQDDNESVDKQQKNVTSCSHSDDGNIHTMKSVKHEISLLNARFKALEADQDFLKQILRSLNVSSDGVECIQEITSHLRELRRIMADQRDMTVFMRS

SEQ ID NO: 56119 - protein, 182 aa, Zea mays
  Coding DNA Sequence Number=SeqID_14340
MVSSSGATAEHVRRAVRAGERRVEHGRREELGEGEGEGSASDFIGEKGESKRCPGRWPAMASRLPLMVSINRDRGAVGPCAHDAVLLGVRSLALHGLGWRGRSAGRGWLRVEQLLAVGVARPSGSGHEAGCRRFWRLLAALQREKGEWKESGAGWVVEAARESGGTGATRVRVQGAARLTWA

SEQ ID NO: 56120 - protein, 351 aa, Zea mays
  Coding DNA Sequence Number=SeqID_14341
  Homolog annotation: Hit_ID=Q10BX5; Match level="QueryCoverage=96%, HitCoverage=97%, E-value=6e-50, Identity=59%"; Hit description =Expressed protein
  Pfam annotation: Domain name=DUF569; Domain location=1-147; Score =274.1; E_value=2.7e-79; Accession=PF04601.4; Description=Protein of unknown function (DUF569)
MELFERARTVRLRSHHDKYLYADEDEVHVIQDRNAASPNARWVVEPVPHSPGVLRLRGRYGRYLSASNEPFLLGGTGRKVLQTLPHRLDSSVEWVPVRDDAGSNAHARAVRLRTRYGNFLRANAGLPPWRNSVTHDVPHRHTGWVVWDVEIFQALPPPTGPDSSSSSAAAETDADAFASSPAPSSSYNNKAPHSSAPLPTSALRPPPPPAHHREENLVPFKGQPAPPPPGYIAPPAPGFYRLESTDSFSVPLHKVEGRAVHYHIGDSDGEVRPDEEPHYLTFNGTSLEELLERLKEETGLHDVIMCSRSPINGKLLPLRLQLPPNNAAVHIVLVQESSNGALSSLRHYIYE

SEQ ID NO: 56121 - protein, 112 aa, Zea mays
  Coding DNA Sequence Number=SeqID_14342
MSPCGELAGAGAVVGVWRLQWWAVSVAVGRWAPAGGADRRWGGPTVALGGGAGAVGRTGGGEDERGPSMAVADRWWASVVVQRGGALADSGVAVSGSTEWVDDAFEKESVWG

SEQ ID NO: 56122 - protein, 459 aa, Zea mays
  Coding DNA Sequence Number=SeqID_14343
  Homolog annotation: Hit_ID=Q7XHY2; Match level="QueryCoverage=25%, HitCoverage=28%, E-value=5e-09, Identity=33%"; Hit description=F-box domain containing protein-like
  Pfam annotation: Domain name=DUF295; Domain location=310-364; Score =34.7; E_value=3.3e-07; Accession=PF03478.8; Description=Protein of unknown function (DUF295)
MPCTLSTQKRAHLAHQTAPTAAMSYWSSSLPKDITIKLAERMVDDNDIDCYMAFRRVCRNWRAETSDHPGKADDRTDPTRFEPTKWALLDRQEERVTFVDVDAGRFLRMSVPVLRDYLFVGATSGGLIVLGEKQEPHRTRLLNPFTGAVAGFKVRAPAEGVKAAAVTTKPLMLFVSLEDGDIIWADQSSDHFKRFNRLDSDKPTPIAALDGDVYASDPHGAIFTSIVDDVPDGQKCRSAATIWMGTSIPSPNHNASPDASPAAAAALAGSGGRYYLVQSGGDLLLVTRPLGGGVPDQPLVRRVDTKQNVLEPVSSIGSRAIFVSHVRCISIDAGKFPFEGIKAGCIYFVEPVLAARGGYEPSRITTCQVAAGLQAREIMFEEGILEGCYRPFTITQAFAEYCRSVHYHELYQMICSYWDWDFSDSESDGTSSYGSASDYEAALSELEEAAEFLGINFEA

SEQ ID NO: 56123 - protein, 101 aa, Zea mays
  Coding DNA Sequence Number=SeqID_14344
MDKGHSLVARSVLDPRSAPRPMSLIRAGLEVPHRHTFSGLFLAHTEYAMYGIHYYPHVSKRLAEETGRYRPHNLMHDSVLDYAATYTKLVRLVKNQTKMLA

SEQ ID NO: 56124 - protein, 303 aa, Zea mays
  Coding DNA Sequence Number=SeqID_14345
  Gene Ontology: Mol. function=identical protein binding; Cellular component=cytoplasm; Biological process=negative regulation of enzyme activity
  Homolog annotation: Hit_ID=Q9FIF8; Match level="QueryCoverage=57%, HitCoverage=23%, E-value=4e-45, Identity=54%"; Hit description =Serine protease-like protein
  Pfam annotation: Domain name=Peptidase_S8; Domain location=43-288; Score=-37.6; E_value=9.2e-05; Accession=PF00082.12; Description =Subtilase family
MPRPRTVPPLLLLLLLLLVAVFATSEVPTSDGGQVYIVYLGHLPSTDADASEPGGFSAVEFAHHGLLNQVLDDGSKIIGARSYDLTGSSSESSPLDDAGHGSHTASTVAGMAVANVSFYGLAAGTARGAVPGARLAIYKVCQGEGCSDADILAGFDDAIADGVDVISFSIGSSSPSDYFSDAQAIGSFHAMRRGVLTSAAAGNSGLDGGYVCNVAPWMLSVAASSIDRQFIDKIVLGNGQTIAGSSINTFATITNATLAFPANGNPVGTIDRTETTTNTQAPVPASFSSPGPNLITTGILKVR

SEQ ID NO: 56125 - protein, 361 aa, Zea mays
  Coding DNA Sequence Number=SeqID_14346
  Homolog annotation: Hit_ID=Q9FIF8; Match level="QueryCoverage=47%, HitCoverage=22%, E-value=2e-28, Identity=40%"; Hit description =Serine protease-like protein
MDPSRNPGGGELVYGAGQLNPSRARDPGLVYDTREDDYIRMLCAEGYNSTQLRVVTGSNATACPASASGGRSGAAAGLNYPTMAHHAKPGKNFTVRFLRAVTNVGAPRSVYTAKVAGSGSFVRVTVAPKRLEFSRLLQRLSFTVTVSGALPAANEFVSAAVVWSDGATKLKELLDVVNGGNNLLAQGAQSSSSERASTRGTDTKKQQSPPYVSNMALTFESAITLGWMPADGGQGCGGEGAVAAHCWTITGGENWAYEGSGLYHARVSQVERTGIAATIRFPSISVVDVSVGITCSDTSSNSEIRGYGPQHNTPPPVIPALGGPSEGEGATTKETPNQIDDFVNNLFASGGSGHNSNNPYM

SEQ ID NO: 56126 - protein, 82 aa, Zea mays
  Coding DNA Sequence Number=SeqID_14347
MGTALKALTLRVVLAACFFLGSLIHASEVIGDGDEKQQVYIVYMGHQHEPSSEELAAGGFSAAKAAHHRLLNQVLGHGRSSS

SEQ ID NO: 56127 - protein, 691 aa, Zea mays
  Coding DNA Sequence Number=SeqID_14348
  Gene Ontology: Mol. function=identical protein binding; Cellular component=cytoplasm; Biological process=negative regulation of enzyme activity
  Homolog annotation: Hit_ID=Q9FIF8; Match level="QueryCoverage=97%, HitCoverage=96%, E-value=1e-150, Identity=43%"; Hit description =Serine protease-like protein
  Pfam annotation: Domain name=PA; Domain location=338-423; Score=23.2; E_value=0.00093; Accession=PF02225.12; Description=PA domain
  Pfam annotation: Domain name=Peptidase_S8; Domain location=130-532; Score=49.6; E_value=1.1e-11; Accession=PF00082.12; Description =Subtilase family
  Pfam annotation: Domain name=Subtilisin_N; Domain location=29-117; Score=81.6; E_value=2.4e-21; Accession=PF05922.7; Description =Subtilisin N-terminal Region
  Pfam module annotation: Pfam domain module=PA::Peptidase _S8::Subtilisin_N; Domain location=338-423::130-532::29-117
MPRLLLLLLVTAIAAKDLSASETVGDGDQVYIVYLGHLPSSADASEHTEGFSAVELAHHDMLDQVLDGGSSASDRILRSYKRSLNGFAAKLSKEEAHKLSGMNGVVSVFPSRTLDLLTTRSWDFLGFPQTPIQELPLEGDVIVGMLDTGVWPDSPSFSDEGFGPPPSSKIIGARAYNGGSSSSGQSPLDDDGHGSHTASTAAGRAVGNVSMYGLAGGTARGGVPGARLAIYKVCCGEADILAGFDDAIADGVDVISISIGSPFPFDYFGDVIAIGSFHAMRRGVVTSAAAGNSGLDLGNVCNVAPWMLSVAASSIDRRFVDRIVLGNGKTIVGASINTFPTLSNATLAFPVNGSCDPENLAGGSYKGKIVLCQNAAANDGSGPLLAGAAGVVIVSRIPDVAFALPLPGLTVSQDQFDQTMAYVNSTSHPVGTIDRTETTVDPHSTSSGSRLLLFSRPQPDHPSSLEGIPNDTRKVQYNIISGTSMACPHASGAAAYVRSFHRDWSPAMIMSALITTATPMDTAANSNASALKYGAGQLNPVSAHDPGLVYDASESDYVAMLCAQGYNATQLALVTGSNATAACSNGSTTPGSPGDLNYPTMAAPVEPGKNFTAVFPRTVTNVGAATAVYDVRVGVPAEAASVVSVQVSPARLVFSEQNQKVSFTVTVSGAALEEGTVYSFTVVWYNDEHTE

SEQ ID NO: 56128 - protein, 63 aa, Zea mays
  Coding DNA Sequence Number=SeqID_14349
MEARSRLTVAPYSTSFSGGASATGPTLGLVLEPLPWRWMEVWPSIGGEGVGDEEAERIKLIIR

SEQ ID NO: 56129 - protein, 238 aa, Zea mays
  Coding DNA Sequence Number=SeqID_14350
  Gene Ontology: Mol. function=transcription regulator activity; Cellular component=nucleus; Biological process=regulation of transcription
  Homolog annotation: Hit_ID=Q10QP6; Match level="QueryCoverage=23%, HitCoverage=17%, E-value=3e-16, Identity=76%"; Hit description=Helix- loop-helix DNA-binding domain containing protein, expressed
  Pfam annotation: Domain name=HLH; Domain location=121-172; Score =62.5; E_value=1.4e-15; Accession=PF00010.16; Description=Helix-loop -helix DNA-binding domain
MTTVAVMEQWADKQQQAASTNAAAAAAQMPFLALLQGAGVVVEAEQQEEQHHDGRKRQAFARAVSDLDLLESCVTQAVAPAAAASAPVAGRTERRRKRQRPRARAAPPPEKRKKPEEAESQRMTHIAVERNRRRLMNDHLASLRSLIPSSYTPRGDQATVVGGAIDYVKQLEQQLVALQAAAAARRGVAGSGAAAVVNGRVGRRVRAPAMEEGCEVATADEVATVVHQIFAYAAGACC

SEQ ID NO: 56130 - protein, 118 aa, Zea mays
  Coding DNA Sequence Number=SeqID_14351
MNSFHRGRPDVSVKSSCAVLRAGARRRARRRRFAELAEACDAIPHVLQGTAIPLGIVRCTRLRTLNSAPAFGFRREGPDRAGADGSGNTGAFVLPIVQKLLSNRQADQPFFACVLRPT

SEQ ID NO: 56131 - protein, 156 aa, Zea mays
  Coding DNA Sequence Number=SeqID_14352
MGKGFLMGIDIFHGYEFGTTKPSGFIPIAISTMKVESETVPSQPLPQPQPQSQTGLPWHLYEQATLKKFRTNSPNAQGQGQGLSVRESGATAAAGTVLGETGSASSRPLWAARVIEGSTAGSLCLTAPGLSLFICRCQAINGGHTRKQALPLPLHT

SEQ ID NO: 56132 - protein, 360 aa, Zea mays
  Coding DNA Sequence Number=SeqID_14353
  Gene Ontology: Mol. function=oxidoreductase activity; Cellular component=proton-transporting two-sector ATPase complex; Biological process=flavonoid biosynthetic process
  Homolog annotation: Hit_ID=Q10SI2; Match level="QueryCoverage=98%, HitCoverage=98%, E-value=1e-148, Identity=70%"; Hit description =Oxidoreductase, 2OG-Fe oxygenase family protein, expressed
  Pfam annotation: Domain name=2OG-FeII_Oxy; Domain location=178-308; Score=114.2; E_value=3.9e-31; Accession=PF03171.10; Description=2OG -Fe(II) oxygenase superfamily
MAEHLISTADHDRLPDSYVRPETQRPRLREVVPDAEIPVVDLADPDREAVVARVAEACRTHGFFQLTAAMMSVAYEFFRLPAEEKAKLYSDDPAKKMRLSTSFNVRKETVHNWRDYLRLHCHPLEQYVPDWPDNPPSFRRTVSAYCSAVRELGFRLYVAISEGLGLDGAYIKEALGEQEQHMAVNFYPRCPAPELTYGLPAHTDPNALTILLMDQQVAGLQVLKDGRWIAVNPRPGALVVNIGDQLQVTCSCLALPLFPPSHLLSAPGLHYCTAPAQALSNGRYRSVWHRAVVNADRPRMSVASFLCPCNDARIGPAARLLTDGTPAVYRDYTYAEYYAKFWSRNLDQEHCLELFRTPTS

SEQ ID NO: 56133 - protein, 36 aa, Zea mays
  Coding DNA Sequence Number=SeqID_14354
MGKTKRSSCQQDNHNDSLASKIMRSRIPDLPEVFFG

SEQ ID NO: 56134 - protein, 63 aa, Zea mays
  Coding DNA Sequence Number=SeqID_14355
MAARRGMHVGMRMGFAGRGNGNGLCGEGGSREWEWALRGGENEKDNAGMGMAEHGMRAYPLPP

SEQ ID NO: 56135 - protein, 433 aa, Zea mays
  Coding DNA Sequence Number=SeqID_14356
  Homolog annotation: Hit_ID=Q53PH6; Match level="QueryCoverage=86%, HitCoverage=32%, E-value=1e-136, Identity=72%"; Hit description =Expressed protein
MDLLIAQITTDLRSSDALRQSSALLQALQQCAAGRDVSALARTAATEILSAPSSAVCKRLALDLLRALPLPPDLLDPLLLSSLRSDLSFPDPDVAASSIASFPSLPSHLLPSLLSSAHAEIANALSSPAESLRLAAVTSLSSLLPRDDLTLMCSTNPSLMAHATTWWGRLAELALDSADAVSAGAFEALARLFQELEGRRMSRLAGDKLVDGEGALAVRAQWAADAIDFIWSRRNMLIARSMVMPVESFRVTVYPLVHAAKMVASGVVNTLRRVAKPGDTTIADSVESSAEKLVGVSDIVSHLLPFLSSLDPPLVFEVGINMLALADVPGGKPEWASAAIIAILTLWDRQEFSSMRETIVRAVVTNLHLLDLGMQERYRSGKLTEQGGRDRRLTSWRSREARTDELTEQAVVAPSASRSAGRQRRATVGEKGT

SEQ ID NO: 56136 - protein, 50 aa, Zea mays
  Coding DNA Sequence Number=SeqID_14357
  Homolog annotation: Hit_ID=Q5JCT1; Match level="QueryCoverage=63%, HitCoverage=7%, E-value=2e-08, Identity=90%"; Hit description=OSA15 protein
MGLELAPNSHTTCLPVIGLAQDPNYAVARAASRAINELKKQWELEEGDSL

SEQ ID NO: 56137 - protein, 43 aa, Zea mays
  Coding DNA Sequence Number=SeqID_14358
MEEGPSGTMSPAPEMEEAPEMEEASTHVVGIGKKEAGLGHWAK

SEQ ID NO: 56138 - protein, 141 aa, Zea mays
  Coding DNA Sequence Number=SeqID_14359
  Gene Ontology: Mol. function=methylmalonate-semialdehyde dehydrogenase (acylating) activity; Cellular component =mitochondrion; Biological process=valine metabolic process
  Homolog annotation: Hit_ID=O49218; Match level="QueryCoverage=73%, HitCoverage=22%, E-value=7e-44, Identity=78%"; Hit description =Methylmalonate semi-aldehyde dehydrogenase
MRHDKWQFLRNASLFGSNPALPMQDVVNNICDDEDIKAVSFVGSNTAGMHIYSRASAAGKRVQCNMGAKNHAIILPDADRDATLNALIAAGFGAAGQREDELVKRASGLVVSSGMVNDADLGPVISRQSCFPPYDLTTERD

SEQ ID NO: 56139 - protein, 1031 aa, Zea mays
  Coding DNA Sequence Number=SeqID_14360
  Homolog annotation: Hit_ID=Q9FFN2; Match level="QueryCoverage=37%, HitCoverage=89%, E-value=1e-124, Identity=56%"; Hit description =Similarity to limonene cyclase
  Pfam annotation: Domain name=Aldedh; Domain location=864-1031; Score=- 210.6; E_value=1.2e-06; Accession=PF00171.12; Description=Aldehyde dehydrogenase family
  Pfam annotation: Domain name=Exostosin; Domain location=348-651; Score=222.1; E_value=1.2e-63; Accession=PF03016.6; Description =Exostosin family
  Pfam module annotation: Pfam domain module=Aldedh::Exostosin; Domain location=864-1031::348-651
  Subcellular localization annotation: CTP_CleavageSite=36; ConfidenceScore=5.25e-01
MASASRPSPSRHGGFGRDPRRRRHGTGSPGPWAHVSAPPRGPGSTCQLPLVADGHRVTGSPPAVTERPRRLVRLLSGAAGHARRIAGAVKEAGAGRAPRSRLRIDASLATALHFFAIDPVGPLILHSTMAPLIHSTPSNQFPVASAAAACCLLVLVTFLVVAACWWDPRTREASSWFLSPPRSAPSSFSSLTSAGGVGGGGEHLLATASSYYSAAAGFRNSTGKEVHQEVRGHGGDDRGFLSFVNSSFGYDEAPPPSAPAPASPVTGGSDEVIIQSTPPQVERRRDDVKLERLELGLARARSAIMEAIRKKDKVSPLPDKDYVPMGPVYRNAHVFHRSYLEMERQLKVYVYEEGEPPVFHDGPCRSIYSTEGRFIHSMETETEAEEGRRLRTRDPARAHVFFLPFSVVKMVQTIYEPGSRDMAPLKRTVADYVRVLSSKYPYWNRSLGADHFMLSCHDWGPYVSSANAQLFGNSIRVLCNANTSEGFDPARDVSLPQVNLRSDAVERQVGGPSASRRPVLAFFAGGNHGPVRPALLAHWGPGGRRGGDPDVRVSEYLPRGGGAPSYADMMRRSRFCLCPGGYEVASPRLAEALYLGCVPVVVDDGEYALPFADVLDWDAFALRLRVADIPRLKEILAAVSPRQYIRMQRRVRMVRRHFMLHGGPPRRYDAFHMILHSVWLRRLNVGPRDAGAAAIQNYRHDDIHRSHPRAQQTTPTRWLVLGRQATPRPNPEAPPPPIDRPSTHAPLGALPLRYARGPAAPRRAGAFLSLTDRATDPTLPHARSPRAPPVSGDGPLIHRRRRRRSVALQRPCLRPGTCPRLLPVPQSVLCFCLIARAALGTSSRLTSRIPPPQSRVRLLIGGEFVESRADEHVDVTNPATQEVVSRIPLTTADEFKAAVDAARTAFPGWRNTPVTTRQRVMFKFQELIRANMDKLAENITTEQGKTLKDAWGDVFRGLEVVEHACGMGTLQMGEYVSNVSNGIDTFSIREPLGVCAGICPFNFPAMIPLWMFPIAVTCGNTFVLKPSEKDP

SEQ ID NO: 56140 - protein, 88 aa, Zea mays
  Coding DNA Sequence Number=SeqID_14361
MSVLLFLLLRKCQCLNLLKLTPMCVTRLLWIPMGVTWMTLNPIGVIWPKLTPMGVLSTLLMKIWLGGILILKKNILKVRLNWPGFLLL

SEQ ID NO: 56141 - protein, 95 aa, Zea mays
  Coding DNA Sequence Number=SeqID_14362
MSALPEPTSGKKDKHRTRPIRSPPGDCRIQCAYLPCSGLQVLQIYNMRICGGLRLLKMNSDTVLFMLTCIHSHVILGLSLSAKTKIMKTVLRGTY

SEQ ID NO: 56142 - protein, 71 aa, Zea mays
  Coding DNA Sequence Number=SeqID_14363
MAVGEGCCRWAHRTVRCATGHCSMTVGAVSRCSAWHTGQSGATPDSPIVKCIVSYYKCDAHDNLCTYESML

SEQ ID NO: 56143 - protein, 144 aa, Zea mays
  Coding DNA Sequence Number=SeqID_14364
  Gene Ontology: Mol. function=dihydroorotate dehydrogenase activity; Cellular component=cytoplasm; Biological process='de novo' pyrimidine base biosynthetic process
  Homolog annotation: Hit_ID=Q6Z744; Match level="QueryCoverage=90%, HitCoverage=32%, E-value=1e-28, Identity=56%"; Hit description =Putative dihydropyrimidine dehydrogenase
  Subcellular localization annotation: CTP_CleavageSite=31; ConfidenceScore=5.10e-01
MESLTLRASTAASKLQRRRLLPGRQRATYVRATASAGEPDLSVRVNGLQMQWGRGGTDFRSLRTCSSYADVQQAVVAVSLDAEKVINVTPRYAKLRAEPNGAAMGRIIGWQNIELISARPLETMLNEFKQLNTYRFNYVGVQQS

SEQ ID NO: 56144 - protein, 200 aa, Zea mays
  Coding DNA Sequence Number=SeqID_14365
MEEDVGEEGTLQEICDEIPIAVFHPTKGFFSPGLKKAKDHTYTVNTTKVLMLNKEIEQKIISDSQLSEVLDNEGSVDDRAKVASEKSQIEMMKQRVEGQTFCSNKEINTTTNSRVNKNNIGLDGMNHFGERINLQLSNQEEGKQDLKHMLDDFPTEGNEEDWHVNIMEQAELYHTEEDGEQEWEKTLSKKGKKKIEGTFQ

SEQ ID NO: 56145 - protein, 116 aa, Zea mays
  Coding DNA Sequence Number=SeqID_14366
  Gene Ontology: Mol. function=nucleic acid binding; Cellular component= intracellular
  Homolog annotation: Hit_ID=Q6K653; Match level="QueryCoverage=84%, HitCoverage=23%, E-value=6e-48, Identity=93%"; Hit description =Ubiquitin-associated (UBA)/TS-N domain-containing protein-like
MECTVSQIQKRTSSVKCEDDDAKVKRAFQTLLTYIGNVAKNPDEEKFRKIRLTNATFQERVGNLHGGIEFLELCGFEKLEGDEFLFLAREKVDSAILNTAGAELNSAITNPFFGVL

SEQ ID NO: 56146 - protein, 233 aa, Zea mays
  Coding DNA Sequence Number=SeqID_14367
VADELREERVRMKLAEARLHFEEKNAAVDRLRQELEAFLGNERREQTPAHHEMAKEEEEEDHQLQIVLASEFGVHGIDPLVTEKSGQEENAEAGDDDDDSEGSDIELNMDGNSWSYTTTSRSRDTTAKNATSAHGSLSDRATECGADAGAFDRRSEATRDAPEQDWAADGCSDGGTTGRDEDEDAERYEAIKNLREQMLTGHAFLFLSKGEADDDSDRRRRGFASHFEEDGDL

SEQ ID NO: 56147 - protein, 84 aa, Zea mays
  Coding DNA Sequence Number=SeqID_14368
MSPLPSLVDKRFEPLPQISIALGLFKRWGKNNRGEEKASSLAMHGLKLSPSHGRCHMGFRCRCVWVRQGFSGFLDMCEKVFFLI

SEQ ID NO: 56148 - protein, 178 aa, Zea mays
  Coding DNA Sequence Number=SeqID_14369
MTWEPSWNNRRHHRHADFDADVDARSAASARNLASAFEEDLEEEGDVGWDAAAKRRSCSDHRCSASVEVLSKLSRRKTRAFKDGDGGRSWHNGRAHGHCFSDASAITSGGGGSVGGRTPARQGDNRTEQMQELYNSLTASNELVRVLANVLGPAGALNPTAASVLAALRSELDAARQL

SEQ ID NO: 56149 - protein, 345 aa, Zea mays
  Coding DNA Sequence Number=SeqID_14370
  Gene Ontology: Mol. function=nucleic acid binding; Cellular component= intracellular
  Homolog annotation: Hit_ID=Q6K653; Match level="QueryCoverage=78%, HitCoverage=65%, E-value=2e-78, Identity=61%"; Hit description =Ubiquitin-associated (UBA)/TS-N domain-containing protein-like
  Pfam annotation: Domain name=UBA; Domain location=115-155; Score =36.3; E_value=1.1e-07; Accession=PF00627.21; Description=UBATS-N domain
  Pfam annotation: Domain name=zf-C2H2; Domain location=43-67; Score =13.8; E_value=0.33; Accession=PF00096.16; Description=Zinc finger, C2H2 type
  Pfam annotation: Domain name=zf-C2H2; Domain location=6-30; Score =6.6; E_value=2; Accession=PF00096.16; Description=Zinc finger, C2H2 type
  Pfam module annotation: Pfam domain module=UBA::zf-C2H2::zf-C2H2; Domain location=115-155::43-67::6-30
MAGLSLRCGDCGAQLRSVEEAQAHAESTNHANFVESTEAVLNLVCSNCGKPCRSHTEVDLHTKRTGHTEFADKTAEAAKPIDLEAPLKPASDDATDVDASASATEETQETVVPEVNKEVLTDLEGMGFSTARATRALHFSGNSTIECAINWLSEHQEDADIDEMPLVPANSKTEVNKPSLTPEEMKIKAQELRERARKKKEEEERRMEREREKERVRIGKELLEAKRIEEQNERKRMIELRRLEKEEEKRAREKIRQKLEEDKAERRRKLGLPPEDPAAAKPSAPPPVEEKKISCHIDCTDVVTIDNDCRRNRDVKLFKQLSQPTTLCNCMCNNLILDHYTRMGL

SEQ ID NO: 56150 - protein, 123 aa, Zea mays
  Coding DNA Sequence Number=SeqID_14371
  Subcellular localization annotation: CTP_CleavageSite=38; ConfidenceScore=5.29e-01
MDPKRRKRRRRPYMLMSKKVTSPLTQDQTKRGRIGRRRGASRRSSTTTATPPLLHQGTTTTKTRPRKLKRYGIPSKSLMRGTDATMITKDEASGKENWEGLPRKRGEEPTKTYNRLKTLVNKI

SEQ ID NO: 56151 - protein, 238 aa, Zea mays
  Coding DNA Sequence Number=SeqID_14372
  Gene Ontology: Mol. function=3-oxoacyl-[acyl-carrier-protein] reductase activity; Cellular component=chloroplast; Biological process=fatty acid biosynthetic process
  Homolog annotation: Hit_ID=P28643; Match level="QueryCoverage=86%, HitCoverage=75%, E-value=6e-58, Identity=53%"; Hit description=3 -oxoacyl-[acyl-carrier-protein] reductase, chloroplast precursor
  Pfam annotation: Domain name=KR; Domain location=70-219; Score=-25.8; E_value=7.5e-06; Accession=PF08659.1; Description=KR domain
  Pfam annotation: Domain name=adh_short; Domain location=70-202; Score= 86.9; E_value=6.4e-23; Accession=PF00106.15; Description=short chain dehydrogenase
  Pfam module annotation: Pfam domain module=KR::adh_short; Domain location=70-219::70-202
  Subcellular localization annotation: CTP_CleavageSite=57; ConfidenceScore=5.61e-01
MAAATAAAAALASPAGLSTSLARRGLVSFAPALRPGPDRSSRAVALLGVRTHVTAVDQAIVKGDTKLEGPVVVVTGASRGIGKATALALGKAGCKVLVNYARSSKEAEEVSKEIEASGGQAITFGGDVSKEADVESMIKVAVDTWGTIDVLVNNAGVFLCTQGRIINIASVVGLTGNAGQANYAAAKAGVIGFTKTVAREYASRNINANVIAPGFIASDMTAELGEELEKKILSTIPL

SEQ ID NO: 56152 - protein, 541 aa, Zea mays
  Coding DNA Sequence Number=SeqID_14373
  Gene Ontology: Mol. function=prolyl aminopeptidase activity; Cellular component=intracellular; Biological process=protein metabolic process
  Homolog annotation: Hit_ID=Q6K669; Match level="QueryCoverage=89%, HitCoverage=84%, E-value=1e-157, Identity=60%"; Hit description =Leucine aminopeptidase 2, chloroplast precursor
  Pfam annotation: Domain name=Peptidase_M17; Domain location=246-533; Score=483.0; E_value=3.5e-142; Accession=PF00883.11; Description =Cytosol aminopeptidase family, catalytic domain
  Pfam annotation: Domain name=Peptidase_M17_N; Domain location=73-213; Score=59.6; E_value=1.1e-14; Accession=PF02789.7; Description=Cytosol aminopeptidase family, N-terminal domain
  Pfam module annotation: Pfam domain module=Peptidase_M17::Peptidase _M17_N; Domain location=246-533::73-213
MGDAATAAAATLGLTWPNAAVELPQLAQAIRDSVSATVDRTPLNPRARCCLLSQISFAAKDSEFSDWDGDILAVAVTDKDVQVQPHVSGSEFENAVLRRLDVQLGGLLRAAAAEEEFAGRPGQSVVLRVRGQRFKRVALVGFAARDRDRDAGCLHGLGESVASVARAARATSAAILVADPAVVRPESRLNAAAAIASGTVLGLYEDNRYKSEWEKVHLKQVDLIGLGSGPELDQKLRHANRLSSGVMLARDLVNSPANVLTPGALAEAAAKIASTYSDVFTATILDAAKCRELKMGSYLAVAAASETNPPYFIHLCYKPRGGDVRRKLALVGKGITFDSGGYNIKAVPVATIELMKKDMGGAAAVFGAAEVLGQIKPPGVEVHFISAASENMISGSGMRPGDIVTASNGKTIEIIDLATLTGAIRVALGPSIAGILTPSDELAEEFAAAYEVSGEKFWRLPMEESYWESMESSIADMLCAGPLQPQAGAITAALFLKHFVDDKVQWMHIDIAGTVWSNKKRAGTGFGVTTLVEWVLSNSSS

SEQ ID NO: 56153 - protein, 161 aa, Zea mays
  Coding DNA Sequence Number=SeqID_14374
  Homolog annotation: Hit_ID=Q5ZEI8; Match level="QueryCoverage=40%, HitCoverage=38%, E-value=6e-15, Identity=57%"; Hit description =Putative tyrosine phosphatase
  Pfam annotation: Domain name=PTPLA; Domain location=54-155; Score= -32.9; E_value=0.00017; Accession=PF04387.5; Description=Protein tyrosine phosphatase-like protein, PTPLA
MKIVRVGEVSSLCNSSTNWIQIIPHVRCLVEFSRGLKAFARTREHAVDGYVTFRTLRLVNYSIFKSDNGTQSHLLATALIISWIIRYSFFAMKEAFGSAPSWLSWLCSFMLFYPTCISSEVGLIYMALPYMKVSLSLLDRPPFFFLFASVPYKKKGTYNLI

SEQ ID NO: 56154 - protein, 531 aa, Zea mays
  Coding DNA Sequence Number=SeqID_14375
  Gene Ontology: Mol. function=translation initiation factor activity; Cellular component=transcription factor TFIID complex; Biological process=transcription initiation
  Homolog annotation: Hit_ID=Q5N796; Match level="QueryCoverage=92%, HitCoverage=100%, E-value=3e-88, Identity=50%"; Hit description =Transcription initiation factor IID (TFIID) subunit A-like protein
  Pfam annotation: Domain name=TFIID_20kDa; Domain location=407-479; Score=33.4; E_value=8e-07; Accession=PF03847.4; Description =Transcription initiation factor TFIID
  Subcellular localization annotation: CTP_CleavageSite=61; ConfidenceScore=5.46e-01
MADPPPVAASALPAQPDQVAASVSTPQNPNPNPLLSPQIPPSPTVSDLSAHISSPQQLDPVAAAAAASGGGGSMDYPPRPPQLQAPSPTQAGPGAAGFGQIPRSGSASRLSTASQLQQYAARMYGGQMSFSGGGGLVGQQQQLAGRTPVLGQGQLGMLQGQGNAGSAAHFGLQSQMMAQARQKGMAQGTQLNNANTAQALQGMQHMGVMGTMGMNQMRPNGTIPYGAQQRFAHAQMRPQASQQPALSPQKVPGQGLSRTASIAALNSQLSGSSQNGQMVAMSMPQQQQWLKQIQSSMGSPVSPQQQYQQQRLLFMQQLQQKTGLSQQQLLQIQQQHPHLTAQQLIQQQQILQQFQQQQLLQSPRVSASGSQKSANLTGSQPGTPLSGGTMTGGSASQGAEGTSQLLGKRKIQDLVAQVDPLGKVDPEVEDLLLEIADDFIDSKEIGIYLFLVSQGRIRIPKEILQQVDGIVICNRNFGCANSGLSIESPSLLRAMLLFPIEGKIPMLVSYRKAVADLPIVSGRSSLPGVDF

SEQ ID NO: 56155 - protein, 110 aa, Zea mays
  Coding DNA Sequence Number=SeqID_14376
MKPGYTRVLMDDGAFVTGRPYSQPERCSKVVTAPESTDDVGQTGRPSSFLSSRWRRSESLGRSTYDDDTGGEDSTEPSEAMPPKEAACPSSLYCAMTLKMNGMMPSMGTT

SEQ ID NO: 56156 - protein, 142 aa, Zea mays
  Coding DNA Sequence Number=SeqID_14377
MVRRCGGSSEVEVESEPLDRARRRPSAEARAESEPWGWAKAEFVVFRGLSPSPSSRVGRSGVRRLPEPSPSPSPRSGGAEFAVFRGLARVRALDNVPCAEVEEVAEEALEQQQFGAGGSSVSRVPFSKDLFVDRPPGIAVQP

SEQ ID NO: 56157 - protein, 404 aa, Zea mays
  Coding DNA Sequence Number=SeqID_14378
  Homolog annotation: Hit_ID=Q2QME9; Match level="QueryCoverage=36%, HitCoverage=17%, E-value=3e-07, Identity=34%"; Hit description=Ulp1 protease family, C-terminal catalytic domain containing protein, expressed
MGQRIDINWTEVFGKSSSPDREADVCFASPSSASAAPRTRARALGAAKVLPGDERRRGSPDRHQRKRLGKLRIDDDWSVGGQRHTAVHGDDGARRPRTRGAAKVQKMSRRNVWATDSVRAFKTLIDFNNELVFVTQFNRSWFKPEEASGLRRRIRELLLEEFESAKLDDALPGADASERDDSINDGELKPDASSDSSEMVVEVVGGLGGTDKSNEGIKVVASEEASGESGDAGKSTEGTVAASEEKSIEGINVAEPEDACESIGGIYVAESDEASGEFGEIGKTNKGTKVAVSEGASVSGYTDKNMEDISDSEVAVLDKAPTSSYRRGEKTTACVLSEAASLSDSVKDEQGMVKPDSGSSKAEREGDLIVIASPERSEGNDEIIGSMPITDVVCDSCDSDTETK

SEQ ID NO: 56158 - protein, 161 aa, Zea mays
  Coding DNA Sequence Number=SeqID_14379
MSWAARVGDLYVYYDWEVSYVSTPAFACESASVPHPVLGAFQPPLRARPAHRRRFGARVPILEVSTSASLLHAFATLTVSDGRHPFHDRDGHMQHFRSRLMGRHISITFGLEGYYSTSPPSSGDLCMVGTESRSTSPTTSARGAATHSSGSASRTSTSATR

SEQ ID NO: 56159 - protein, 67 aa, Zea mays
  Coding DNA Sequence Number=SeqID_14380
MGKRKMLRKSLQHICSSSEIEAALDNIGLPVTELLVGMVFNSWSNLRLTAESCYADSEGLLYFDRRR

SEQ ID NO: 56160 - protein, 96 aa, Zea mays
  Coding DNA Sequence Number=SeqID_14381
  Homolog annotation: Hit_ID=Q6Z727; Match level="QueryCoverage=39%, HitCoverage=25%, E-value=2e-10, Identity=86%"; Hit description =Putative EF-hand Ca2+-binding protein CCD1
  Pfam annotation: Domain name=efhand; Domain location=5-33; Score =25.3; E_value=0.00022; Accession=PF00036.22; Description=EF hand
MAHADAAAMVREGDADGDGALSEAEFCVLMVRLSPGIMAHAEAWLADAIAADEMQLVDDAMPMDAAAADDYGGAGSRGHAAAAPDSDTAPARRSSV

SEQ ID NO: 56161 - protein, 85 aa, Zea mays
  Coding DNA Sequence Number=SeqID_14382
MALLLLPLACGRHRKQPACALLALSVSISGGAEKSQERGAGAGTRAATPRGTRDVAFRFLVAAGAEEADNVGRSINHLTTVVVSG

SEQ ID NO: 56162 - protein, 374 aa, Zea mays
  Coding DNA Sequence Number=SeqID_14383
  Homolog annotation: Hit_ID=Q10S69; Match level="QueryCoverage=39%, HitCoverage=51%, E-value=1e-68, Identity=81%"; Hit description=HVA22- like protein i, putative, expressed
  Pfam annotation: Domain name=TB2_DP1_HVA22; Domain location=17-120; Score=68.7; E_value=1.9e-17; Accession=PF03134.9; Description=TB2DP1, HVA22 family
MVFDGSAPASRLAASTTASGIKMIGSFITGMLTLVLGYAYPAYDCYKTVELNRPEVEQLRFWCQYWILLAFLTVLERVGESFVSWLPMYSEAKLAFIVYLWYPKTRGTAYVYESFFKPYIAKHETEIDRNLLELRTRAGDMAVLYFQRVTNYAQTRSYEILQYIASQSPTQRQMLLSFSLASLNIYAIKLPKIFKILATNLLRVSAVDDVIHSFHLHEISLAVILLHGHPELPHVVMLIGVFAISSFLQAHQQQQRPPPPRTRQVNPAPPPIPAPSAPPMPPQPAQAQVPPTPPRPLVPVVPPGAVPPAPPPTAPEATATNGLQDTETMQVDPPRASLSGPPLPPEETLIEEAIRLTRGRLRRRLAGGSGPPQN

SEQ ID NO: 56163 - protein, 179 aa, Zea mays
  Coding DNA Sequence Number=SeqID_14384
  Homolog annotation: Hit_ID=Q6Z8B1; Match level="QueryCoverage=18%, HitCoverage=9%, E-value=5e-10, Identity=79%"; Hit description =Putative pollen specific protein
  Subcellular localization annotation: CTP_CleavageSite=36; ConfidenceScore=5.02e-01
MSSHRSAAHVLSGVRPKSGLAHRLQLPSRSCLTGIGCRTREQLEYVILPLCWAPAFPTPPTIAPSNLAPSTTDLNCRCWWPTKAVGWWGEGSMKILGDGDVLGGGTWMGCTKDGRLAFLTNVLEPDAMSGARTRGDLPLRFLEEHHMQTNHGPVSIAVYGDHDQPALVNYPNIALNWKY

SEQ ID NO: 56164 - protein, 77 aa, Zea mays
  Coding DNA Sequence Number=SeqID_14385
  Subcellular localization annotation: CTP_CleavageSite=58; ConfidenceScore=5.38e-01
MAKSFIMAKSFVKASVASASHSQASWPQLPPPPPLQPTYSQSQQPEGCQHSQQQRDFREESEARTVNSTVLESKHIY

SEQ ID NO: 56165 - protein, 70 aa, Zea mays
  Coding DNA Sequence Number=SeqID_14386
MLSEVGCGGSTYAGMQRISFRGLEGEIELLWADLGCAVARGSAGEADAESEAGRVKPVSCDAEALEESSL

SEQ ID NO: 56166 - protein, 33 aa, Zea mays
  Coding DNA Sequence Number=SeqID_14387
MARSSTSAAPVASASETITRGRADKWDRGAARI

SEQ ID NO: 56167 - protein, 79 aa, Zea mays
  Coding DNA Sequence Number=SeqID_14388
MGEEFVLPFSDFPTSDSGTLMLTPLSLYLTSTGFEVASPGHRDVVGFSAIANAHAGRCKIFDAAASPNNEMLMTHDGRG

SEQ ID NO: 56168 - protein, 51 aa, Zea mays
  Coding DNA Sequence Number=SeqID_14389
MRDLGPMASVFDFNSKYLLRVQCIFLLRPGHAHTASPSTMGRHRTSPSSPK

SEQ ID NO: 56169 - protein, 152 aa, Zea mays
  Coding DNA Sequence Number=SeqID_14390
  Gene Ontology: Mol. function=transferase activity, transferring glycosyl groups; Cellular component=cytoplasm; Biological process =metabolic process
  Homolog annotation: Hit_ID=Q69IV0; Match level="QueryCoverage=99%, HitCoverage=32%, E-value=2e-62, Identity=74%"; Hit description =Putative UDP-glucose:salicylic acid glucosyltransferase
MASTWRAKTVGPAVPSAYLDNRLPDDTSYGFHLYTPMTETTKAWLDARPARSVVYASLGSIAKPDAAQTAEMAEGLYGSGKAFLWVVRASESAKLPENFAGRTTEERGLVVTWSPQLEVLAHPAVGCFVTHCGWNSTMEALGAGVPMVAMPQ

SEQ ID NO: 56170 - protein, 464 aa, Zea mays
  Coding DNA Sequence Number=SeqID_14391
  Gene Ontology: Mol. function=transferase activity, transferring glycosyl groups; Cellular component=cytoplasm; Biological process =metabolic process
  Homolog annotation: Hit_ID=Q69IV0; Match level="QueryCoverage=97%, HitCoverage=97%, E-value=1e-164, Identity=63%"; Hit description =Putative UDP-glucose:salicylic acid glucosyltransferase
  Pfam annotation: Domain name=UDPGT; Domain location=11-464; Score= -52.8; E_value=5.8e-08; Accession=PF00201.9; Description=UDP -glucoronosyl and UDP-glucosyl transferase
MAERVSQHIVHVLLLPNPTQGHINPILEFGKRLAAHRGVQCTLAVTRFVLSKSGQSSAGGAVHIAPISDGCDRGGYGEAGGIEACTARLESAGSATVGELLRSKAERGRPVRALVYDAFLPWAQRVGRRHGAACAAFFTQPCAVDVAYGHAWAGRVEPPLPLGEEQLEPLPGLPGGLRPCDLPTFLTDKDDRAYLDLLVSQFVDLDTADHVLVNSFYELQPQESDYMASTWRAKTVGPAVPSAYLDNRLPDDTSYGFHLYTPMTETTKAWLDARPARSVVYASLGSIAKPDAAQTAEMAEGLYGSGKAFLWVVRASESAKLPENFAGRTTEERGLVVTWSPQLEVLAHPAVGCFVTHCGWNSTMEALGAGVPMVAMPQWSDQTMNAKYIEDVWRVGVRVRPDGRGVVRKEELERCVREVMEGERSLDYIRNAAGWKEKARSAMSEGGSSDKNVLDFLGALGLKK

SEQ ID NO: 56171 - protein, 72 aa, Zea mays
  Coding DNA Sequence Number=SeqID_14392
MVEGGKAGGVECGQANIISKHGHRSLTVVAPTEAHIDGVGPSAGSFSFQVVVGLQESRFTPGGLRPPESGVV

SEQ ID NO: 56172 - protein, 160 aa, Zea mays
  Coding DNA Sequence Number=SeqID_14393
MADTHASERSILVILLPYPSQGHVNPILQFGKRLSPRTAARFVLSNIATILDSCDRGLARTVRVGAGRGGRAGARRVPGACCLRACMPFFTQPCAPVDVVYAHAWAGRTERPLVSEEAVELPRFPGRGYRTPPAYVDLFVNQFNGMHKITDHARPCQLVL

SEQ ID NO: 56173 - protein, 245 aa, Zea mays
  Coding DNA Sequence Number=SeqID_14394
  Gene Ontology: Mol. function=transferase activity, transferring glycosyl groups; Cellular component=cytoplasm; Biological process =metabolic process
  Homolog annotation: Hit_ID=Q69JH3; Match level="QueryCoverage=96%, HitCoverage=48%, E-value=3e-93, Identity=70%"; Hit description =Putative indole-3-acetate beta-glucosyltransferase
MASAWRGKTIGPTVPASYIGDDRLPSDTKYGLDLYEPTAAPCIAWLDAHPPRSVVYASFGSLSDLDPLQMREVAHGLLDAGRPFLWVVRASEAHKLPAGFEGACGGRGLVVSWCPQLEVLAHRAVGCFLTHCGWNSTAEALVTGVPMVAVPQWTDQPMNARYVEAVWRVGVRARPAPPDDSLGLVRRGEVVMRVEEVMDGDKSAEFRRSADVWMAKARAASREGGSSDRNIAEFVAKYAHRTPSE

SEQ ID NO: 56174 - protein, 246 aa, Zea mays
  Coding DNA Sequence Number=SeqID_14395
  Gene Ontology: Mol. function=transferase activity, transferring glycosyl groups; Biological process=metabolic process
  Homolog annotation: Hit_ID=Q69JH3; Match level="QueryCoverage=85%, HitCoverage=48%, E-value=3e-68, Identity=59%"; Hit description =Putative indole-3-acetate beta-glucosyltransferase
MGMDSYAGENEPKVGSGVGSHVLLLPYPSQGHVHPMLQFGKRLAYYGLRPTLAVTRFILATCAPGDAGVRLAAVSDGFDRGGFGECGDVAAYLSRLEAAGSETLGELLEDEAARGRPVRAVVYDAFLPWAQGVARRHGARAAAFFTQPCAVNVAYGHVWRRRLRVPVDGVLRLPGLPALDPDGLPSFLKVGTGLYPAYFEMVVRQFQGLEQADDVLVNSFYELEPELCLSSVTVQKVKTKKKHDYV

SEQ ID NO: 56175 - protein, 167 aa, Zea mays
  Coding DNA Sequence Number=SeqID_14396
  Gene Ontology: Mol. function=transferase activity, transferring glycosyl groups; Cellular component=cytoplasm; Biological process =metabolic process
  Homolog annotation: Hit_ID=Q69IV0; Match level="QueryCoverage=99%, HitCoverage=35%, E-value=1e-63, Identity=67%"; Hit description =Putative UDP-glucose:salicylic acid glucosyltransferase
MAEGLYGSGKAFLWVVRASESAKLPENFAGRTTEERGLVVTWSPQLEVLAHPAVGCFVTHCGWNSTMEALGAGVPMVAMPQWSDQTMNAKYIEDVWRVGVRVRPDGRGVVRKEELERCVREVMEGERSLDYIRNAAGWKEKARSAMSEGGSSDKNVLDFLGALGLKK

SEQ ID NO: 56176 - protein, 146 aa, Zea mays
  Coding DNA Sequence Number=SeqID_14397
  Homolog annotation: Hit_ID=Q69XZ5; Match level="QueryCoverage=74%, HitCoverage=14%, E-value=2e-21, Identity=52%"; Hit description =Putative transcriptional regulator
MVVGSRVAVGTLCAERSPVILRSPEEENNMSFVIQDLTNQLVELERHFNNLEMNRSASAKLALIDCSSMLTEILRRTRSILHKLKEQISDGTLVIGAGAGIGIFAKFEEAGGVDLIMLYNYGRFRMAGRGSLAGLLPFGDANDIVL

SEQ ID NO: 56177 - protein, 121 aa, Zea mays
  Coding DNA Sequence Number=SeqID_14398
  Homolog annotation: Hit_ID=Q94CG6; Match level="QueryCoverage=24%, HitCoverage=6%, E-value=5e-09, Identity=96%"; Hit description=Seven transmembrane protein Mlo9
MAPKRGNQKLVKGIELCQLNIILLAYISFQWQIGISGAFKSEIAYESATRRQPALTKSYSFRSWSQNNVVACVTYPSHDLDMVPIRTLQVYIGFYSYNNIVLHSAIMNVVHKAKKLLGIVM

SEQ ID NO: 56178 - protein, 221 aa, Zea mays
  Coding DNA Sequence Number=SeqID_14399
MTEEWLRIWVDDGKAPRDGDSSGTTREKGIGLRGGRAKKKRTSPREQISASLDAGLALGRKSPPRLTLGSPSGDVYASLEISFGYPPCRESHRRHSGNCGTHQGRLNHRLRKTSASPEQGADLNNRNKGITTSFGTGTLTRSVRRLLPIPQRCYNNYGMGDHSPGGSGVRPTPRPRPRLSVGNQQAQVNNAVHHHITHRTPRHLPWEYDDPGFTSIHLLGV

SEQ ID NO: 56179 - protein, 80 aa, Zea mays
  Coding DNA Sequence Number=SeqID_14400
MAPVALAGWIDHCGGINCSSEKEGRRGLRLSMGRPNLDVTAAEEGPAMARSIVVAGRWRHLRGLVRAEVSAVESSSSVLD

SEQ ID NO: 56180 - protein, 77 aa, Zea mays
  Coding DNA Sequence Number=SeqID_14401
MARTGRSTQVHRAWSCRVKFIQGKREGVDPSLTIETFLDTYIFQVCMMSSQGPLTNFVHAYYLSHFAVDILAQSYTE

SEQ ID NO: 56181 - protein, 88 aa, Zea mays
  Coding DNA Sequence Number=SeqID_14402
  Subcellular localization annotation: CTP_CleavageSite=22; ConfidenceScore=5.42e-01
MAPRTLPDDGGSRPPYGSKRTSARTRQPRQLSFRQALALLRWPRHLTNWVPKPLRLPQRHGPPGLETPTVGAPGRGLLRVDEQLPVKL

SEQ ID NO: 56182 - protein, 241 aa, Zea mays
  Coding DNA Sequence Number=SeqID_14403
  Gene Ontology: Mol. function=transferase activity, transferring hexosyl groups; Cellular component=membrane; Biological process =carbohydrate metabolic process
  Homolog annotation: Hit_ID=O22678; Match level="QueryCoverage=73%, HitCoverage=29%, E-value=4e-72, Identity=78%"; Hit description=UDP -glucose:sterol glucosyltransferase
  Pfam annotation: Domain name=Glyco_transf_28; Domain location=103 -236; Score=98.1; E_value=2.6e-26; Accession=PF03033.10; Description =Glycosyltransferase family 28 N-terminal domain
MATSLRLLLNSLLLSGGGRVLYFGPLWTFFYLNIMMCSSPARSRKKLKMLNRIATVKDDGTVVVDVPSGLEPTIVGGTEDIYTEAVEEALDGTEILYRPPMQIVILIVGTRGDVQPFVAIGKCLQDYGHRVRLATHANFKEFVLTAGLEFFPLGGDPKILAEYMVKNKGFLPSGPSEIPIQRKQMKEIIFSLLPACKEPDPDTGIPFNVDAIIANPPAYGQYTLFILKKRFFTVCFVSHPL

SEQ ID NO: 56183 - protein, 50 aa, Zea mays
  Coding DNA Sequence Number=SeqID_14404
MISERGPSKLSAVTSLHNVCYHIVVLSCYASEAMPLEMIEASIDQAPCQG

SEQ ID NO: 56184 - protein, 89 aa, Zea mays
  Coding DNA Sequence Number=SeqID_14405
MSSPLGSGRLICGPVNIRQRLREGGLRPSPGAYQNKIPYHGLGKANGCPVTSEVCPLSPPRSDQNGIRVIWDAKIKVDDSARAGKGQPI

SEQ ID NO: 56185 - protein, 77 aa, Zea mays
  Coding DNA Sequence Number=SeqID_14406
  Homolog annotation: Hit_ID=O22678; Match level="QueryCoverage=53%, HitCoverage=7%, E-value=2e-08, Identity=65%"; Hit description=UDP -glucose:sterol glucosyltransferase
MESEDGVTGAVRAFLRHLPSKAEEQSLPQSSGFLEFLGPLTQTTISRLHGQPVLYMKRNRANGVFGGVGDLFSNAMS

SEQ ID NO: 56186 - protein, 94 aa, Zea mays
  Coding DNA Sequence Number=SeqID_14407
MRSPMLLRGKKARGGSVSVVGGRASTVLVAGRRDNGGGKGEPEPQRLWGTEKMVVGSMRVPVGRSQPWGRHGVGSMRGHQGIGFDHQEQLRKSP

SEQ ID NO: 56187 - protein, 273 aa, Zea mays
  Coding DNA Sequence Number=SeqID_14408
  Gene Ontology: Mol. function=DNA binding; Cellular component =chromatin; Biological process=DNA integration
  Homolog annotation: Hit_ID=Q1SF88; Match level="QueryCoverage=97%, HitCoverage=21%, E-value=7e-51, Identity=48%"; Hit description =Integrase, catalytic region
MVEGSTLVKMSANCDTDIASSDTLADEVEVDLHVLRALMLHEIGGEIDRADVIAVDKGGAREGAAELMKKLAEPEKPRPLHWATVRCSTLALEYETMGYRFEDEVGAQEHDVARCGPAHVEAANPVGIGVYHQLRSRGGPKEAEVDGAVKDPLESEEVGGVIAVSMDKQGRVRLGLDKAEGDQVGGKATVSSPRCLLEAIQGAVQLADQTRASGVDKADGLAAVYRLSHSAMKEGILDVQLVDLSRDGKGEDSSNVGELDDGTEGLIVVHSGD

SEQ ID NO: 56188 - protein, 230 aa, Zea mays
  Coding DNA Sequence Number=SeqID_14409
  Gene Ontology: Mol. function=transferase activity, transferring hexosyl groups; Cellular component=membrane; Biological process =carbohydrate metabolic process
  Homolog annotation: Hit_ID=O22678; Match level="QueryCoverage=81%, HitCoverage=31%, E-value=1e-86, Identity=79%"; Hit description=UDP -glucose:sterol glucosyltransferase
MEQTTECERGQTGRAAMEQTSERERGQTVRGDDLGSKIDDVFDLELSYQIVDSMIWLGIRDMINEFRKKKLKLRPVTYLSGSQGSGNDIPHGYIWSPHLVPKPKDWGPKIDVVGFCFLDLASNYVPPEPLVEWLEAGDKPIYVGFGSLPVQDPQKMTEIIVKALEITGQRGIINKGWGGLGTLSEPKDFVYLLDNCPHDWLFLHCKAVVHHGGAGTTAAGLKAAVKHPHC

SEQ ID NO: 56189 - protein, 57 aa, Zea mays
  Coding DNA Sequence Number=SeqID_14410
MNLSEFGSSCALWRCPHNAFGRKVTSTAAQCPTVYPYWTTYQGPTKQPMGHVHAMRT

SEQ ID NO: 56190 - protein, 116 aa, Zea mays
  Coding DNA Sequence Number=SeqID_14411
MAAIERLIVELVPGEPEKVVPKKTFEEITKVTKVVKQKKVVAKEISFEGADYRKDATILSLKTNLVKAQKSNEDKRLEGKMKDERIIEQDKYVRDLKDEIENMKTNHKDDVNRLYT

SEQ ID NO: 56191 - protein, 75 aa, Zea mays
  Coding DNA Sequence Number=SeqID_14412
MKTARLASKGETTDIVETTPISEVMRESGIVEPKVLEDIDIAEKSDSEAEADSDEEDLTFFAQESLVTLNLANQL

SEQ ID NO: 56192 - protein, 329 aa, Zea mays
  Coding DNA Sequence Number=SeqID_14413
  Homolog annotation: Hit_ID=Q7XI34; Match level="QueryCoverage=49%, HitCoverage=35%, E-value=9e-39, Identity=55%"; Hit description =Putative UDP-glucosyltransferase
MEEASEIAVRRATLARHSRQGTLVIDEEPAVYGMYDDLHPTIMEEEHWLEDHNEVEDARSLFGGSAAINIDNYDDLPGAVADGQMGTGSTSPTPTATGTSTAATSSKESLDEPVPDLKPLQARDLIRVDGSDTDALCGFVGHVADVVRASASGVVIYTFERMEASELAKIQRELSRPALARAVPSGVRGGASALAVPGTDGAEPARARPRLLAWLDDHPPRSVLYVSLGSVACVDRGAFVEMAWGLARSRVSFLWVGRPGLVGSVARAGPTQTGRAGGRSSSRACCGGLGPNAGRAGDRSSSRADGGGVGPNVARAGGARAGPAAAVRG

SEQ ID NO: 56193 - protein, 80 aa, Zea mays
  Coding DNA Sequence Number=SeqID_14414
MNNFDTDWVASNHIKLGAIAIRIRIGKRAVNRGSVNLTEDKNTIAAETLLGLAAARAVVLGPSLANLGVRPKPSNVDRSP

SEQ ID NO: 56194 - protein, 114 aa, Zea mays
  Coding DNA Sequence Number=SeqID_14415
  Subcellular localization annotation: CTP_CleavageSite=45; ConfidenceScore=5.58e-01
MDNFCAARGSTVSHPSLNVGDPNPTLIFPCSPSLSSRTFNRLVVNCNELSEDVADGGRSGGPSLSSYEVRSWGGVGIQQGSAERVAATNPRGVLGHQQQSRGRGSSWQRGSTNW

SEQ ID NO: 56195 - protein, 84 aa, Zea mays
  Coding DNA Sequence Number=SeqID_14416
MWQDRVDHAKEVWVLFPGATARLTDAKVTITDQEDLVVDLSTELVEKDLQTVQMSARIRELEEQVEERNHTIEVLENQLQNIQQ

SEQ ID NO: 56196 - protein, 414 aa, Zea mays
  Coding DNA Sequence Number=SeqID_14417
  Gene Ontology: Mol. function=protein binding; Cellular component =ubiquitin ligase complex; Biological process=cell cycle
  Homolog annotation: Hit_ID=Q10CD7; Match level="QueryCoverage=71%, HitCoverage=37%, E-value=1e-159, Identity=90%"; Hit description =Cullin-4B, putative, expressed
  Pfam annotation: Domain name=Cullin; Domain location=104-316; Score =260.0; E_value=4.7e-75; Accession=PF00888.12; Description=Cullin family
  Subcellular localization annotation: CTP_CleavageSite=23; ConfidenceScore=5.44e-01
MVAAPTLAAGRSGRSHAPSLHVRAGAVCPRRDAALALSRPRFGTPEPRCVATPTSSLRPAQPRRQHHRLILDYFVYSALTTVRYADTPVVLHHNRRGDLLCWSLEMLAHMVGALYLGKDVFEAFYKKDLAKRLLLGKSASIDAEKSMITKDIELSKEINDSFRQSSQARTKLPSGIEMSVHVLTTGYWPTYPPMDVKLPHELNVYQDIFKEFYLSKYSGRRLMWQNSLGHCVLKADFPKGKKELAVSLFQSVVLMLFNDAQKLSFLDIKDSTGIEDKELRRTLQSLACGKVRVLQKIPKGRDVEDKDDFVFNEDFSAPLYRIKVNAIQMKETVEENTSTTERVFQDRQYQVDAAIVRIMKTRKVLSHTLLITELYQQLKFPVKPADIKKRIESLIDREYLERDRSNPQIYNYLA

SEQ ID NO: 56197 - protein, 114 aa, Zea mays
  Coding DNA Sequence Number=SeqID_14418
MGHIYMAQDRFEIFSEAALRLPIAQPPNYNQLQEILLYYHSVDTFSGYKPFTDATLQQSDLFISTSFPLSYVRSFQLCSVLFSHSVDTFSGYKPFTDASLQQSGRGAGSKDQIA

SEQ ID NO: 56198 - protein, 79 aa, Zea mays
  Coding DNA Sequence Number=SeqID_14419
MAHQSYSGPPEALSPSFSLLCPWIHSPFPAIEFAMVPSPSLPNSGDPGATLARACLNSGDLTATERSGATSRWIEYELR

SEQ ID NO: 56199 - protein, 54 aa, Zea mays
  Coding DNA Sequence Number=SeqID_14420
MGYANAAVFCSGTALAFIRLLFTVLVKIIMLIGTWRTPGKTVLPQGFNGTPLAN

SEQ ID NO: 56200 - protein, 52 aa, Zea mays
  Coding DNA Sequence Number=SeqID_14421
METLSTEDQQEFEEHKKQLIEDAKAKFLANFKVDRNLKSDNSARASVSGLYP

SEQ ID NO: 56201 - protein, 71 aa, Zea mays
  Coding DNA Sequence Number=SeqID_14422
MAAHHTALSFPRRRGNERRRATGQDVVEEKGAATQAYMHRRKISDEQERVKGGARSLEQISDDRHAISVSS

SEQ ID NO: 56202 - protein, 55 aa, Zea mays
  Coding DNA Sequence Number=SeqID_14423
MAWARISRVDDVEAAVPMTSTQQMHVGGRDEENYEGGAVVNRDKSENWGDFDAGY

SEQ ID NO: 56203 - protein, 96 aa, Zea mays
  Coding DNA Sequence Number=SeqID_14424
MDKEKQYVARIRPMVKHKERGRCVWGFLTVGRPKSTTISRRSWETAAVPHDVGIGPLRHAIPRYEVLTDFLKPLAAFNTILYGVWSTVVSIPWSPA

SEQ ID NO: 56204 - protein, 88 aa, Zea mays
  Coding DNA Sequence Number=SeqID_14425
MEELDERAFLFVVQAGADDGGLAVIGKPEVDPFSFFSRPHRGRGLSFHFAGTARSSFRLGVCLHRRSRRRLVMRAAWMATLKHSAAPW

SEQ ID NO: 56205 - protein, 116 aa, Zea mays
  Coding DNA Sequence Number=SeqID_14426
MGAGRCAGGAATGKRGCPSLQGAPWESSASAMGKKGKGGRGASCPAWKRNREGAGQRRWEQGARWPPWLGYGARRGERQRCPARDEEEASRELCGERQLGEMEIRVGVAGKLAAGR

SEQ ID NO: 56206 - protein, 357 aa, Zea mays
  Coding DNA Sequence Number=SeqID_14427
  Gene Ontology: Mol. function=protein serine/threonine kinase activity; Cellular component=nucleus; Biological process=protein amino acid phosphorylation
  Homolog annotation: Hit_ID=Q2L3D1; Match level="QueryCoverage=86%, HitCoverage=89%, E-value=9e-80, Identity=54%"; Hit description =Cyclin dependent protein kinase
  Pfam annotation: Domain name=Pkinase; Domain location=39-339; Score =256.5; E_value=5.3e-74; Accession=PF00069.15; Description=Protein kinase domain
  Pfam annotation: Domain name=Pkinase_Tyr; Domain location=39-287; Score=31.7; E_value=2e-14; Accession=PF07714.7; Description=Protein tyrosine kinase
  Pfam module annotation: Pfam domain module=Pkinase::Pkinase_Tyr; Domain location=39-339::39-287
MLAKRVAAISFLLDRDDDSSSGTGAGWCKRRRLWTTADYETTRVLGEGSFGAVVEARHRATGQAVAVKTLRAPAGAGAETEAGAKALREAELLAACRGHPSLVGLHAIAINPATAEIALVMECVGPNLHDVLNGSRYRSGRPFTEQQVRLIMRQLLAGAKHMHARRIMHRDIKPGNILVSAGAGADDREPVSVKICDLGLAASITKPAYGQAGTVRYMAPEMLLGKPDYDAMVDMWSLGCVMAELLTGKPLFDGEDDMEVLSLIFGVLGVSERTTWPAFKSLPLAAMVPLPPVRHPSMLPKLFPKKLLSADGFGLLQRLLSCDADKRPSASVALRSPWFTKDTDSAASVSATAKMAQ

SEQ ID NO: 56207 - protein, 660 aa, Zea mays
  Coding DNA Sequence Number=SeqID_14428
  Gene Ontology: Mol. function=catalytic activity; Cellular component =integral to membrane; Biological process=metabolic process
  Homolog annotation: Hit_ID=Q5VNP6; Match level="QueryCoverage=91%, HitCoverage=95%, E-value=1e-135, Identity=58%"; Hit description=Acyl- CoA ligase-like
  Pfam annotation: Domain name=AMP-binding; Domain location=50-512; Score=131.6; E_value=2.2e-36; Accession=PF00501.18; Description=AMP -binding enzyme
MCTENYDACYPDQPVVDRYLPVWAKLPAFAAKPAFVWADDDAASTRTALTYAQLDATAACMARNLLAGTGTGSLRRGDAVLVLASPGLRLVKLLFACQRAGAHGGTRRAPRRPGHAQRPRARAPPARRVAGQAGCRCRRRRLHRRRRQGGRFFRRRGRERPALAAMLGSLRWLAVDELERVCDGPQTPYVGCGPDDVYLIQYTSGATGVPRPVVVTAGSAAHNVRAARKAYDLHPGSVVVSWLPQYHDCGLMFLLLTVVAGATCVLAAPGAFVRRPDLWLELVSEFGATCTPVPSFALPLVLRRGQRRRPLQLGSLRNLILINEPIYESRVGEFVEAFRCHGLRAASVSPSYGLAENCTFVSTAWRPSACSESDRLPSYMKLLPSARLSPAAANEVPAEIEIAVVDEGTGEPVEDGVEGEIWVSSPSNASGYLGHPSASREVFCARVPGRTGACFVRTGDRGVVRGAERYLYVVGRSADVLALDAGRRHVHTHYVETAAFGSASGRLRGGCVAAFATSSSTPWSRSQIGVVAVVAELQKGSAGVGDHRGLCDGIRAAVWREEGVRVGLVALVDGGVVPKTTSGKLRRGAAREMLAAGKLSLVFETRYDDCDGSVAGVRGEEEETAAKSGASWLEGEGGETGMATEAFGSASRRLRLQSFL

SEQ ID NO: 56208 - protein, 91 aa, Zea mays
  Coding DNA Sequence Number=SeqID_14429
MPRKRLPGCRTNALGISSYIRGIALGSFSYDYTYAQTAGTTLQGKVKNDWERLLFQKEHSLELLEQIWTGVPHLNAVLVLVLLNAKTGARP

SEQ ID NO: 56209 - protein, 239 aa, Zea mays
  Coding DNA Sequence Number=SeqID_14430
  Gene Ontology: Mol. function=protein serine/threonine kinase activity; Cellular component=nucleus; Biological process=protein amino acid phosphorylation
  Homolog annotation: Hit_ID=Q2L391; Match level="QueryCoverage=92%, HitCoverage=47%, E-value=2e-61, Identity=59%"; Hit description =Cyclin dependent protein kinase
  Pfam annotation: Domain name=Pkinase; Domain location=1-221; Score =91.6; E_value=2.3e-24; Accession=PF00069.15; Description=Protein kinase domain
  Pfam annotation: Domain name=Pkinase_Tyr; Domain location=1-169; Score=-115.1; E_value=2.1e-05; Accession=PF07714.7; Description =Protein tyrosine kinase
  Pfam module annotation: Pfam domain module=Pkinase::Pkinase_Tyr; Domain location=1-221::1-169
MECVGPNLHDVLNGSRYRAGRPFTEQQVRLIMRQLLAGAKHMHARRIMHRDIKPGNILVGSGSGAGADDREPVSVKICDLGLAASITKPAYGQAGTVRYMAPEMLLGKPDYDAMVDMWSLGCVMAELLTGKPLFDGEDDMEVLSLIFGVLGVSERTTWPAFKSLPLAAMVPLPPVRHPSMLPKLFPKKLLSADGFGLLQRLLSCDADKRPSASVALRSPWFTKDTDSAASVSATAKMAQ

SEQ ID NO: 56210 - protein, 129 aa, Zea mays
  Coding DNA Sequence Number=SeqID_14431
  Gene Ontology: Mol. function=protein serine/threonine kinase activity; Biological process=protein amino acid phosphorylation
  Homolog annotation: Hit_ID=Q2L3D1; Match level="QueryCoverage=69%, HitCoverage=22%, E-value=3e-12, Identity=60%"; Hit description =Cyclin dependent protein kinase
MAIACRPTRDGWPRQAARSSASCSVLEATAFALALAPASASAPSTSWRAECLHGDGLTRGAVPRLDDGAEAALPEHPGRLVVRCRPETAPLAPPRPRAGGVVVVAVEQEADGSNALGEHRKPVARIAAE

SEQ ID NO: 56211 - protein, 1079 aa, Zea mays
  Coding DNA Sequence Number=SeqID_14432
  Gene Ontology: Mol. function=heat shock protein binding; Cellular component=integral to membrane; Biological process=protein folding
  Homolog annotation: Hit_ID=Q8RYN2; Match level="QueryCoverage=90%, HitCoverage=67%, E-value=2e-55, Identity=25%"; Hit description =Auxilin-like protein
MAMNWSCRDRDVGHGDAGKDICWNRERAGVAVHAPRLQAEAESLRHSGCQCVCPWSADVSDGRHGSATVYAVQVEEHSPFGAAPLDYAEVFGGVAATCSIPYLDLPPAPSLAAAEGFFACRGKGDYGEIFGRFDFADFALPYEDLFGEPQPEPVPDAAGETDPEIASSSGSSTRSSFRKESSQLEDEPSILPQHYQNLDHHQHFKDHKFSPISFSTDTESPQFVMSYNKTAERRPDDLIEMMTCTVKPSVDFVIDSRNSLHGPATNHVSRIDYGTMANDDSNKKPSPANTSVQSAESDFAVDQKQQSQSWTPISGSISANENHKNSDSHSTRSTVTPPDYAFLQVSDSDTQTQSIKVQQPLKQQPKLLNKKESAAKEDVRIVDDNCSPTSAHITSSSNMSHTDKKVDANPTSASAAMKEAMNFAEARLKAAKALLEGKGDSFKLRKKPSHLKSTRSTEIKSPISVEADTSEQKLWVKKSSEEEKNPDDSLSDKHKKLTAVRLDHFDDNGKKVLPLEKPEHMVQHCTESCQTSSKLQKLGNWKSGNDFFELTRDDQKCKNDEATEGGDKCEQMNPITSVINDHNEIEFNAAGSDLDRYEKLWEVNDGRSVGVKPVNLRENKTAPVDKDKNKAHQKTHNSIGEGLVTLKNAKESHGTDKCFELPSMSGASTKLDVFKDVSGSFPEARSSVNASDLGDHGNISPNLSPLAGTSQEDTTSKLVSEVSCDGGMQHTSRSNEKLQESSDVSDVAISQGSNIKSFILEELKESDVCDAFMRGPNGKGQEAENYGREKFSFIDGSLLLRPHFHNKGAKMNVISEEVQKVKNEEKLGPCTHPEVTIVDLDGDCPKDLNDVILQNDDFADPEESNMPNVFEVASKLIKRDLDQEMHGSLGHGEEENMEEGTDVHLCDINGKEVDETLLENSVCTDTEEGCAHCNQEDQNSSDSTNRGKSDVDNMCYTSCDEVRSESFSGDEVVIKTTIDSTARTFVNLKDEQVLSSEMYTRMQHSMQKDGTAAFQTSGGVPGLEEIGDVSNRGGRELSTERSTCEDHGNAIIMEEKDTTTRISKAEHASSPFGDDVWCN

SEQ ID NO: 56212 - protein, 227 aa, Zea mays
  Coding DNA Sequence Number=SeqID_14433
MFQHADLFAEELGELFIMEGAGDEQAGRQVLSLAIYAAAAAGQAAHGWVVGLAGRPAGVLLPAACCLLLVVEESWGWADQEDHSFPDSDSHRLFVLRHENCIRRIAYASAEMETGFSFCKCWGPISRESRCNAWPSPAHEQPSGLLASALAGIVSRPAHLWGPVDTETPPWPLTLPSEKPQAVVPRSSGSRLSPRHLPGAQDRIRHARMPGETNLLRVILSYTYTLI

SEQ ID NO: 56213 - protein, 111 aa, Zea mays
  Coding DNA Sequence Number=SeqID_14434
  Gene Ontology: Mol. function=DNA binding; Cellular component=nucleus; Biological process=regulation of transcription, DNA-dependent
  Homolog annotation: Hit_ID=Q0PJF9; Match level="QueryCoverage=58%, HitCoverage=64%, E-value=1e-17, Identity=61%"; Hit description=MYB transcription factor MYB164
  Pfam annotation: Domain name=Myb_DNA-binding; Domain location=10-60; Score=30.6; E_value=5.5e-06; Accession=PF00249.21; Description=Myb -like DNA-binding domain
MASGGGSSSSRAWTQRQNKQFECALAVYDREAPDRWHNIARYMGGTKSADEVRRHFEQLVHDVTQIEAGRVPFPRYMGSYYGSAPAPVAGAGLDDDMAAATRTKQYPKFQR

SEQ ID NO: 56214 - protein, 149 aa, Zea mays
  Coding DNA Sequence Number=SeqID_14435
  Pfam annotation: Domain name=RALF; Domain location=100-149; Score =19.8; E_value=0.00017; Accession=PF05498.2; Description=Rapid ALkalinization Factor (RALF)
MEKKVMKKRLAVAAVVLLFGLLLAVQEAAAAEEAAEAAPTTPGNSKADCEVPGTCDRNLNQAADPKRPGTKKATNMARLALVAAVVLCLLLATGPQGAISAEGMVSFDNLISCKVLGNCDKNLGPEASRPGKPANDYTRGCNPITGCRG

SEQ ID NO: 56215 - protein, 129 aa, Zea mays
  Coding DNA Sequence Number=SeqID_14436
  Subcellular localization annotation: CTP_CleavageSite=64; ConfidenceScore=5.56e-01
MATFLIFPSSSSSLLGVATPASKATQMAAATTMAQKHRGLRCNRNPFLSHVHRLRPRTTMTRLNADELYKRVLQEITPSIAYRSSYPYVSCGPQASIPSTNKRFWLVFLPAMSCGPQASIPSTNRSTFG

SEQ ID NO: 56216 - protein, 68 aa, Zea mays
  Coding DNA Sequence Number=SeqID_14437
MGDGEADLFVEQDAIGEALFEGWGRGGTRLPAKTRNGARSASAGRDTRDTSVRGVKKMTAKHGDSLTQ

SEQ ID NO: 56217 - protein, 50 aa, Zea mays
  Coding DNA Sequence Number=SeqID_14438
MSRAVAKEVVLNWLARTRQGKSDVERICKEVFEDLSDKNTGLLDITTFVA

SEQ ID NO: 56218 - protein, 99 aa, Zea mays
  Coding DNA Sequence Number=SeqID_14439
MNPSHPTHTHGAALLQEPQCRLPAVSKGSMADSAMLFSPPCYFSPLKGASHHDCPVTRVAIRFSHRAEFAIALLLAPSTSHHRAGSHTAFVSPSAVAAT

SEQ ID NO: 56219 - protein, 138 aa, Zea mays
  Coding DNA Sequence Number=SeqID_14440
  Subcellular localization annotation: CTP_CleavageSite=30; ConfidenceScore=5.22e-01
TASRRPSLLRAQPWPTSRLSSAPWPERLLRAAMGKSAQRMNPSHPTHTHGAALLQEPQCRLPAVSKGSMADSAMLFSPPCYFSPLKGASHHDCPVTRVAIRFSHRAEFAIALLLAPSTSHHRAGSHTAFVSPSAVAAT

SEQ ID NO: 56220 - protein, 125 aa, Zea mays
  Coding DNA Sequence Number=SeqID_14441
MYDKKTTKVMVITNQSTTKDGARIIQGLQSGKENKTTKGVIGDKEEDTTKGKVGKVQRSDQDGKEEVLKGGYKINIKVRYRDDKGKGDDDEKHSPWTELKQDLQSHEVEKTIKDKISEVLTEELK

SEQ ID NO: 56221 - protein, 82 aa, Zea mays
  Coding DNA Sequence Number=SeqID_14442
  Subcellular localization annotation: CTP_CleavageSite=36; ConfidenceScore=5.50e-01
MANHAMCVAPAHKHMLHKGRSLRPSSRVHRRAAPSRAEQQAPPRRVSLVRPFFPEQHHSISPALPVARTTMADVAPLLGALA

SEQ ID NO: 56222 - protein, 97 aa, Zea mays
  Coding DNA Sequence Number=SeqID_14443
MGDGRAPGHAGQSGPGWVGLGWAGSDLAGPHHLNGVSPNSDAMLTNLLATEYKKLKDDMKKMDEEIQRQQHQVLKVAKKWYLSHFRVDCHQKVVRER

SEQ ID NO: 56223 - protein, 147 aa, Zea mays
  Coding DNA Sequence Number=SeqID_14444
MGKDKRGRGSPRHASDKRKRDPSPPSEDFGDSEYSEEEVSSESEGSLALASPPTSSDDSNDSQGIAAEVWTYIHSVEHAGLEGSDESEVSSDEDSFGLSEERSGDDNDDEGGGGGDDSNDGDGGKGDDDGGEGGEGDDGGSGHWFKY

SEQ ID NO: 56224 - protein, 60 aa, Zea mays
  Coding DNA Sequence Number=SeqID_14445
MSRQGSNTTVDPPNVAGSPVAFALPLLFTVHDKIIMLIGTWSDHPGKQCYHKGLWTPLAD

SEQ ID NO: 56225 - protein, 199 aa, Zea mays
  Coding DNA Sequence Number=SeqID_14446
  Homolog annotation: Hit_ID=Q7XFV9; Match level="QueryCoverage=26%, HitCoverage=10%, E-value=5e-11, Identity=65%"; Hit description=HAT family dimerisation domain containing protein, expressed
MDLAYGGARREQIPRDEAGQMAWALRESLLDQRTPRYSPPLGRSSTGTSNTTPPLGACSRRQSRMDRYYRSPSVTQEICDIDLQCCKMSTHPRIDIMLHGGAKETWLHDMLKEKIGGELVRWNATKFGTLFCSYRVFGTDKTSSKLGWCLVIGKIMIGEMKKTTNSPTICLINRIWWEKVEMVLKTVTPLYSVLRFADQ

SEQ ID NO: 56226 - protein, 82 aa, Zea mays
  Coding DNA Sequence Number=SeqID_14447
MAEQLLRRRIRDPLTSNPPRRVCGHLWQAETKRTELYGWRNGDGCVVLPTGDGGVGGNGEPTPKRSLLRGGVVVKNNILNLG

SEQ ID NO: 56227 - protein, 100 aa, Zea mays
  Coding DNA Sequence Number=SeqID_14448
MELGGCRSNSLVADNTPGTTLDGVQDGRQAARDLRNKCRDRVAQRPYVRVYLSAYITGHRPRGSTGSPPERGAEVLFRGTQRSRVISAGIRHFLTGVRIH

SEQ ID NO: 56228 - protein, 540 aa, Zea mays
  Coding DNA Sequence Number=SeqID_14449
  Gene Ontology: Mol. function=metal ion binding
  Homolog annotation: Hit_ID=Q5VMR7; Match level="QueryCoverage=76%, HitCoverage=53%, E-value=1e-119, Identity=52%"; Hit description=2x PHD domain containing protein-like
  Pfam annotation: Domain name=C1_3; Domain location=128-157; Score =9.5; E_value=0.039; Accession=PF07649.3; Description=C1-like domain
  Pfam annotation: Domain name=PHD; Domain location=129-176; Score =42.9; E_value=1.1e-09; Accession=PF00628.19; Description=PHD-finger
  Pfam annotation: Domain name=zf-C3HC4; Domain location=39-79; Score =4.4; E_value=0.055; Accession=PF00097.15; Description=Zinc finger, C3HC4 type (RING finger)
  Pfam module annotation: Pfam domain module=C1_3::PHD::zf-C3HC4; Domain location=128-157::129-176::39-79
MAALADIDSSALPPSESSKGKGKMDEEEEDEAEGAEKMCGICYLDGRRAIRGELDCCAHFFCFVCIMAWGRVESRCPFCRARFHTIRRPPVAGRFPDERIVSIQERNQVHHPQGNGSSIVGGDPYVNTICTVCSSSSDDELLLLCELCDSAAHTYCVGLGTTVPEGDWFCKDCGTIRDDQLRWQAENQGEFEISMDVPGAEPVPAPSISGVVDEDHDLERPYARSGGGSTDDPVPSIYEIVGDDFATSAGIFRRRIAEDIGSQGTSAGSQCPRSTQGRDNGLAAYHAHIRLEVERARTLRNSRNLDKRIRELRENWAALRAGSVGFAPHMPVRRRKDMAGSASVATEHQRYAEPVTLSSRNGAAAASVPLPMPFSEETNTSLGHSKKVLQKDTRDARKAWKRLEMAKSSGGRKTSKTPASINCCPPFSMGNRSTSYSPIDTIVGHKNGNLRRSSVGSGSQSTMPVNPEEPSAVCAEDIAATIEVTKSSSLDQHERKRKHSSERCSDQRSKRSRECLHNFVKEAVSLALSGGQMDQTGTPC

SEQ ID NO: 56229 - protein, 75 aa, Zea mays
  Coding DNA Sequence Number=SeqID_14450
MWERRDKLLAEHELEVEDKEKKLEEKERTLEEQVFGLDLSRLDASTLKKELVTWPPGGYFDWDPDLHTALAREFQ

SEQ ID NO: 56230 - protein, 68 aa, Zea mays
  Coding DNA Sequence Number=SeqID_14451
MEGDKKAGAVAEKKAAAADQSKEVAAGDVSLKELSRRLNDFAKERDWEQYHSPRNLLLAMLLSGVNAY

SEQ ID NO: 56231 - protein, 77 aa, Zea mays
  Coding DNA Sequence Number=SeqID_14452
MPLPSPNIQDAHEDWCSIPTVVCGIVVGHVPLSVINKGMKLWQRGDKESPPDQNFYICNISFNEYRSAIAEEGSQAC

SEQ ID NO: 56232 - protein, 315 aa, Zea mays
  Coding DNA Sequence Number=SeqID_14453
  Gene Ontology: Mol. function=protein serine/threonine phosphatase activity; Cellular component=protein serine/threonine phosphatase complex; Biological process=protein amino acid dephosphorylation
  Homolog annotation: Hit_ID=O81709; Match level="QueryCoverage=20%, HitCoverage=12%, E-value=4e-12, Identity=60%"; Hit description =Protein phosphatase 2C
  Pfam annotation: Domain name=PP2C; Domain location=11-238; Score= -70.5; E_value=0.076; Accession=PF00481.12; Description=Protein phosphatase 2C
MEDASTVALRFADVPVRLHASRHDLASLDLDVDALRLSTHIFGIFYGHDGVEWPTTAGRGSRGWMMRCQGKQAGLSVASMSHGRWPPRTWAQMRLSPVCSSHAVVANCGDSHVVLRRGKETIESSIDRTSDIKDEQARIEALGLGCKVIQWNGYRVSGILAVVDWCTRSTSEKELVRKQVFVLGRMGNAKEALSTIINKLEVMQMQEVVEIVTEQHDDELWEELIRQCHKKPEMLRKINFGSDQCYSDCYDPIYQCGHGCSKSTILIHRLFPSSNNFFYLFMDHFGFSWLSTFSQSPVNTSRMTLHIRQLWGCAT

SEQ ID NO: 56233 - protein, 408 aa, Zea mays
  Coding DNA Sequence Number=SeqID_14454
  Homolog annotation: Hit_ID=Q651C2; Match level="QueryCoverage=17%, HitCoverage=14%, E-value=1e-17, Identity=63%"; Hit description =Aspartic proteinase nepenthesin II-like
MSMAEEGSEAEEGSEAEALEKDGSKASSPSGPASRLVSSNAAGVGSLEVGAATDTSNASRQGLDLGKKGPGAMSMAEEGSEAEEGSEAEALEKDGSKASSPSGPASRLVSSNAAGVGSLEVGAAADTSNASRQGLDLGKKGPGAMSMAEEGSEAEEGSEAEALEKDGSKASSPSGPSGLEDEELQVQDAVASGSKRSKDSAAAATRSANVSSPSVVHSHPAILPAPAQQIPEVKQAVCIPYGFHRLKSLEYSKLVSQCLNTEWTATIGQSEETEELSKITLENKDIQLDINIREESRSSSQQGNFDTEGTSSSEAFLLGTVASEKMLEKLKHKSGRCEPALEKAIVELEHDNFMSGLKVVFDRERKVLGWKNFDCYSVGNSRSNLPVNPNPSGVPPAPGLGPNSYTHS

SEQ ID NO: 56234 - protein, 224 aa, Zea mays
  Coding DNA Sequence Number=SeqID_14455
  Gene Ontology: Mol. function=structural constituent of ribosome; Cellular component=intracellular; Biological process=translation
  Homolog annotation: Hit_ID=Q9SXL9; Match level="QueryCoverage=56%, HitCoverage=92%, E-value=4e-54, Identity=81%"; Hit description=Csf-1 protein
  Pfam annotation: Domain name=Ribosomal_L14e; Domain location=133-209; Score=137.6; E_value=3.5e-38; Accession=PF01929.7; Description =Ribosomal protein L14
MNGGWLRLSIAPTTQTSRLVKAAIAWRTGQSEWLPEFPKVSSSELESLVHRTLSGGAPYTVWWHTGPVRRVARRRPAVLLADTAPPAAKMPFKRFVEIGRVALVNYGKEYGRLVVIVDVVDQNRALVDAPDMVRCQMNFKRLSLTDIKIDIKRVPKKTTLIKAMEEADVKSKWENSSWGKKLIVQKRRASLNDFDRFKVMLAKIKRGGAIRQELAKLKKVAAAA

SEQ ID NO: 56235 - protein, 63 aa, Zea mays
  Coding DNA Sequence Number=SeqID_14456
  Gene Ontology: Mol. function=potassium channel activity; Cellular component=membrane; Biological process=potassium ion transport
  Homolog annotation: Hit_ID=Q850M0; Match level="QueryCoverage=73%, HitCoverage=13%, E-value=1e-14, Identity=74%"; Hit description =Putative outward rectifying potassium channel
MTSVGYGDLFPNSDTTKLIACTFVFIGMAIIALLISNVADYLIEKQEKEKDIVMKITKLKNEG

SEQ ID NO: 56236 - protein, 123 aa, Zea mays
  Coding DNA Sequence Number=SeqID_14457
MEWVMKKRKAFDQRGDMIMVAWAKRQQHKMTLRAQRFSRSKVDPKEERKLFAKEKKASMRIVVAFGEHVSMASFHSSSVGLRASCPCASSLFNTSLHWMFEIVQLSCLSSKYVTVIVRHQTSR

SEQ ID NO: 56237 - protein, 111 aa, Zea mays
  Coding DNA Sequence Number=SeqID_14458
MEKKATTTAKLAAIAMDKVGFVVVAVASVVAEEANARWIQWHIAIWLKRSRTSAKKMYRCCSMSSTVWVHDVPVKGIGAHTQLDVCHFEEVAPYVAGEDQVPIAHDELGDP

SEQ ID NO: 56238 - protein, 259 aa, Zea mays
  Coding DNA Sequence Number=SeqID_14459
MKQHKQRFNTWIMVKDILPEETIEEQTINVPEPHLVQTPNPSSLLPPHQTSCSAAAAAVAAPPGELTVTPLMPIAFCYACFKDLDSLPSSSPPCHPDAPPTPGSNTREMHPTRRLLYTTSKPGQATHNREEEEGRRERPSRRVPSSSSSSRPLSLAPYPSALSRIILDPNQYNQYCDSSPRSKAEGEARKVVIASHVAVFSLIGFTCKIFKIVQANWNPTSHIVVIPNETNPRHIIIIVKLLKVFQKKGFVLGFQLKDP

SEQ ID NO: 56239 - protein, 72 aa, Zea mays
  Coding DNA Sequence Number=SeqID_14460
MAASSSRRRRPRLCSSVSWHARIFKLHADSGDITNDTWISPPGWTPSGRSDPSVGLRIGRPPNTPPDDVQSK

SEQ ID NO: 56240 - protein, 55 aa, Zea mays
  Coding DNA Sequence Number=SeqID_14461
MPCALGPPVSALTPLALGPLDNEQSEVPVCVVGDLPEQQPGEGKCPLTHYVLHTL

SEQ ID NO: 56241 - protein, 228 aa, Zea mays
  Coding DNA Sequence Number=SeqID_14462
MENTQMNLSGLVQDRTIMYEELTREHQVKYDKMKALFEASLIGSFERTHNHGIRWKGFTPEGALDEVDLLLHSEERTKALHQEVNYMVAHSLHRHSVSLMNPFERVVVHTVQEIMKHQYSSTGPMLGSHKGDIPFQTQSPLPYSVAAPKTQLAASPVYVVYKTCGGPEDYQFFNKPPNHIPHGYSCMYVPDCAGTAHPIWSGVAGIYEADTEKQAWLDKYATRLSHEN

SEQ ID NO: 56242 - protein, 192 aa, Zea mays
  Coding DNA Sequence Number=SeqID_14463
TSSNTKNASKWGQQGGSPGWTTSQPRLCKHDVLLDNHQGTAVGREEHRPVPWGTTHQHLEGDATGREQGTREGGNAMGLDELMHIEGKRKGGEQGDLLDHQGKRLASRAPWEDLLHVERRRGLPLAVHDGRNMASAMGGMGKTPWRPTLEEDREGMGRRPDGSQEGGASTWEADGLATKEDKRGGGTMGVGG

SEQ ID NO: 56243 - protein, 65 aa, Zea mays
  Coding DNA Sequence Number=SeqID_14464
MRGGHTLDTGFGPTYRLAPSPEVGPGATVGTSKQGYPFCSMKTLHPYDTPRSRGEQHPTPPHGQG

SEQ ID NO: 56244 - protein, 145 aa, Zea mays
  Coding DNA Sequence Number=SeqID_14465
MNVDEGEWFGGQGTSAIVVLRGRNSDEGLGARSMWRVGWLSWHAELERVSRVGAGGTWASLLYRGRRRGRGGSAVPGAARGREAMEEEREWVAAEGEEQGRQGREGGSGCQGGRECGWDDGPNGPNACYKSTPLKKNLVLEIKEG

SEQ ID NO: 56245 - protein, 200 aa, Zea mays
  Coding DNA Sequence Number=SeqID_14466
TPRRCEVVIPVSNPRLPATHLPSPSATYAPTGVTEWLEYLPEIGMRLESLVATQSTAHAPGRLPHDGGRFPGAGEESFHAQRPFPPADYAKCSQETWRRPPTNSPRPNDSNCLLRSRRRSLFPFGRRGVYGVGLLQWWIRWDRRGRVPGANKGAVRSKVGETAGEIPGGILHDAGSNNRRLGITLTSGAHEEVPNASAQM

SEQ ID NO: 56246 - protein, 129 aa, Zea mays
  Coding DNA Sequence Number=SeqID_14467
MTQQQARARSEGNSQPCHKHELGERVELKTQQWHETQRDHGGGDLIELWSQYNGTQLGDGISSRARSMTGDGHGRFETVLGAMGGAGSQEQGAAADAPWLKTDKRQGTTGAHRGHIEAANAYGRCRPGL

SEQ ID NO: 56247 - protein, 84 aa, Zea mays
  Coding DNA Sequence Number=SeqID_14468
MRSATIDSLWYQRSGLGLGPGCYTVSCWGLPWARSTGLVAGVGPISHRGRGWSRLRLVSWPGGIALRILMPLAFPELDGQSKES

SEQ ID NO: 56248 - protein, 611 aa, Zea mays
  Coding DNA Sequence Number=SeqID_14469
  Gene Ontology: Mol. function=acetate-CoA ligase activity; Cellular component=cytoplasm; Biological process=metabolic process
  Homolog annotation: Hit_ID=Q6H798; Match level="QueryCoverage=99%, HitCoverage=94%, E-value=0.0, Identity=73%"; Hit description =Putative acetyl-CoA synthetase
  Pfam annotation: Domain name=AMP-binding; Domain location=126-511; Score=246.6; E_value=5.1e-71; Accession=PF00501.18; Description=AMP -binding enzyme
MAVLGEPLPALDDPGILVHPSADFAAQALVSSTKQYRDMYQKSIDDPAGFWSEIADEFYWKQKWSPDNVCAENLDVTKGPIMIEWFKGGKTNICYNAVDRNVEAGNGDKIAMYWEGNEPSQDGKLTYSELLEKVCQLSNYLKSVGVRKGDAVVIYLPMLMELPIAMLACARIGAVHSVVFAGFSADALAQRVIDCKPKVVITCNAVKRGMKIIHLKDIVDASLDQSAKNGVDVGICLTYENQSALNKVDTRWKTGRDVWWQDVVPDFPTKCDVEWVDAEDPLFLLYTSGSTGKPKAPNYPDPGRCWDIVDKYGVTIFYTAPTLIRSLMRDGTEYVARYSRKSLRVLGSVGEPINPTAWRWLYDVIGDSRCPISDTWWQTETGGFMITPLPGAWPQKPGSATFPFFGVQPVIVDEKGREMEGECSGYLLHKEIMAWGFPGLCMEIKRDMRRHTSKPFAGYYFSGDGCSRDKDGYHWLTGRVDDVINVSGHRIGTAEVESALVSHPKCAEAAVVGIDHEVKGQGIYAFVTLVDGVPYSDDLRKSLVTTVRSQIGAFAAPDKIHWAPGLPKTRSGKIMRRILRKIASRQLDELGDTSTLADPGVVDQLIALSDS

SEQ ID NO: 56249 - protein, 61 aa, Zea mays
  Coding DNA Sequence Number=SeqID_14470
MDNHYVKLDVHNLETADRTKDKGKKNFEEPSAREKIKKTEVPKARGEEDGLKEVKSVGAHG

SEQ ID NO: 56250 - protein, 157 aa, Zea mays
  Coding DNA Sequence Number=SeqID_14471
  Gene Ontology: Mol. function=two-component response regulator activity; Biological process=two-component signal transduction system (phosphorelay)
MDPINGLRVLIIDEDKDDANHMKDMLHQYNFHVIVFTSPREALDFLNGHAQDIDFLLVAVDMEEMSRFEFLDMAIDMYENIQEISPGANTDGEQSNATNSSTNKEYMNNDIYEVQSSTGSNSVDMGLVNYPESEDGETVEKCPNAYQDPEVGTSPNN

SEQ ID NO: 56251 - protein, 309 aa, Zea mays
  Coding DNA Sequence Number=SeqID_14472
  Gene Ontology: Mol. function=translation initiation factor activity; Biological process=translational initiation
  Homolog annotation: Hit_ID=Q6YVX8; Match level="QueryCoverage=92%, HitCoverage=62%, E-value=6e-82, Identity=70%"; Hit description =Putative Ligatin
METTKGLRGKALKILHYYRDMLWQVYTDQGWDSADGRYVPNEGFFDDIVVEDPNPVSTSQAPDSAEEPEVTNDDSVLAEDAGVDISHNHGTNPGIQIEAVEEITDVISAKEDKYKKEVVLLAINHKHPDYMAFRPEKRVQELVEHEKDVAESSVTKQLEVAEIYKPSSHVKPIFVAVEADMEKYYSAPEASDIVFRYVEKEKLVKPTDKAKVILDVTLCDALYKGAIKKGSAYPTEIHKKDLGSAFLNRMQVHHKVSRGTQEVIRKGAIRTIQIMTERRQGNKKMTRLSGLECRFGWESLPRKFISDCR

SEQ ID NO: 56252 - protein, 107 aa, Zea mays
  Coding DNA Sequence Number=SeqID_14473
  Homolog annotation: Hit_ID=Q9FEN7; Match level="QueryCoverage=29%, HitCoverage=6%, E-value=3e-11, Identity=100%"; Hit description =Dihydrolipoamide dehydrogenase precursor
MALAILARRRAAAAVLRRPQTAAGAAVSAWRAYAAAGEESDVVVVGGGPGGYVAAIKAAQLGLKTTCIEKRGTLGGTCLNVGCIPSKICENRGFGGILGHTAVNLTC

SEQ ID NO: 56253 - protein, 43 aa, Zea mays
  Coding DNA Sequence Number=SeqID_14474
GAVRFFPKSSSSCRVQLTVAYEVPEILAPVASVSGVCINLMLA

SEQ ID NO: 56254 - protein, 146 aa, Zea mays
  Coding DNA Sequence Number=SeqID_14475
MASTSSAGDVGDSGTNSQTNPGYTECFAWFCIDGIGILAEKNAKGDYKLDGSKGAVADKTLTASANTSSSHQESHDVGELHIIILRIEKRSRHGPVQNKRPFKALLTSSSPPLHSTLFPLLGYKPLQIDLSKKLKPKIPSKDTAHQ

SEQ ID NO: 56255 - protein, 151 aa, Zea mays
  Coding DNA Sequence Number=SeqID_14476
MKVSSLLVTPDGLSFMLQSAQASAGAPHHSRHLAGVGIEYDKQELCSRSTKQAMKALKVIGEMEGISQQAKEDYLKVFSENLPLAHVEAPAAFFGWEVPDEFKNYTQPGGSSEVLKKKESYGRLLEPSIWIFLQHPFQGSSGGLAVEVCYN

SEQ ID NO: 56256 - protein, 270 aa, Zea mays
  Coding DNA Sequence Number=SeqID_14477
MAESGKGKAMDAPLVSLKPDEVRPRRRHHRKRWRDSSPCERPIQAAAMEGMAGSEAFDLLEDSRQLTSASSLHPLLKNIEGGSMRVASQDEAAQRAPIPNWRSLGWFEDGVMCVGSQEQSGRPLRPITEALSPQMSDILEIRLSPKVAEVPMMEPCDGDEVVQTAMSYEFGNVSDRRIEGKDHVGSFQLTFSQSEIHGSLISPSDLSLRAPSEAFSPTDDTALHVYTRRVCNNRENADMPADTDDDPSAISPTLMSFEVNMPSSPGRLRS

SEQ ID NO: 56257 - protein, 144 aa, Zea mays
  Coding DNA Sequence Number=SeqID_14478
  Homolog annotation: Hit_ID=Q1SSV9; Match level="QueryCoverage=32%, HitCoverage=23%, E-value=7e-12, Identity=70%"; Hit description =Streptomyces cyclase/dehydrase
  Subcellular localization annotation: CTP_CleavageSite=65; ConfidenceScore=5.69e-01
MAAGAALYYHPGAGKVSLEAVVPSSPSLALRLSQSKVLCVSSSRWWMRRRWEGKASSVSSRARARASARPALFSPVAMDWQECTNSTELEVDVPCSVAYQCYSERESIPQWMPFISSVKGDAFVPLLIKAAIGIFPSRTTCNIV

SEQ ID NO: 56258 - protein, 74 aa, Zea mays
  Coding DNA Sequence Number=SeqID_14479
MACQQGQSVSARSISARWDLVGRVDGKLTGPRSGYEIDGFGYDYGAGCQHCNHCSGEDEAVEGDFQEFQDYDEF

SEQ ID NO: 56259 - protein, 236 aa, Zea mays
  Coding DNA Sequence Number=SeqID_14480
  Homolog annotation: Hit_ID=Q6Z6H0; Match level="QueryCoverage=39%, HitCoverage=55%, E-value=5e-41, Identity=88%"; Hit description=S -adenosylmethionine:2-demethylmenaquinone methyltransferase-like
MSQPLISILIHVLDAAVDQDTSPPVVLRMLDGVVAKNGAAHAAATVNHEDPTVAFLLEELADQDVVLLDLERDNGAGEDLAPSVDLEDGLERAELAVHDQVRGNQRLDTRRLIPRHSVSGVHSILGPEEHGTGFGNGQEGKWPVGGVKTGGRPRQLGLGLGGLAAWEAGTAGLAGSRLLVRRARVRVCALPRARGAREFVTAAVQPPAAWSEDATRCWEDWPSGTLGVRRRPPGKT

SEQ ID NO: 56260 - protein, 825 aa, Zea mays
  Coding DNA Sequence Number=SeqID_14481
  Gene Ontology: Mol. function=sucrose synthase activity; Biological process=sucrose metabolic process
  Homolog annotation: Hit_ID=Q6K973; Match level="QueryCoverage=95%, HitCoverage=95%, E-value=0.0, Identity=80%"; Hit description =Putative sucrose synthase
  Pfam annotation: Domain name=Glycos_transf_1; Domain location=541 -734; Score=53.3; E_value=7.9e-13; Accession=PF00534.10; Description =Glycosyl transferases group 1
  Pfam annotation: Domain name=Sucrose_synth; Domain location=8-560; Score=897.8; E_value=4.8e-267; Accession=PF00862.10; Description =Sucrose synthase
  Pfam module annotation: Pfam domain module=Glycos_transf_1::Sucrose _synth; Domain location=541-734::8-560
MASKLSFKRADSIAESMPDALRQSRYQMKKCFHRYVSKGRRLLKNQQLIEELDKSLDDKVEREKLVEGFLGYIICSTQEAVVLPPYVAFAVRMNPGIWEYVKVHSDDLSVEGITPSEYLKFKETLYDENWAKDDNSLEVDFGALDLSTPHLTLPSSIGNGLQFVSKFMSSKLGDKPEISMKPLLDYLLSLNYRGEKLMVNDTIDTVNKLQTALLLAEVFVSGLPRYTPFLKFEQRFQEWGLEKGWGDNAERCKETLNCLSEVLQAPDPINMEKFFSRVPSIFNIVVFSIHGYFGQEKVLGLPDTGGQVVYILDQVRALEEELLQRIKLQGLNVTPKILVLTRLIPDAKGTKCNVELEPVENTKHSHILRVPFKTENGKELRQWVSRFDIYPYLERYAQDSCAKILDILEGKPDLIIGNYTDGNLVASLMSSKLGVTQGTIAHALEKTKYEDSDVKWRDLDQKYHFSCQFTADMIAMNTSDFIITSTYQEIAGSKEKPGQYEHHYAFTMPGLCRYATGINVFDPKFNIAAPGADQSIYFPFTQKQKRLTDLHPQIEELLYSKQDTGEHRLDKVKNITGLVEWYGQNKKLRDLVNLVVVAGLLEASQSKDREEIEEINRMHSLIDKYQLKGQIRWIKAQTDRVRNGELYRCIADTRGAFVQPALYEAFGLTVIEAMNCGLTTFATNQGGPAEIIVDGVSGFHINPTNGREASNKIAEFFQKCKEDPSYWNKVSTAGLQRIYECYTWKIYATKVLNMGSTYGFWKTLNKEERVAKQRYLQMFYNLQFRNLAKTVPRLFEHPPPQAPAGAGPSTMTDHDQLDGAEACYF

SEQ ID NO: 56261 - protein, 1079 aa, Zea mays
  Coding DNA Sequence Number=SeqID_14482
  Gene Ontology: Mol. function=translation initiation factor activity; Cellular component=cytoplasm; Biological process=multicellular organismal development
  Homolog annotation: Hit_ID=Q5Z5B2; Match level="QueryCoverage=85%, HitCoverage=90%, E-value=0.0, Identity=81%"; Hit description =Putative AGO1 homologous protein
  Pfam annotation: Domain name=DUF1785; Domain location=307-359; Score =109.9; E_value=7.6e-30; Accession=PF08699.1; Description=Domain of unknown function (DUF1785)
  Pfam annotation: Domain name=PAZ; Domain location=360-498; Score =172.7; E_value=9.3e-49; Accession=PF02170.12; Description=PAZ domain
  Pfam annotation: Domain name=Piwi; Domain location=612-935; Score =444.6; E_value=1.3e-130; Accession=PF02171.8; Description=Piwi domain
  Pfam module annotation: Pfam domain module=DUF1785::PAZ::Piwi; Domain location=307-359::360-498::612-935
MYITQPKKKRIEFVSFTAHGMGSWRQKLPGLGEGSGSGSQAAEAGGGGRGFRGRGGFYHQQQSPQGGRGRGTGYYSGGGGGRGGRGAVPSAIAPELRQAMQTSNEPDNIPAPEAGSQSQDAPSPSEEAVDQLKGLSVQDIVQAFPVSSKFPHRPGNGSVGTRCLVKANHFFAELLPAKKDLHQYDVSVTPEVTSRIVNRSVMEELVRLHKLSYLGGRLPAYDGRKSLYTAGPLPFTSKEFHITLLEEDDGSGVERRKKTYKVVIKFAARADLRRLEQFLAGRQAEAPQEALQVLDIVLRELPTTRYAPFGRSFFSPDLGRRRSLGEGIESWRGFYQSIRPTQMGLSLNIDMSATAFFEPLPVIDFVAQLLNTDDIYSRPLLDAERVKIKKALRGVKVEVTHRGNMRRKYRIAGLTSQETRELTFPVDQGGTVKSVVQYFQETYGFAIQHTYLPCLQVGNQQHPNYLPMEVCKIVEGQRYSKRLNQSQIRALLEETCQRPHDRERDIIQMMNHNSYHEDPYAKEFGIKISERLASIEARILPAPRLKYNETGREKDCLPRVGQWNMMNKDFALEPILPPIYAHPDKVERALKARFHDAMNLLGPQRREQLDLLLIGILPDNNGSLYGDLKRICEIDLGLVSQCCCAKQVFKMNKQILANLALKINVGGRNTVLADAVSRRIPLVTDRPTIIFGADVTHPHPGEDSSPSIAAVVASQDWPEVTKYAGLVSAQSHRQELIEDLYNVTHDPQKGTVCGGMVRELLISFKKSTGQKPQRILFYRDGVSEGQFYQVLLHELDAIRKACASLEANYQPQVTFIVVQKRHHTRLFAHNHNDQNSVDRSGNILPGTVVDSKICHPTEFDFFLCSHAGIKGTSRPAHYHVLWDENNFTADALQTLTNNLCYTYARCTRSVSIGRFVKVISIAESMHEQQINQKMHMPSLQSRRRTTLTWPHSAPGSTWSLTAQTAGRWRVAPVEAERPPARQRPAAPAPPPAEPLDPSPRSRTASRRSCSTADEPEHEDSRQPCLKSDPLGAVVCRAQKTFAWCLFDEGWLEWWIRFLLVLRDDRNSTIANKKFEIKLN

SEQ ID NO: 56262 - protein, 107 aa, Zea mays
  Coding DNA Sequence Number=SeqID_14483
MPWSCALCCVLACPGRALGCALARAPAAAPWSCPRPCAPGYALARPCLSPCPGSLAPHAPARSVDVAMRLMDLVMPMVLVVRIATTAQEKMKAVEGDFQEFQDYDEF

SEQ ID NO: 56263 - protein, 163 aa, Zea mays
  Coding DNA Sequence Number=SeqID_14484
MSGFTDVWVASVRSSSSTIVTGLREIAGENGRDVVSQLGAQYGVRECGRDPDCVCVENQDGWALRDLAIARRNSSPLVKLWQPWMPQANTLIHGNDSLFGFPILPSLFFIPPHPRKSSETGKLHARGSHLPLTTMGAAVVCSIGEGDVRVGSCTVGSGIDGSD

SEQ ID NO: 56264 - protein, 379 aa, Zea mays
  Coding DNA Sequence Number=SeqID_14485
  Gene Ontology: Mol. function=rRNA N-glycosylase activity; Biological process=negative regulation of protein biosynthetic process
  Homolog annotation: Hit_ID=Q10F32; Match level="QueryCoverage=39%, HitCoverage=50%, E-value=1e-20, Identity=36%"; Hit description =Ribosome inactivating protein, expressed
  Pfam annotation: Domain name=RIP; Domain location=2-249; Score=-37.0; E_value=7e-05; Accession=PF00161.9; Description=Ribosome inactivating protein
MYVDITTQTYNSLYIELASLLKIPIGPVYDPQEVMQRYVLGPRRFGFYDEPPEWIYIHVVGEEQDRVILAIAIDDLCLIGFSNASDHWYKFNGQSSSFKGLPGATVLPIRQNYQDLIKGHANLWKVPLGKKSAIHATKQLASYDRAVTPDSELKDGLVRFVVMMCEGMRFRSIRDMFSSLSGNNWEEETFITELQAKSVVYWSQLSMLLIRWELTGRLPGGPKWGAVDGRYNSMAKHVQETINVNDANDALTIIDFLLRPTEEVDTDSETKHRGSLKRGTEYFSKIYKQDIYNTLNLRSEREERERESSDAAYAFAVQAIDLTSAEEDRRDAEVCGAANARIVAHDTLFVHDLAAISEEQWAHDDYYFELPNFCILALF

SEQ ID NO: 56265 - protein, 178 aa, Zea mays
  Coding DNA Sequence Number=SeqID_14486
MKYFPPLDRNHPAWAARIRNLGSLGSLKAAEKDPMIVAMSGYLLSLDDLCDQFCRRARALTQRAEEAEVRWRKSRLDLAQAEAHVANAESCVALAEEKVWEQADHHSKLLRDISLVDHVKRKDPHPQNSDGTNVLEGTPLYLFQPRRRICGPATPTPPASPRPDDEEGPRETIIGTDV

SEQ ID NO: 56266 - protein, 328 aa, Zea mays
  Coding DNA Sequence Number=SeqID_14487
  Homolog annotation: Hit_ID=Q9LHR6; Match level="QueryCoverage=16%, HitCoverage=9%, E-value=1e-14, Identity=66%"; Hit description =Arabidopsis thaliana genomic DNA, chromosome 5, TAC clone:K3D20
MGSEVEGWELRGVEARTSRWSEGRELKQEICQGGNVEWNGPESRQFILSFSQLLEKRQKTGNVSTNLVQQFSNSTPFSIFKVFPTSEQIHYVRHHHFFATNNIAEYKALIVGLKFAISLRVHQLLVKEHISVCVGGRASVYGTDSALWGVPRSAFERTAMSIAARWFVQGTMEHNESYRQDNGILIGIPKGECGSHSSSCMLGASGDFMPMQNASSDSMPNRLPLLTSWLHAQSFEDAHRRETAHAFTAVPLWDATFQYKIELHHGLILSVRTVSQNEVTSPTPSSSASSSHNGMRVKTTRNTEAIKAVLLQPPISLTSFKHGFSGVL

SEQ ID NO: 56267 - protein, 146 aa, Zea mays
  Coding DNA Sequence Number=SeqID_14488
MVLHNLHLVLAEDAVIAYHQAVPRVHRFPVVFHINRPAVPAPGPPAAARAAAPQPREPRPPPPRPLPSSPLRPPPPRSSTVKRFTASCRDNFGCCALGAEGRSASASSLFRRLAAPDEPVIRRRLLRPRGTAPGTGERERAGQRRR

SEQ ID NO: 56268 - protein, 393 aa, Zea mays
  Coding DNA Sequence Number=SeqID_14489
  Gene Ontology: Mol. function=protein serine/threonine kinase activity; Cellular component=cytoplasm; Biological process=protein amino acid phosphorylation
  Homolog annotation: Hit_ID=Q2L3D1; Match level="QueryCoverage=68%, HitCoverage=79%, E-value=1e-56, Identity=51%"; Hit description =Cyclin dependent protein kinase
  Pfam annotation: Domain name=Pkinase; Domain location=96-364; Score =166.7; E_value=5.9e-47; Accession=PF00069.15; Description=Protein kinase domain
  Pfam annotation: Domain name=Pkinase_Tyr; Domain location=96-342; Score=-48.0; E_value=1.6e-09; Accession=PF07714.7; Description =Protein tyrosine kinase
  Pfam module annotation: Pfam domain module=Pkinase::Pkinase_Tyr; Domain location=96-364::96-342
MDHRCWIRLVRNLLSGRSRSAVEGRGEEGTASDSGIYNGLQTASSPSPAPVPLPSTLHQAAAESSVCYAIAPMASCIATGVREPRAAPRNSTIDEYEEICCLGMGAFGAVYKKVRHRATGQIVAIKRLTDAVGFVAQIPLLREAGLLKKSCRDNPFVVGLLSIARNPATMDSFLVMECVGPSLCDLLRQRHHAGMPPLPEATVRAVMWQLLTGAKKMHDGHVVHRDIKPGNILVSADGTIVKICDFGLAMGMDVQEPPYEATGTLWYMAPEMLLGKPDYDARVDTWSLGCVMAELIKGSRLFAHSDAANQLAGIFEVLGVPDETAWPWFSSTPFATQIVPIQGRNLLREFFPETKLSEEGFQQLLQNNPDGFKPIEYFMVHASTHLNHPSFHC

SEQ ID NO: 56269 - protein, 172 aa, Zea mays
  Coding DNA Sequence Number=SeqID_14490
  Gene Ontology: Mol. function=small conjugating protein ligase activity; Cellular component=nucleus; Biological process=protein modification process
  Homolog annotation: Hit_ID=P25865; Match level="QueryCoverage=87%, HitCoverage=67%, E-value=5e-45, Identity=63%"; Hit description =Ubiquitin-conjugating enzyme E2-17 kDa 1
  Pfam annotation: Domain name=UQ_con; Domain location=4-165; Score =100.1; E_value=6.7e-27; Accession=PF00179.16; Description=Ubiquitin -conjugating enzyme
MASIIQYHFTSLLTYVKFTLVGTFKLTLQFTEDYPNKPPTVRFVSRMFHPNIYADGSICLDILQNQWSPIYDVAAILTSIQFWNKYSSSIRTVEERNGFPRLPDVTRERIHVPYLKRVDLCASLMVQYVMSLLCDPNPNSPANSEAARMFSENKREYNRKVREVVEQSWTAD

SEQ ID NO: 56270 - protein, 632 aa, Zea mays
  Coding DNA Sequence Number=SeqID_14491
  Gene Ontology: Mol. function=exonuclease activity; Cellular component= intracellular; Biological process=regulation of transcription, DNA -dependent
  Homolog annotation: Hit_ID=Q10C49; Match level="QueryCoverage=100%, HitCoverage=98%, E-value=0.0, Identity=76%"; Hit description=5'-3' exoribonuclease, putative, expressed
  Pfam annotation: Domain name=XRN_N; Domain location=1-256; Score =589.7; E_value=2.7e-174; Accession=PF03159.8; Description=XRN 5'-3' exonuclease N-terminus
  Pfam annotation: Domain name=zf-CCHC; Domain location=263-280; Score =28.5; E_value=2e-05; Accession=PF00098.13; Description=Zinc knuckle
  Pfam module annotation: Pfam domain module=XRN_N::zf-CCHC; Domain location=1-256::263-280
MGVPAFYRWLADRYPLTVSDAEEEEPVELEPGAFVPVDLRRPNPNGLEFDNLYLDMNGIIHPCFHPEGRPAPTTYDEVFKSIFDYIDHLFGLIRPRKLLYMAIDGVAPRAKMNQQRSRRFRAAKDAADAAAEEERLRKEFEAEGRTLAQKEKSEAIDSNVITPGTEFMFVLSTALQYYIQLRLNHTLGWQSVKIILSDSNVPGEGEHKIMSYIRLQRNLPGFDPNTRHCLYGLDADLIMLALATHEVHFSILREVISMPGQHEKCFLCGQVGHLAAECRGPSQPDNSVELPPIHKKKYQFLNIWVLREYLAKDLEIIDAPFKINFERLIDDFVFMCFFVGNDFLPHMPTLEIREGAINLLMSIYRSEFTSMGGYLTDVGEVKLGEPGYRERYYADKFKEEAESKPIVQVRRDVSLRRLRAAARLLLQRIGGRRDDEVGVTAVAAREREKRGEGGRRCSNALPKYYGDLMSDPDSPLKSFYPKDFEIDMNGKRFAWQGVAKLPFIDERRLLAETRKLEDTLTEEEKFRNRTMLDIIYVRDTHPLITQIIFLYQNYYHLSRTDPYVIPIEPAASGGMNGFLCLSERNWYSVTVTSPVKGFNGIAQNRVLNAAYLNPQYHKHIPEPPAGVIIPAK

SEQ ID NO: 56271 - protein, 123 aa, Zea mays
  Coding DNA Sequence Number=SeqID_14492
  Gene Ontology: Mol. function=GTP binding; Cellular component =intracellular; Biological process=regulation of transcription, DNA -dependent
  Homolog annotation: Hit_ID=Q116H3; Match level="QueryCoverage=98%, HitCoverage=31%, E-value=6e-29, Identity=56%"; Hit description=GTP -binding protein YchF
VENGKAQAANFPFCTINPKVGVVAIPDPRLQVLLKLNKSLQTVPTSIELVYIVGLVKGASKGEAPVLSLSLINLQGRISPTLSKVEMVVRCFEDDDIVHVNGKVDPKSNIDVINLELIFLDLE

SEQ ID NO: 56272 - protein, 234 aa, Zea mays
  Coding DNA Sequence Number=SeqID_14493
  Gene Ontology: Mol. function=monooxygenase activity; Cellular component=integral to membrane; Biological process=electron transport
  Homolog annotation: Hit_ID=Q9FVM8; Match level="QueryCoverage=82%, HitCoverage=35%, E-value=1e-77, Identity=83%"; Hit description =Cytochrome P450
MARKTAALEFTTRTLRTAMSRWVSRSIHARLLPILADAHIVDLQDLLLRLTFDNICGLAFGKDPETLARCLPDNAFASALDRATEATLNRFIFPECVWRCKKWLGLGMETTPARSVRHVDRYLSAVIKARNLELSASLPPPPRGRTSSRPRRTTTSSRASCARGPTPTRRCSTWRSTSSSPAATAPRWRSPGSFGCGSSLASQLDCRGGTKLLRPLNQLTNAYSRWVVDSAVGS

SEQ ID NO: 56273 - protein, 167 aa, Zea mays
  Coding DNA Sequence Number=SeqID_14494
  Gene Ontology: Mol. function=structural constituent of ribosome; Cellular component=intracellular; Biological process=translation
  Homolog annotation: Hit_ID=P34788; Match level="QueryCoverage=99%, HitCoverage=100%, E-value=5e-63, Identity=71%"; Hit description=40S ribosomal protein S18
  Pfam annotation: Domain name=Ribosomal_S13; Domain location=14-157; Score=247.9; E_value=2.1e-71; Accession=PF00416.12; Description =Ribosomal protein S13S18
MSLIAGEDFQHILRLLNTNVDGKQKIMFAMTSIKGVGRRFSNIVCKKADIDMNKRQASRFSSKDIIRSLWAGELTPDELERLMTVVANPRQFKVPDWFLNRKKDYKDGRFSQVVSNALDMKLRDDLERLKKIRNHRGLRHYWGLRVRGQHTKTTGRRGKTVGVSKKR

SEQ ID NO: 56274 - protein, 146 aa, Zea mays
  Coding DNA Sequence Number=SeqID_14495
  Subcellular localization annotation: CTP_CleavageSite=38; ConfidenceScore=5.79e-01
MPSVPYPPAQPSLKTRFLPSTLFCTRYRQGPRFTPSTRVSTGTTFPGMLDLLCYTTVVSSLLKRRKGYTSVELTYFLIDSAYWPLALNKKTSLNFQQLGFELQEIRKLGLKGKRSVHLKQKKVEVYDYGLAKKYKDIQTHKHIPYK

SEQ ID NO: 56275 - protein, 126 aa, Zea mays
  Coding DNA Sequence Number=SeqID_14496
  Homolog annotation: Hit_ID=Q5N941-2; Match level="QueryCoverage=46%, HitCoverage=6%, E-value=2e-15, Identity=77%"; Hit description =Isoform 2 of Q5N941
MDAAAEGLHDMILLNARDDLDVLSLWSVGASADANGSTLLKGFRKPSPNNNLLECTQHAYDICTVDQGSLLKQLANKSISGGVAAVLAERDKEEMEMDIAKLEVGSMETSVICRSDGPLILAYLRK

SEQ ID NO: 56276 - protein, 420 aa, Zea mays
  Coding DNA Sequence Number=SeqID_14497
  Gene Ontology: Mol. function=acyl-[acyl-carrier-protein] desaturase activity; Cellular component=chloroplast; Biological process=fatty acid metabolic process
  Homolog annotation: Hit_ID=O24428; Match level="QueryCoverage=82%, HitCoverage=88%, E-value=1e-171, Identity=82%"; Hit description=Acyl- [acyl-carrier-protein] desaturase, chloroplast precursor
  Pfam annotation: Domain name=FA_desaturase_2; Domain location=90-418; Score=821.7; E_value=3.9e-244; Accession=PF03405.5; Description=Fatty acid desaturase
  Subcellular localization annotation: CTP_CleavageSite=34; ConfidenceScore=5.68e-01
MALRLNDVALCLSPPLAARRRRSRSRSSGRFVAVASMTSAVSTNLQQASSGGEDACLLSRLCHSQYVGVENKKPFAPPREVHVQVTHSMPPHKIEIFKSLDDWARDNILTHLKPVEKCWQPQDFLPDPASEGFHDEVKELRERAKEIPDDYFVCLVGDMITEEALPTYQTMLNTLDGVRDETGASPTAWAVWTRAWTAEENRHGDLLNKYMYLTGRVDMRQIEKTIQYLIGSGMDPRTENNPYLGFIYTSFQERATFISHGNTARHAKDFGDLKLAQICGIIASDEKRHETAYTKIVEKLFEIDPDGTVVALADMMRKKISMPAHLMFDGQDDKLFEHFSMVAQRLGVYTARDYADILEFLVDRWKVVNLTGLSGEGNKAQDYLCTLASRIRRLEERAQSRAKKAGTLPFSWVYGRDVQL

SEQ ID NO: 56277 - protein, 40 aa, Zea mays
  Coding DNA Sequence Number=SeqID_14498
  Homolog annotation: Hit_ID=Q8LHP0; Match level="QueryCoverage=56%, HitCoverage=25%, E-value=7e-07, Identity=100%"; Hit description =Transcription elongation factor 1 homolog
MGKRKSAAKPPPKKRMDKLDTVFSCPFCNHGSSVECRITH

SEQ ID NO: 56278 - protein, 384 aa, Zea mays
  Coding DNA Sequence Number=SeqID_14499
  Gene Ontology: Mol. function=transporter activity; Cellular component= integral to membrane; Biological process=auxin mediated signaling pathway
  Homolog annotation: Hit_ID=Q5JLM1; Match level="QueryCoverage=99%, HitCoverage=100%, E-value=1e-152, Identity=76%"; Hit description =Probable auxin efflux carrier component 6
  Pfam annotation: Domain name=Mem_trans; Domain location=9-377; Score =245.2; E_value=1.4e-70; Accession=PF03547.8; Description=Membrane transport protein
MIGWGDVYKVVAATVPLYFALFLGYGSVRWWRIFTREQCDAVNRLVAFFALPFFTFEFTLHTDPFQVNYRAVAADVISKAVIVGVIGCWAGSRVGSAGKGKGAVGWSITGFSLSTLTNSLVVGVPMARAMYGEWAQQLVVQLSVFQAIVWLTLLLFVLETRKAAIGMYVVPGGAADSDGGRAGLARSRDKGRRGRCPAIVVPPAGPAAAATVVVVVPVKPSLWALIKVVAHKLSRNPNTYASFVGITWACVANRLHIELPSAFEGSVLIMSKSGTGMAMFSMGLFMAQQEKVLACGPSFAALGLVLKFALGPAAMAIGSIAVGLRGDVLRVAIIQAALPQSITSFIFAKEYGLHADVLSTAVIFGMLVSLPLLVGFYIVLELIR

SEQ ID NO: 56279 - protein, 103 aa, Zea mays
  Coding DNA Sequence Number=SeqID_14500
  Subcellular localization annotation: CTP_CleavageSite=64; ConfidenceScore=5.09e-01
MHRHRVKVRNMTPGSQFEPMGRGSRDLVPSLMHRGSIAGSSRPRPRSHPLAQGPSLRAGITPPRGGASPALGIILADGSRCWGLVPRQTAYALGSSLTRLEGH

SEQ ID NO: 56280 - protein, 182 aa, Zea mays
  Coding DNA Sequence Number=SeqID_14501
  Homolog annotation: Hit_ID=Q5JN40; Match level="QueryCoverage=42%, HitCoverage=10%, E-value=2e-29, Identity=84%"; Hit description =Putative glucose inhibited division protein A
KLPEDLDYHSMTNLSLEAREKLSKVRPQTIGQASRIGGVSPADMTVLLIWMESNRRMATHRRQREQLGSVAVESDGSLRVCGTTMQGGAKLNPYYLVFEKSRINLSGTIIRGTLKTPNSQLGSDSGSAPEDDELRSARPRARTRAKPRKTANSAPPDPGLGLGLSPGRRRTPLRPTQGSDSG

SEQ ID NO: 56281 - protein, 780 aa, Zea mays
  Coding DNA Sequence Number=SeqID_14502
  Gene Ontology: Mol. function=catalytic activity; Cellular component =intracellular; Biological process=metabolic process
  Homolog annotation: Hit_ID=Q8S2C5; Match level="QueryCoverage=97%, HitCoverage=98%, E-value=0.0, Identity=69%"; Hit description=PPR repeat protein-like
  Pfam annotation: Domain name=PPR; Domain location=169-203; Score =30.4; E_value=6.5e-06; Accession=PF01535.11; Description=PPR repeat
  Pfam annotation: Domain name=PPR; Domain location=248-282; Score=3.1; E_value=3.2; Accession=PF01535.11; Description=PPR repeat
  Pfam annotation: Domain name=PPR; Domain location=317-351; Score=4.1; E_value=2.4; Accession=PF01535.11; Description=PPR repeat
  Pfam annotation: Domain name=PPR; Domain location=383-417; Score =43.5; E_value=7.3e-10; Accession=PF01535.11; Description=PPR repeat
  Pfam annotation: Domain name=PPR; Domain location=484-518; Score =32.5; E_value=1.5e-06; Accession=PF01535.11; Description=PPR repeat
  Pfam annotation: Domain name=PPR; Domain location=520-554; Score=6.4; E_value=1.3; Accession=PF01535.11; Description=PPR repeat
  Pfam annotation: Domain name=PPR; Domain location=622-656; Score=8.5; E_value=0.73; Accession=PF01535.11; Description=PPR repeat
  Pfam annotation: Domain name=PPR; Domain location=68-102; Score=10.5; E_value=0.42; Accession=PF01535.11; Description=PPR repeat
  Pfam module annotation: Pfam domain module=PPR::PPR::PPR::PPR::PPR::PP R::PPR::PPR; Domain location=169-203::248-282::317-351::383-417::484 -518::520-554::622-656::68-102
MEAFYLHLLRSCAALPHVAAVHAHLARAHPNASLFLRNCLLASYCRLGVGAPLHAARLLDEMPRRNAVSYNLVIVAYSRAGLPALSLATFARARAWARVVDRFTYAAALAACSRALDVRTGKAVHAMVVLGGLGNGLFLSNSVASMYARCGEMGEARRVFDAAEERDDVSWNALLSGYVRAGAREETLEVFSLMCRHGLGWNSFALGSIIKCCASSSSYAAAGDVGGGRIAEAVHGCVVKAGLDADLFLASAMIDMYAKRGALTNAVALFKSVPDPNVIVLNAMIAGFCREEAADVAREALGLYSELQSRGMQPSEFSFSSILRACNLAGEFGFGKQIHGQVLKHSFQGDVYIGSALIDLYSGSGCMEDGYRCFRSLPKQDVVIWTSVISGCVQNELFEEALRLFQESVRCGLRPDVFAMSSVMNACASLAVARTGEQIQCLAVKSGFNRFTAMGNSFIHMCARSGDVDAATRRFQEMESRDVVSWSAVISSHAHHGCARDALCVFNEMLDAKVAPPNEITFLSILTACSHGGLVDEGLRYYGIMNDEYGLSPTIKHCTCVVDLLGRAGRLADAEAFIRDSAFHDDAVVWRSLLASCRIHGDMERGQLVADKIMDLEPTSSASYVILYNMYLDAGELSSASKTRDLMKERGVKKEPGLSWIELSSGVHSFVAGDKSHPESKAIYRKVAEMVSKVAGISSREQDLAGCHSEKLAVAFGMIHLPQSAPIRVMKNLRVCRDCHSTMELISKKTVPVPVAVTGDDDQPKAQKRDIAHLLLDAST

SEQ ID NO: 56282 - protein, 172 aa, Zea mays
  Coding DNA Sequence Number=SeqID_14503
MNTTTCSTRPGARARPRRSAHARSLAPCQPHAHAHAHGYKSYPGLDRTTPHVPDPTRAQLLRTSVKLPEPGIELYLTEDVRSTSLDFNQPPSHVDRAPQPEHTPPTSLTACAQGQPYSGYHHRRSAPRRDRQDLPDLTPPFTGPPSPPEPAPEPTIEDLPAPALEGKPQFYA

SEQ ID NO: 56283 - protein, 116 aa, Zea mays
  Coding DNA Sequence Number=SeqID_14504
  Subcellular localization annotation: CTP_CleavageSite=31; ConfidenceScore=5.06e-01
MTAVTPRGPPVAHIANAHTHRTHVLTPRRCRQDLTAKAPSPATFAGHLPGPPDAPTHSAPPPRRPLTARRRPDDRTPAPTPVQRAAAAAPRAARARLCPPPPPGAPQSRPPSVAVR

SEQ ID NO: 56284 - protein, 75 aa, Zea mays
  Coding DNA Sequence Number=SeqID_14505
MAELQGHLEASLTALRASDARIADLQPCLATMEVHTLRWEAKLMELHQQIDMVTHSVRAHGVTHMQRLLDILGRV

SEQ ID NO: 56285 - protein, 69 aa, Zea mays
  Coding DNA Sequence Number=SeqID_14506
  Gene Ontology: Mol. function=nucleic acid binding; Cellular component= nucleus; Biological process=jasmonic acid mediated signaling pathway
  Homolog annotation: Hit_ID=Q6L4N4; Match level="QueryCoverage=82%, HitCoverage=13%, E-value=8e-13, Identity=72%"; Hit description =Putative zinc finger transcription factor
MVTTASGATIMTVERLNLGLLVDEEPVMERVESGRALREKVFERLSKESAVPNDTVASANVEMMACQWR

SEQ ID NO: 56286 - protein, 79 aa, Zea mays
  Coding DNA Sequence Number=SeqID_14507
MSFVLFDYFEKWILKTTEYTSFLLGARPPPCSPRAHPAQVRLSTPSLLDAAADDAAFRLDVKIQWNLVVAALADGALLS

SEQ ID NO: 56287 - protein, 418 aa, Zea mays
  Coding DNA Sequence Number=SeqID_14508
  Gene Ontology: Mol. function=transporter activity; Cellular component= membrane; Biological process=oligopeptide transport
  Homolog annotation: Hit_ID=Q6ZGW7; Match level="QueryCoverage=82%, HitCoverage=55%, E-value=2e-74, Identity=47%"; Hit description =Peptide transporter-like
MASRRLNLASSTRFFRQRLQKSLKRPQENKLSNKKDKADEDIVKNHKSSKNCEGSENSLDKLMNPTSTTPDSKWMPPATTDGSMDRRGNPAVKTTTGGWRSAILVLANYGLATCAFFGVGVNNIVVFLRRVLHQCNAEAANNISKWTGTVYIFSLFGAFLSDSYWGRYVTCAIFQIIYVTVRSSVQTLAKPSVSCDRSCSYLPVLCCVCSWWSGAQGLVILSLASWTWFLLVKPSGCGGVKAHCDEGSAPGVALFYLSSIATFGSDQFDETDPKGGALQGRLLAFFSYFYLALNVGSLFSQHRAGVLRGLWAVGHGVLGLGGHRSAGARALLARHAQLPALQAERQPLTRVAQVFVATLRKWHAEVRRGELLREVEGEDPNVSGIRKILRSDELRFLDKAATVTEEDKMESPWRCSAR

SEQ ID NO: 56288 - protein, 131 aa, Zea mays
  Coding DNA Sequence Number=SeqID_14509
  Gene Ontology: Mol. function=oxidoreductase activity; Cellular component=cytosol; Biological process=chromatin silencing at silent mating-type cassette
  Homolog annotation: Hit_ID=Q60EJ3; Match level="QueryCoverage=99%, HitCoverage=58%, E-value=3e-32, Identity=59%"; Hit description ='putative 1,4-benzoquinone reductase'
MAAQMKAFFDATGGLWREQSLAGKPAGLFFSTSSQGGGQETTPICSRFPLICRADGGDAADAPRDGVRAGGVHVRRQDIRHGERARRQPVRRGHTFAGDGSRWPTELELEHAFHQGKYFAGIAKRLKGGSA

SEQ ID NO: 56289 - protein, 294 aa, Zea mays
  Coding DNA Sequence Number=SeqID_14510
  Homolog annotation: Hit_ID=Q9LHQ4; Match level="QueryCoverage=76%, HitCoverage=66%, E-value=2e-41, Identity=39%"; Hit description =Arabidopsis thaliana genomic DNA, chromosome 3, BAC clone: F3H11
  Subcellular localization annotation: CTP_CleavageSite=77; ConfidenceScore=5.75e-01
MASNNLLNLPPFKIALNPPPPPLPTRPSVFLAPRQIPPCRSLLRSKPPPRQGVRSSTSPQLDTANTPSPPSSRQEAVAQARSCLATALQKPLNSSIPLKRQRQPRFRAEIPVVDESPGSLARLAFDVLSGGAGASRKGAPARLLLIWPSAEALSVALREFEDQGDSATAHARLGSMAPDALGACDAAVFLATGPAQVEQVKAAAAALEPRPVVLFNPSWSFDEEGDGEKFGAGARGFVGSFDVVYSFTGLEVRGLLSKKRGVLLRCAEAGRFGGEGWVLMVENDGGRVGRAGVQ

SEQ ID NO: 56290 - protein, 327 aa, Zea mays
  Coding DNA Sequence Number=SeqID_14511
  Homolog annotation: Hit_ID=Q5ZAK6; Match level="QueryCoverage=29%, HitCoverage=29%, E-value=3e-17, Identity=51%"; Hit description=BHLH transcription factor-like protein
MADEWWSCTRAADDDDDAGGSPCSTAPATTDQLDAADEPAATSTASIDFRRPTSLLHVVRHAAVPPSSPLILADPPHHIDDWTQAYLCGRAPLAAAAAAEASTSLSALLQLHGGDAAGRHFLLAQHLHGDAADSAAAHVAAASQSSALYAAAGNQPYSSSYGGGAPAAGALMAQQPPFPHQDEFEFSSASLFVGSSSSTRDSAGVPAAAARRPAVTTTKPLLLQALEQKAFAVRKEKLGDRITALQQLVSPFGKSLSSPYLGCGRPVVQQIQQRRQAKDDGGAAAKEDLRSRGLCLVPVASTTTYAVAAGGETAPEFWLPNFGGTLR

SEQ ID NO: 56291 - protein, 426 aa, Zea mays
  Coding DNA Sequence Number=SeqID_14512
  Gene Ontology: Mol. function=transcription factor activity; Cellular component=nucleus; Biological process=regulation of transcription
  Homolog annotation: Hit_ID=Q84Z08; Match level="QueryCoverage=92%, HitCoverage=84%, E-value=3e-82, Identity=42%"; Hit description =Putative short-root transcription factor
  Pfam annotation: Domain name=GRAS; Domain location=7-335; Score =250.4; E_value=3.8e-72; Accession=PF03514.5; Description=GRAS family transcription factor
MEQELRTGGRGGGNLRAHSSACLSGALIDGPRIQQLLLHCAAALESNDVTLAQQAMWVLNNIASSQGDPSQRLTSWLLRALVARACRLCAPPGSTTQSAAAAAAARTPAPRERAMSVTELAEYVDLMPWHRFGFTASNGAILRAVVGSAAVHVVDLSVTRCMQWPTLIDMLSKRPGGPPELRITVPSARPAVPPQLGVSDAEIGLRLANFAKSKGVQLHFSVVEGVTSPPPEKQAAALCQDLASVLSDRQALGLRDGEALVVNCQSWIRHVAPGSRDAFLGAVRALNPCLVTVTDEDADLDSPSLATRIAGCFDFHWILFDALDTSAPRDSPRRAEHEAAVGRKIEGVVGADDADGAERSESGARLAERMRRNGFVSVAFDEEAAGEVRRLLSEHATGWGMKREEDMLVLTWKGHGAVYTSAWMPN

SEQ ID NO: 56292 - protein, 366 aa, Zea mays
  Coding DNA Sequence Number=SeqID_14513
  Homolog annotation: Hit_ID=Q9FIT9; Match level="QueryCoverage=46%, HitCoverage=89%, E-value=2e-35, Identity=47%"; Hit description =Arabidopsis thaliana genomic DNA, chromosome 5, P1 clone:MRB17
  Pfam annotation: Domain name=HSP20; Domain location=95-191; Score= -11.9; E_value=0.007; Accession=PF00011.11; Description=Hsp20alpha crystallin family
MPGRRAIDVRLLPGGGDAAAAPKWRMSLLENTFSGFLQGAGADTAARAVFAEGSLFCPFLFGNFFDPADPFPLWEFESDVLLAALRRGNARTTVDWAETDCEYYLRADVPGGRRCDVEVSGDAMKVIDICGLWRAPAADGRDWRCGRWWEHGFVRRVELPEDAEWRKVEAHFDDCEGALEIKVADSDSPVSFGLLKALYSNHPGRFYSPISRHMISIRELRRTDICFHFTRKNRHLIQCIHCFPRCSYRTQPIITVGAGDPAVDTGVLENSLSPSMRIASSSSLRAQSLVRIDGKKTGIRQGVATGRHTAHPNPNYGFQSGNLGPRRDESNRSFVGARRCPARVDFTSYRIGLLACSVLGSPAPSA

SEQ ID NO: 56293 - protein, 78 aa, Zea mays
  Coding DNA Sequence Number=SeqID_14514
  Subcellular localization annotation: CTP_CleavageSite=60; ConfidenceScore=5.54e-01
MASCSPSTCRGRPPGASSCALLERRRPPPSAGAPTSHLTVARGAVILSPLFFVLSDLPFVGANRSSVFFGQNDLFRYG

SEQ ID NO: 56294 - protein, 493 aa, Zea mays
  Coding DNA Sequence Number=SeqID_14515
  Gene Ontology: Mol. function=transferase activity, transferring glycosyl groups; Cellular component=integral to membrane; Biological process=metabolic process
  Homolog annotation: Hit_ID=Q6AUW7; Match level="QueryCoverage=97%, HitCoverage=98%, E-value=1e-151, Identity=59%"; Hit description =Putative betanidin-5-O-glucosyltransferase
  Pfam annotation: Domain name=UDPGT; Domain location=24-479; Score= -75.9; E_value=8.4e-07; Accession=PF00201.9; Description=UDP -glucoronosyl and UDP-glucosyl transferase
  Subcellular localization annotation: CTP_CleavageSite=32; ConfidenceScore=5.29e-01
MASAKQSKKTRILVIPFFASSHIGPHTDFAVRLAAARPGVVEPTVAVTPANVTVVRSALERHGPAASGTVKIVTYPFPCVDGLAPGVENLSTAGADAWRINAAAIDEALSRPAQEALLREQSPDAVVTDFHFFWNSIIAAELGLPCVVFSVIGPFSGLIMHLLSGAAVVGDGGSESESREVAVPGLPEPEIRIPVSELPEFLRRPAKGQGTLNPCNAAMARCLGVAYNTFAGLEQEYREASMRVASLKRSYFVGPVSLPLPPAAAGVTEPPCIRWLHSKPSCSVVYVCFGTYAAISGEQLRELALGLEASGKPFLWVVRAGDGWAPPDGWAERVGERGMLVRGWAPQTAVLAHPAVGAFLTHCGSSSLLEAAAAGVPMLTWPLVFDQFIEERLVTDVLGIGERVWSGARSTRYEEREVVPAEAVARAVERFLEPGGPGEAARGRARDLAVKAHAAVAEGGSSSRDLQRLIDDLVEGRAAAGVPTSPSVASVGT

SEQ ID NO: 56295 - protein, 93 aa, Zea mays
  Coding DNA Sequence Number=SeqID_14516
MKNRHERHGGGGVRCLDEYWGEGWGAEPRPRKISWHWAGASSNAGHHGAGENGERGHHGVARGGDDGHRGDRGVEGAALSPFLAGMAERGSGE

SEQ ID NO: 56296 - protein, 497 aa, Zea mays
  Coding DNA Sequence Number=SeqID_14517
  Gene Ontology: Mol. function=transferase activity, transferring glycosyl groups; Cellular component=integral to membrane; Biological process=metabolic process
  Homolog annotation: Hit_ID=Q6AUW7; Match level="QueryCoverage=97%, HitCoverage=97%, E-value=1e-134, Identity=52%"; Hit description =Putative betanidin-5-O-glucosyltransferase
  Pfam annotation: Domain name=UDPGT; Domain location=12-486; Score= -115.0; E_value=7.9e-05; Accession=PF00201.9; Description=UDP -glucoronosyl and UDP-glucosyl transferase
MATETAMPRKKMRILLMPFFATSHIAPFTDLAFHLVAARPDDVEATVAVTPANALVVQSALARRGASHLATVKVATYPFPSVDGLPPGVENHSKVKAAADAWRIDAVATDEKLMRPGQESLIREHAPDLVITDIHFWWNVDVATDIGAPCVTFHAMGTFPTLAMFNLSRAAGAVDAAGGVVTLPGFPPPEIQVPTTELPEMLRRQETADDRATGNAVHAAHRRCFGLAVNTFFDLEHGHCETFVGNGYVKRAYFVGPLSLSPSPSSPVAAGGGAYGSRCIDWLDKKPPQSVVYLCFGSLTHVSEAQLRELALGLEASEKPFLWVVRSETWAPPEGWEERVGDRGMVVTGWAPQTAILAHHAVGAFVTHCGWNSVLETVVAGVPVLTWPMVFEQFIAERFVTQVLAIGERLWPAGAGVRSTRSEEHELVPAGAVAQAVARFVEPGGPGDAARKRVKELSVKARAAMAEGGSSHHDLRAMIDDIMEEAGTAAAGPVLSG

SEQ ID NO: 56297 - protein, 100 aa, Zea mays
  Coding DNA Sequence Number=SeqID_14518
MTNTDLYLFDDSTSKARGLCLLENTSAFEEYSDFKLVTFGKFQRRLRYNSPDCPVYTGHVRCSKEERPPELASLGISLKQLRYNSPDCPMYTGLSGVTAG

SEQ ID NO: 56298 - protein, 178 aa, Zea mays
  Coding DNA Sequence Number=SeqID_14519
MVPPRRPSIVESNSEDPPTEIQEEKHMLSALDALCKREVMALCKREVMALAPSRLGLAPSLEDVDRATVGCATRPNPQGPTPVDDDNDGMGYVVDLPPPNALVICGLHFRQDRAIRHGGEPDVDYCSKGGSATLQDKRPFLFISLSMTLISSTNIITVSPSQPLKMMKMMLCRELYVM

SEQ ID NO: 56299 - protein, 205 aa, Zea mays
  Coding DNA Sequence Number=SeqID_14520
  Gene Ontology: Mol. function=DNA binding; Cellular component =mitochondrion; Biological process=DNA integration
  Homolog annotation: Hit_ID=UPI00004C1731; Match level="QueryCoverage =83%, HitCoverage=11%, E-value=6e-90, Identity=91%"; Hit description =UPI00004C1731 related cluster
  Pfam annotation: Domain name=rve; Domain location=21-171; Score=76.3; E_value=9.9e-20; Accession=PF00665.16; Description=Integrase core domain
MGSSLIETGRTVPAISPPRRAAPRPSRGSKAPGGYTHLLIAIDKFSKWIEVRPLNSIRSEQAVAFFTNIIHRFGVSNSIITDNGTQFTCRKFLDFCEGHHIRVDWATVAHPMTNGQVEHANGMILQGLKPRIYNDLHKFGRRWMKELPSMVWSLRTTPSRATGFTPFFLVYGAEAILPMDLEYSSPRTRAYDDQSNQTDREDSLD

SEQ ID NO: 56300 - protein, 261 aa, Zea mays
  Coding DNA Sequence Number=SeqID_14521
MPTRQPTPTYPGLDKIFEGRGGLNQGSGQVMLAARCSHCCRLLMKVLDVYTYVFLYISTVLYKGFSANIHREDKDIFIATLKNKFDNDHSVFDLVVFGVTSCTATLSLAPPAIHDSVPYPANTYPRMQGRTLHHAWRALPGFLAHCHMLPEPAWALTTPFDLDAPSLVPSPTPRLLPCPFWLRLLPQSRSMPLGTTNLLHPSLVSTSATWWLTTQMAEAQCLLLDHIDVPSSVTALPCPTSRPNVATITALHAQAVEVLNI

SEQ ID NO: 56301 - protein, 75 aa, Zea mays
  Coding DNA Sequence Number=SeqID_14522
MNAADNLDVIACQDDDVPRKRPLAHILGCYNHYGVGGLSLGSSGAADLGFAANPHLELIIVLKLLEILRYAFIFS

SEQ ID NO: 56302 - protein, 213 aa, Zea mays
  Coding DNA Sequence Number=SeqID_14523
  Gene Ontology: Mol. function=hydrolase activity; Cellular component =nucleus; Biological process=gibberellic acid mediated signaling
  Homolog annotation: Hit_ID=Q6L545; Match level="QueryCoverage=99%, HitCoverage=63%, E-value=7e-82, Identity=69%"; Hit description =Gibberellin receptor GID1
  Pfam annotation: Domain name=Abhydrolase_3; Domain location=1-191; Score=109.6; E_value=9.1e-30; Accession=PF07859.3; Description =alphabeta hydrolase fold
SSGTAIYDNLCRRFVKLSKGVVVSVNYRRAPEHRYPCAYDDGWAALKWATSQPFLRSGGDGRPRVFLSGDSSGRQHRPTTWPSAPPTPGINICGNILLNAMFGRHRAHRVGAAAGRQAYLPEDADRDHPACNPFGPNGRRLRGLPFTKSLIIVSGLDLTCDRQLAYAEGLQQDGHHVKVVYREKATVGFYLLSNTDHYHEVMEEIGDFLAANL

SEQ ID NO: 56303 - protein, 104 aa, Zea mays
  Coding DNA Sequence Number=SeqID_14524
MASGIGDPGIEARHGREHDYFGCDSAATNRGREDGTMNVDGESAATNHRRGADYVSWDYAASAEGIGAATADGILGHGMVGADGVRWDSAASAEGIMRQPRKGF

SEQ ID NO: 56304 - protein, 653 aa, Zea mays
  Coding DNA Sequence Number=SeqID_14525
  Gene Ontology: Mol. function=metal ion binding; Cellular component =nucleus; Biological process=regulation of transcription, DNA -dependent
  Homolog annotation: Hit_ID=Q67IU4; Match level="QueryCoverage=99%, HitCoverage=100%, E-value=0.0, Identity=71%"; Hit description =Putative coiled-coil protein
  Pfam annotation: Domain name=fn3; Domain location=247-337; Score=3.2; E_value=0.075; Accession=PF00041.11; Description=Fibronectin type III domain
MDPPRGGPVIDPAKCRLMSVDEKRELVRDLSKSPESAPDRLQSWTRREIVEILCSDLGRERKYTGLSKQRMLDYLFSYDDNKDPSLWLSCSSDQHLQKDTCGFSCHLECALKDERTAFAVMVLLDRSMYGHHLFKEKNAHRSWKKQLVIAKDARRLDVLCHRIYLSHKILVSTEKYLVLHEIVDTALKKLEAEVGPISGAPNMSRGIVSRLTVGAEVQKLCAQAIDAMESLFSGVSPAGSRIPRPCMVPPNFVKFEAITQTSVMVFLDLVHYPMLAQEATSFNIWHRMAVTEAYLTNPTGIILPPSKKLPVTGLAPATSYIFKIIAFKNSIELGSWEIRTKTSYQKDDPRGSMPGGTRLGHNSESLKANSDGQSDPSSEGVDSNNNTAVYADLNKSPESDFEYCENPEILDSDKASRRLSEHIDDLQNIQMAADRVTEVTELEESPGLSASALDEEPNACVQAVLLREPNPLGHNQRTVVPRSQHASNVLGGNELVIVGPRYAGSVPPIATRGLENSKESGGRGFKPKPCNNIFQNGSSKPEREPGNSSNKRTAGKTEDLGHKDSSSEVSYEYCVRVVRWLECEGYIETNFRVKFLTWFSLRATPQERKIVGVYVDTLIEDPVSLSGQLVDSFSEAVYSKKRTPSGFCMDLWH

SEQ ID NO: 56305 - protein, 229 aa, Zea mays
  Coding DNA Sequence Number=SeqID_14526
MDAMFARGILKCPNRSARPIWLMSTRNPRESSVKTKGTSDNHEERQEIGTERSDPNPRAGSDPPSPSTWGPKRKQKDREREGIIPEVGGVRRPVPGEPHERHLRAALPALAPAAGGGGTGERPPREQGEEEEEHHREMRADGGAGGGPHGPSSRMKRGVQGWGEGEPGSRGRGERMDERRGRRAREAARVLSFEFEESRGVDENDRGAVDVAGRRDWTVDAPDPGDPAV

SEQ ID NO: 56306 - protein, 425 aa, Zea mays
  Coding DNA Sequence Number=SeqID_14527
  Homolog annotation: Hit_ID=Q2Z1Y7; Match level="QueryCoverage=38%, HitCoverage=45%, E-value=3e-29, Identity=38%"; Hit description=Pm27 protein
  Pfam annotation: Domain name=DUF1644; Domain location=135-289; Score =185.7; E_value=1.1e-52; Accession=PF07800.3; Description=Protein of unknown function (DUF1644)
PPPPPPPPLCCGRCTVGRLDGCGGHVFVFIVTHDGEDTHTHRERERPGVREEDVSPRLVVFCGVRSSSPPPSPTSSPPARSPRRTQRYGSSPLLRFADFWPVCVRLCAADHVCHEKTALVVPKPNTNTSLGIPAWVQGIWCASYEKGCRPFICDTDQTRSNCLERFRGAHGLPLPVPANARASSRTVAPLNSIHTITISSSNANNNRPACPLCRGDVMGWFVIGEARSHLNQKRRCCEESRCSYVGSFHELQRHTQQKHPDSRPSAIDPARRADWENLQRSSDVVDVLSTIHAQVPNGVVLGDYVIEYGDGDEAGDDDYEVYHGVRASWWTSCIFCKAFCRSSPPGGVRRRTRTGERRSSGGSGTRSSSNRSSSSQERFTLDEVDDGYVVAGAMARAAVSGTMDARYSFTGKQQLSKHEVRQKHC

SEQ ID NO: 56307 - protein, 311 aa, Zea mays
  Coding DNA Sequence Number=SeqID_14528
  Gene Ontology: Mol. function=protein serine/threonine phosphatase activity; Cellular component=protein serine/threonine phosphatase complex; Biological process=protein amino acid dephosphorylation
  Homolog annotation: Hit_ID=Q6IV73; Match level="QueryCoverage=77%, HitCoverage=83%, E-value=1e-132, Identity=99%"; Hit description =Protein phosphatase 2C
  Pfam annotation: Domain name=PP2C; Domain location=2-227; Score =232.4; E_value=9.9e-67; Accession=PF00481.12; Description=Protein phosphatase 2C
MEDFYEARIDDVDGEKVGMFGVYDGHGGVRAAEYVKQHLFSNLIKHPKFITDTKAAIAETYNRTDSEFLKADSTQTRDAGSTASTAIIVGDRLLVANVGDSRAVISKGGQAIAVSRDHKPDQTDERQRIEDAGGFVMWAGTWRVGGVLAVSRAFGDKLLKPYVVADPEIKEEVVDSSLEFLILASDGLWDVVTNEEAVAMVKPIQDPQEAANKLLEEASRRGSSDNITVIIVRFIDGTTGVKLALGLQYGLGLTLTALTSHCIRILSSVWYNLSHSFFVDLSRSRTKQQSLITSSASRTSRFSKEQQFKGF

SEQ ID NO: 56308 - protein, 288 aa, Zea mays
  Coding DNA Sequence Number=SeqID_14529
  Homolog annotation: Hit_ID=Q67UX6; Match level="QueryCoverage=35%, HitCoverage=28%, E-value=9e-24, Identity=61%"; Hit description =Putative homeodomain leucine zipper protein
  Pfam annotation: Domain name=HALZ; Domain location=210-254; Score =43.0; E_value=1e-09; Accession=PF02183.8; Description=Homeobox associated leucine zipper
  Pfam annotation: Domain name=Homeobox; Domain location=123-209; Score= 23.2; E_value=1.9e-05; Accession=PF00046.19; Description=Homeobox domain
  Pfam module annotation: Pfam domain module=HALZ::Homeobox; Domain location=210-254::123-209
MEEHCYSVSAEEVVGTHLSLGIGGGGGGGDKRMLTTLPPSRTVVQLFGEVLSVQDGDEAQALRHHHTGRPTAASRKKKRRDAAAGGASATDAAANGHHHQSKKTKTTAARRDDGGGGGGGGRKKLRLTAAQATLLEDSFRAHNILSHVCRFMHAPHAPFIHTYVILHSSSLPLMGRIYQGEKQELARQAGLSARQVEVWFQNRRARTKLKQTEVDCDLLRRWCARLSDDNDRLRRDLADLRRAAAASAGLGAVVCCASCGADRQLALAAAADNVLPSVASPSHSPHLT

SEQ ID NO: 56309 - protein, 105 aa, Zea mays
  Coding DNA Sequence Number=SeqID_14530
MILRAWIKFSAKTFRENRKSRLKTKKPRNLINTFFERTLRGLDEGEEEESRGLDEEKAAVHHWVHFARKLMPSHASCRSEFIHQFDGSVSVAKTQSLGDCVSNHC

SEQ ID NO: 56310 - protein, 670 aa, Zea mays
  Coding DNA Sequence Number=SeqID_14531
  Gene Ontology: Mol. function=RNA-directed DNA polymerase activity; Cellular component=exocyst; Biological process=exocytosis
  Homolog annotation: Hit_ID=Q5Z4V4; Match level="QueryCoverage=88%, HitCoverage=94%, E-value=0.0, Identity=61%"; Hit description =Putative Exo70 exocyst complex subunit
  Pfam annotation: Domain name=Exo70; Domain location=51-604; Score =345.2; E_value=1.1e-100; Accession=PF03081.6; Description=Exo70 exocyst complex subunit
MDHGGEDRVVAASLAAARRTLRAGLDKSRALGHALARAGPRLKEIQAALPVLEAAVRPIRAPRAELAAAGPHIDRAVGPAAAVLKVFDAVHGLEPPLLAPGAAGSGAAGDLPGYLAVLAQLEEAHRFLADNCGLAAQWLADIVEYLGDRFLVDPRFLADIEVTLDELKAPPTGDLDGGLLAAALGILEAEFRRLLADHSAPLAMPQPGAAAGSTAPSRVPAAAVHKLTLILDRLVANGRQDRCVAVYIDARGGVVSASLRALGLDYLREPSQDAQALGPALELWGRHLEFVVRRLLESERQLCAKVFGLHKDVASACFAEVAAQAGVLEFLRFGRAVADAKKDPIKLQRLLEVFDSLNKLRLDFNRLFGGKACAEIQSQTRDLVKLLIDGAVEIFEELIVQVELQRHMPPPVDGGVPRLVTFVVEYCDRLLGEQYRPMLGQAYDNATLSYLFMMNTHWHFFRHLKATKLGEILGDVWLREHEQYKDYYLSMFIRESWGALSPLLNREGLILFSKGQATARDLVKQRLKTFNSSFDEMHCRQSSWVIPDKDLRERTCNLVVQTIVPAYRSYLQNYGPLVEQDGNTSKYVRYTVDGLEKMLSALYMPRPRRAGSFQIKHSSGWMEGTKELEIMDTATLHYWAFAFRAIEASEIRLENFVCLFPIALRYLGAI

SEQ ID NO: 56311 - protein, 53 aa, Zea mays
  Coding DNA Sequence Number=SeqID_14532
MADASDERRLNAYKITIDIINVWVGDFFDFQVCLWLKISKRWSAEAESKNDQN

SEQ ID NO: 56312 - protein, 380 aa, Zea mays
  Coding DNA Sequence Number=SeqID_14533
  Gene Ontology: Mol. function=ubiquitin-protein ligase activity; Cellular component=intracellular; Biological process=protein modification process
  Homolog annotation: Hit_ID=Q2R2X5; Match level="QueryCoverage=98%, HitCoverage=97%, E-value=1e-125, Identity=59%"; Hit description=Uvb -resistance protein uvr8, possible, putative, expressed
  Pfam annotation: Domain name=RCC1; Domain location=134-185; Score =20.2; E_value=0.0047; Accession=PF00415.9; Description=Regulator of chromosome condensation (RCC1)
  Pfam annotation: Domain name=RCC1; Domain location=249-295; Score =12.6; E_value=0.03; Accession=PF00415.9; Description=Regulator of chromosome condensation (RCC1)
  Pfam annotation: Domain name=RCC1; Domain location=32-79; Score=7.5; E_value=0.11; Accession=PF00415.9; Description=Regulator of chromosome condensation (RCC1)
  Pfam annotation: Domain name=RCC1; Domain location=323-372; Score =8.6; E_value=0.084; Accession=PF00415.9; Description=Regulator of chromosome condensation (RCC1)
  Pfam annotation: Domain name=RCC1; Domain location=82-131; Score =37.7; E_value=3.9e-08; Accession=PF00415.9; Description=Regulator of chromosome condensation (RCC1)
  Pfam module annotation: Pfam domain module=RCC1::RCC1::RCC1::RCC1::RCC 1; Domain location=134-185::249-295::32-79::323-372::82-131
  Subcellular localization annotation: CTP_CleavageSite=28; ConfidenceScore=5.06e-01
MWRATRRSPPFLRWLSSDAASSKAPRQRVAALWGNGDYGRLGLGSLESRWSPTVCPFFLARAADPPASLACGGAHTLFLTQNGRVFATGLNDFGQLGIGTSVTHMLEPVEISGFHERVVEVSAGNHHSCAVTADGKLFVWGRNSGGQLGLGKGAGKVVSTPTKVDCLTDLRVKTVALGSEHSIAVTEEGEVLSWGAAGSGRLGHGRQSSILGFSLTSTEYTPRLIKNFDGIKIKKIAAGMLHSACIDEKGTLFIFGQKTEKVGFGRPNEEFRPNIVEEIPFSEEVACGGYHTCVVTAIRYRCALSTSKHPGDDIYTWGWGGANGTFFEEGHSSGGQLGHGNDVDYFEPMMVPFGTNARAVHVSCGFNHTGAIYECSEDFD

SEQ ID NO: 56313 - protein, 238 aa, Zea mays
  Coding DNA Sequence Number=SeqID_14534
  Gene Ontology: Mol. function=protein dimerization activity; Cellular component=nucleus
  Homolog annotation: Hit_ID=Q53M47; Match level="QueryCoverage=97%, HitCoverage=38%, E-value=4e-48, Identity=52%"; Hit description=HAT family dimerisation domain, putative
MWDCLFTILVDESHDISIKEQMELVVRFVNTKGEVIERFLGLKHVKDTTSEALKRALVEALSGHGLCVAKLRGQGYDGASNMRGEFNGLQKIIRDENLHAHYIHCFAHQLQSVVVVVSKCCSSIEDFFEYVSLIVNSTSASCKRKDVLVHKHHLNLLSKLASGQIVSRRDAITTEFDHRFNETSSELLVCFACLDPRDPFSKFDVDKLSWLTDMYCDDFSFDDRKIIKDHLHTFIIHV

SEQ ID NO: 56314 - protein, 139 aa, Zea mays
  Coding DNA Sequence Number=SeqID_14535
MTADVKARCSDEAATNVGASSIAGGGRAAGWHHRRDQSRRSTRGWARDVRGRAAWGAAAARGGRDWASALGRRAQAVALRFGALGWRGCCAVGPQKQAGVGMPRLGKGAHAGWAAAAVARDGPGWLSGPGRGEGSERRV

SEQ ID NO: 56315 - protein, 67 aa, Zea mays
  Coding DNA Sequence Number=SeqID_14536
MATEGNPDTEEKQIWSQFRTMARGLMAKSAAKSIFICRERDVWAMLQGHQAMLCRLNKQLALKSVED

SEQ ID NO: 56316 - protein, 458 aa, Zea mays
  Coding DNA Sequence Number=SeqID_14537
  Gene Ontology: Mol. function=transferase activity, transferring hexosyl groups; Cellular component=integral to membrane; Biological process=electron transport
  Homolog annotation: Hit_ID=Q2R2W8; Match level="QueryCoverage=81%, HitCoverage=79%, E-value=1e-143, Identity=66%"; Hit description =Glycosyltransferase 6, putative, expressed
  Pfam annotation: Domain name=Glyco_transf_34; Domain location=123 -406; Score=324.3; E_value=2.1e-94; Accession=PF05637.3; Description =galactosyl transferase GMA12MNN10 family
  Subcellular localization annotation: CTP_CleavageSite=40; ConfidenceScore=5.48e-01
MVATSEAAPLRVSASVGSKHHGGAGTRGPATRRRARDVVVFAAGVAATLLALVGTASVLDPGGRGGLVALRVPVPVPGPEDGPRTFYDDPEVSYAVAAGRRLTGWDAKRAEWLRSRGLGRRSAPERVVMVSGSQPEPCPGGAGDHLMLRFLKNKLDYCRLHGIELLYNREFLHPAMGGYWAKIPIVRAAMLAHPDAEWVWWVDSDAVFTDMDFSLPLAKYGGRNFVVYGWPDKFFVRKSWLGLNAGVFLIRNCQWSLDFMDEWARMGPAYPEDHARWGEVLRATLSDKDSDVACDQSALVYLLLNNWERPGKKTFVETEYFFQGYWKEVVDRLDGVAARYEAVERRSPGLRRRHAEQEHLRYAGARNAALRGVVPGPAGGGEVGWRRPLITHFVGCQPCSGGRNPMYSRESCDDGMRHALGFADDQVLRAYGFRHAAPLNDSVRGLPFDYPAAHARND

SEQ ID NO: 56317 - protein, 274 aa, Zea mays
  Coding DNA Sequence Number=SeqID_14538
  Homolog annotation: Hit_ID=Q2R2Z9; Match level="QueryCoverage=86%, HitCoverage=76%, E-value=3e-56, Identity=86%"; Hit description =Expressed protein
MSERAGYPAPAVAAIAGTAVASAPDHMDEQPARGRYHPFEEISEAVQLDDGEPAHLTDAESARTIVEVNNKATVMISTLVGDGVHERIILPEFPYLTDENGDIYFEVDNEDALLESIMGEDKIAHVIIGLDNTQVFADLDLVSASATEFAQEDDNGDEDDDGSDDDEESDFDEDFNDVPKVKIEEYQKAKPDIIAHSAPNVISRLRAGGDKVTQALKSLCWRSKAIQVEEAAVIGVDCLGFDLRVCSGTQVQTLRFAFPTKRKLSATPTDCLSK

SEQ ID NO: 56318 - protein, 245 aa, Zea mays
  Coding DNA Sequence Number=SeqID_14539
MPSILASSVSIRSHERDTNSVDKPVKRLVELVSQKIRCTYVRTLEDRRMATESRDNGLRCLLTEKVKTVVGESKATRMNCSMFSIVVRKNLSESGRQEAEDMGSILKIIVADCTRGVWHNVFAMEAQLPCLLVSFHQSQNRAPAPERRGDEQGAPANAVPVHDRRSGICDESGSFVELLERHTWLSGEGLTTVAAGILHRTQRSTARCGWGLALLESRKTPTMAPPRFGIEGMEGDVVVDPQWDN

SEQ ID NO: 56319 - protein, 75 aa, Zea mays
  Coding DNA Sequence Number=SeqID_14540
MRSMRGKLDCEVGMGLDLRRDWGKEEEDWRRLTADAYEEREAEPLKEIVDVAAKPRRGDSAHRDIDVLSIFPQRT

SEQ ID NO: 56320 - protein, 83 aa, Zea mays
  Coding DNA Sequence Number=SeqID_14541
  Subcellular localization annotation: CTP_CleavageSite=70; ConfidenceScore=5.82e-01
MTSTLAAALARFALHSTVPSLSLPKRRPNSCSKPHPATPSGSMVFRLALCVLDGSQQRATSFTSFRYPVRDDAFVSAPRVQQP

SEQ ID NO: 56321 - protein, 122 aa, Zea mays
  Coding DNA Sequence Number=SeqID_14542
MGERGAHRGSLAGEWRLGRKSYCSPVARDTGRRPTSSSWTWGSLEHRLHSLSRASAIGAAGNGGRWLLLAGEQEEDGPSEGGRDCCSPGGGGAEVRPWGEEPSSMLAAVKQGGRSWDIEIFG

SEQ ID NO: 56322 - protein, 99 aa, Zea mays
  Coding DNA Sequence Number=SeqID_14543
MPHFHLFCLLLLGRKLLLFLLHFHLVLCIPLLYLLHPLLVFLRMNGMGRTSKNEMTDINRTPYVGGGAIYTLVLKANGHGTKLNAKIYDAQGQRLNPWR

SEQ ID NO: 56323 - protein, 159 aa, Zea mays
  Coding DNA Sequence Number=SeqID_14544
MPTEKLLRAGEKGSLLPNVVEKGGAMGDGELTARARTREGPRHGWSKGARGQGESRGERSSFAPWTNRGNLPAGGFIGARTGGKGGFLLPCLKGAPWGEVDDRWPGGEAPSAMVAEGRRGAVPGQRGGSQMKEEEGRLLPHEGEEAPRERRLREKESGD

SEQ ID NO: 56324 - protein, 133 aa, Zea mays
  Coding DNA Sequence Number=SeqID_14545
MDWGISRADHWGTSCTGPQGTSCISGSPRGTLCIDIDPRGISHAGPRGTSCIGISSRGDCSDRGLQVHLQVLVLPVVTDAGALEYWTSVADTGRLEHLEQRRRQKPERTKERRRVSGGWEGFWRLIYCWRGLL

SEQ ID NO: 56325 - protein, 632 aa, Zea mays
  Coding DNA Sequence Number=SeqID_14546
  Gene Ontology: Mol. function=DNA binding; Biological process =regulation of transcription
  Homolog annotation: Hit_ID=Q5NB82; Match level="QueryCoverage=90%, HitCoverage=63%, E-value=0.0, Identity=57%"; Hit description=Nodule inception protein-like
  Pfam annotation: Domain name=RWP-RK; Domain location=555-590; Score =0.6; E_value=0.015; Accession=PF02042.6; Description=RWP-RK domain
MEFDFDSHGGDAWLLDAMSTSLHFSAVSPPVPSPWPCGDPHHPSMWLDTVALQDDGPSVPAEKSEISKKCEHLNGKCQVHLSLVDGCSDSSYFLKEKLTVALMYFKESTKQHLLVQVWVPIRKGDHYMLSTSGQPFVLDEQSIGLLDYRAVSMMYTFAVDGDSVEELGLPGRVYKQRLPEWTPDVQYYSSIEYARLNHAISYDVHGTVALPVFDSSMKSCIAVVELIMTSKKVNYAREVGEVSKALEAVNLKSTEVIEHPYVQIFNEGHQNVLVEMLEIITVICEELKLPIAQTWVPCKYQNLLIHCGGENKSCFDIHESCAQELCMSTSAVMFHIIDAHMWGFRDACVEHHLKKGQGVSGKAFILRRPCFTKDVTRFSKMEYPLVHYARMFGLAGCFSICLQSAYNRNEDYVLEFFLPPDCREDGEQKVLLDSILALLRQYLNRLQVATDEGSNEVYLQVDAITIIENGDIKNAHVQHMNCEGGIHASDERNMHVIHESDSQKRISPTESETCPSPDNTKCNDKLFARQNGGCISDSLLLENNSKHSGRRQGKEEKTFSLEVIQQYFTGSLKNAAKSLGGDVLGLTTTVHGRYALETNTAPPMGCHNLVECDHRPRGHLSYKQSKNQQEQV

SEQ ID NO: 56326 - protein, 329 aa, Zea mays
  Coding DNA Sequence Number=SeqID_14547
  Gene Ontology: Mol. function=DNA binding; Biological process =regulation of transcription
  Homolog annotation: Hit_ID=Q5NB82; Match level="QueryCoverage=99%, HitCoverage=33%, E-value=2e-82, Identity=53%"; Hit description =Nodule inception protein-like
  Pfam annotation: Domain name=PB1; Domain location=235-317; Score =89.8; E_value=8.3e-24; Accession=PF00564.15; Description=PB1 domain
MKRICRQHGISRWPSRQISKVNRTVSKLKKVIESVEGHEGAFTLTSVTGPLPVAFGPSNPISIKNQSQINVSGLPIPSVQENRDSSSQSKLLENDIHRSTLVPQKSFLANINRQIEAEKASNSRNSSKDCRTHSGRSEESYPVSPANMTFVSTLLEPQQNMYIQDGFTKESFQKEDLRFHGMFVNGSGSLKDCMNHITSAVNGTIIGHPGSLTTAQNSGIITCPGSLISAQNSRIVTVKARYKEDLLRFRFPCSGSFITLKDEVAKRIQMDGVLFDIKYLDDDHEWVKLTCDTDLEECMEISRASGSNVLRLLVTDIAPVLGSSCGSTG

SEQ ID NO: 56327 - protein, 251 aa, Zea mays
  Coding DNA Sequence Number=SeqID_14548
MCVDSTRIQKGITARKPLRPCPPVFGAPHRRPTPCPPRPPPHPHLQVIQPHPNRDKPEESARKSPIRMPPLPLSVSSKSNRLQPSIRPPPPPPNPRQAWSASQRSSVGRRRHRGGGAAGAPHHPLHHRRRLLRGSSPTVDPPATSTTESQAGMECEPEELRWAASASWRGSSWGAPPSAAPPTMSTSRIVSNRRSARHLHHRIPGRHGVRARGAPLGGVGIYRLSAYHAAFVLLFASIFPEWQASIFQLRM

SEQ ID NO: 56328 - protein, 619 aa, Zea mays
  Coding DNA Sequence Number=SeqID_14549
  Gene Ontology: Mol. function=binding; Cellular component =intracellular; Biological process=mRNA editing
  Homolog annotation: Hit_ID=Q6YWP8; Match level="QueryCoverage=75%, HitCoverage=96%, E-value=0.0, Identity=74%"; Hit description =Pentatricopeptide (PPR) repeat-containing protein-like
  Pfam annotation: Domain name=PPR; Domain location=231-265; Score =18.9; E_value=0.018; Accession=PF01535.11; Description=PPR repeat
  Pfam annotation: Domain name=PPR; Domain location=293-327; Score =24.7; E_value=0.00034; Accession=PF01535.11; Description=PPR repeat
  Pfam annotation: Domain name=PPR; Domain location=395-429; Score =41.7; E_value=2.5e-09; Accession=PF01535.11; Description=PPR repeat
  Pfam annotation: Domain name=PPR; Domain location=430-464; Score =32.7; E_value=1.2e-06; Accession=PF01535.11; Description=PPR repeat
  Pfam annotation: Domain name=PPR; Domain location=465-499; Score=0.5; E_value=6.5; Accession=PF01535.11; Description=PPR repeat
  Pfam annotation: Domain name=PPR; Domain location=531-565; Score=4.8; E_value=2; Accession=PF01535.11; Description=PPR repeat
  Pfam module annotation: Pfam domain module=PPR::PPR::PPR::PPR::PPR::PP R; Domain location=231-265::293-327::395-429::430-464::465-499::531 -565
MAGGSGVKRARKFGDTGEEMAGGSGGERPRREESGDAEMAARERADGGRERQQRGERGRTFHGTMRTFHGWRFPFHDGCRESGGAREESVGDVSMEIFRFLRLGSPGPRVQIVLTSWNVRSILFDEGPLARLGFSWEYILPEVKRCFPPSPLPSKAATNATAPRCRAAPSGDASLCAFRAHHSAGHALHTNPALMPALAACARLPSAVAEAEQIHALLVKSGGSRAVSHVQAFTSLIRAYARLGRVCDARKVFDGMADRTVVTWNVLLDALIRDGDLDAAWEVFVKMPQRNAVSWNTIISGFARNGWAPVAVDLFIEMTVAYGLAPDEATMVGFVSAVRDIGLLAIGKSAHGYVLRREFSLDGPLGVALVSMYTRCGSMGAAHSCFLSVTTKNVEHWTSLIAGFAAHGQPENALRLFVEMRQVGIEPNGVTFVAVLSACSHGGLVDEGFKYFDLMRSMGIRPMIQHYGCLVDLLGRAGFLKEAFNLASNLPEDPGFVIWSSLLAACRSHGNVEMAELTASKLAEAKPSHGSSYVLLSNTYARAEQWEDSKRTRRRMEEHRVAKKPGLSWIEIDGSVHSFATADKLHIESEGIYHMLEDLKHNFTSAAYEPEPFAISEQL

SEQ ID NO: 56329 - protein, 210 aa, Zea mays
  Coding DNA Sequence Number=SeqID_14550
  Homolog annotation: Hit_ID=Q6ZG85; Match level="QueryCoverage=29%, HitCoverage=12%, E-value=5e-13, Identity=64%"; Hit description =Putative root-specific metal transporter
  Subcellular localization annotation: CTP_CleavageSite=13; ConfidenceScore=5.27e-01
MPTPTTVAAKAVRASAALTPVEVTHTVVSRLTTTVRTGGVLAASDAQDGQRAGQRERHATTTSEERGILTMVPAAGAAKEKFVKMGRSTLPLSKIGYVLLHLSNRYNLLLHPALVLSMKTPRSMKIIRVSEYFLVECSLVFVVAFLIKVIVTGSICNADNLFSDDADACGYLTQQSSSWRSRPPTSSSSSTWRLVWVFRTYPWKGPTSET

SEQ ID NO: 56330 - protein, 323 aa, Zea mays
  Coding DNA Sequence Number=SeqID_14551
  Gene Ontology: Mol. function=nucleic acid binding; Cellular component= mitochondrion
  Homolog annotation: Hit_ID=Q6YWP9; Match level="QueryCoverage=68%, HitCoverage=53%, E-value=7e-81, Identity=68%"; Hit description=RNA recognition motif (RRM)-containing protein-like
  Subcellular localization annotation: CTP_CleavageSite=88; ConfidenceScore=5.69e-01
MDTALPSVLIGGGLSVSVSISTATKAGSQSISSHLSTSSLRLTARHRNRRRLPLLASSSESPPAQLAAASTESQSRSSRWVVVMDTPPAAAGGSGVSRAEAVDYYAATLAQVVGSEKEAQMRICEASWDGTYEFRCEIDEDASKELANSDILFRSSFLACQEMPGVLSVQLDMGNKSEKDNHSLSLSTANLVSISDGASTSSSGKNEFWLVRMEKPGVEVVTKAQMVDHYTQILMKVLGNEQDAQVSIYHVSWDRDYGFCCHIDEECAKELADVPGVLSVQPDTNFGSDNKNYKAKIIFFLSKTFIGAFPYMKPPMLLYQSCA

SEQ ID NO: 56331 - protein, 806 aa, Zea mays
  Coding DNA Sequence Number=SeqID_14552
  Homolog annotation: Hit_ID=Q6YWQ1; Match level="QueryCoverage=68%, HitCoverage=95%, E-value=1e-177, Identity=60%"; Hit description =Putative aluminum-activated malate transporter
  Pfam annotation: Domain name=UPF0005; Domain location=197-651; Score =573.8; E_value=1.7e-169; Accession=PF01027.11; Description =Uncharacterised protein family UPF0005
MPSWPQHKDSSLCVTSSRVEGRKTRFRPRLAIAGARLLAAVYHSETNPDPEPPETKPNSDKTGAPEHPNSPPIDARASCIVADCGPNRARRVRCSGAGEKIRHAPPCAAAARSLVEAMGALPAGLPPLPPHLGTLRSTPDQRGAQEPLLGLDWSVADGDGGAGEQAAWGVGDGSARGVVGRLRRAARAVRSLVVEMWEFARKDPRKPVFAAKVAVALALITLLVFLREPSDIASHSVWAILTVVVVFEFSIGGLALLVAELAAQMGKYDMLVLIISTFVVAFCATLTKLHPKMKPYEYGFRVFLLTFCYVTVSGYNTGEFTATAISRFVLIALGAAVSLGINICIHPIWAGEDLHLLVARNFSGVAKSLEGCVDGYLACMEYERVPSKILTYEASDDDPVYSGYRAAVEASAQEETLLGFAIWEPPHGPYKMVKYPWKNYTKVGGALRHCSFSVMALHGCILSEIQAPPESRKVFCAELHRVGQEGAEVLRELGQRVKTMTKLSSPNILSEVHLAAEELQKKIDEKSYLLVNTERTHDGASAPDKDESPENAAADSVHTSTSFASNLYLSRYDSSNPFLGRYDSGSTAGGLYKAQSSWPARQSFHPSLPFEIEESRIYESASALSLATFASLLIEFVARLQNLVDAFEELSDKANFKDPVEEPSTISRETPGVLARIHNFFLVQVTRMPSPPDPLFPVLDPCLSHLLQVCSLLFTTRLQSVLAPLLFLSLSSLPIYSIRMVRSDAMSSDAARSSASDSTSSQAARCPSQREILLLGAHRPFDQGSSPTGEHRSFFNISGDHGVGGA

SEQ ID NO: 56332 - protein, 773 aa, Zea mays
  Coding DNA Sequence Number=SeqID_14553
  Gene Ontology: Mol. function=potassium ion transporter activity; Cellular component=membrane; Biological process=potassium ion transport
  Homolog annotation: Hit_ID=Q6YWQ4; Match level="QueryCoverage=99%, HitCoverage=100%, E-value=0.0, Identity=81%"; Hit description =Putative potassium transporter HAK2p
  Pfam annotation: Domain name=K_trans; Domain location=26-773; Score =1462.8; E_value=0; Accession=PF02705.7; Description=K+ potassium transporter
MDLESADGAEAADGKRRGESLRATLLLAYQSLGVVYGDVATSPLYVYKSAFAGNDIQHSEGNEEIYGVLSFVFWTLTLITLIKYVLIVLRADDGGEGGTFALYSLICRHVRAGLLPGGGTRDELMEEEKVTGRRGERPVSRVRAVLEKYRVLQRLLLLFALLGTCMVIGDGVLTPAVSVFSAVSGLELSLEKEQHKYIELPVACAILICLFALQHYGTHKVGFLFAPIVCIWLVCISAIGLYNIIRWDPHVYRALSPYYMYQFLRKTQTGGWMSLGGILLCVTGSEAMYADLGHFSQSSIQIAFISVVYPALVLAYMGQAAFISQHHSFESSYHIGFYVSVPETLRWPVLVIAILAAVVGSQAIITGTFSIIKQCSSLSCFPGVKIVHTSSTLHGQIYIPEINWMLMILCLAVTIGFRDTKHLANAQGLAVITVMLVTTCLMSLVIVLCWNKSIFLALGFLLFFGTIEVIYFSASLVKFHEGAWVPISLSFIFMVIMSVWHYGTIKKYEFDVQNKVSVNWLLNLGPSLGIVRVRGIGLIHTELMSGIPAIFSHFVTNLPAFHQVLVFLCVKSVPVPHVQPEERFLVGRIGPKEYRLYRVIVRYGYRDVQKDDLEFEKELVSNIAEFIRSSGEYDKNGFVEDADKPFEKLSTISTGINMLEEDGEVDAHVSPHKEIDPHNAAPKRKKARFMIPKSAQVDSEVRRELQELMDAREAGMSFILGHSYMKAKSGSSFIKRVVINFFYEFLRKNSRGPAYAANIPHASTLEVGMVYQV

SEQ ID NO: 56333 - protein, 145 aa, Zea mays
  Coding DNA Sequence Number=SeqID_14554
MPDKRLMCATKKNFSSRQAYLKTCNALDGKYSAMTDIWKLRLSDKVKIFCWVFLKDKLHTRDNMFKKSILPDSMCPAVKTVWRTHSIRLCYAQIAEIWSPTGISIDTLDGSTCSYSTILSTAISQKSYHKLFMMPWEANNVVVFR

SEQ ID NO: 56334 - protein, 129 aa, Zea mays
  Coding DNA Sequence Number=SeqID_14555
MRSSSSSGAEPESEPIGRCGVRCLPGLSPSSSPSGDAEFPMAPEAGLGCCQPHSVEWHNSRSGAGGAVLLSGRARVRIRCQATFALNAPAIRSVGVATWPRLLLGEDWASGEPKDFESHALHRIRATCD

SEQ ID NO: 56335 - protein, 183 aa, Zea mays
  Coding DNA Sequence Number=SeqID_14556
MLAHRTLYSTCPVRHRTSRRAQKSELQRSISNGTGDVAGAPDCPLVHQVSCKSPCTLFMPFHPEYRSSLDRSRIGANLANLSSAGWQIDNSKGVTQVKMNHALHLGIDRVKTDKAGRLRAGAHAWIKASESGEMRQRRCLGWASVEQHNQDTYRTSTNRNHQLCKKQKIRLPCAEKGRRAGGQ

SEQ ID NO: 56336 - protein, 198 aa, Zea mays
  Coding DNA Sequence Number=SeqID_14557
  Gene Ontology: Mol. function=unfolded protein binding; Cellular component=cytosol; Biological process=cellular protein metabolic process
  Homolog annotation: Hit_ID=Q1SBD4; Match level="QueryCoverage=76%, HitCoverage=36%, E-value=2e-63, Identity=69%"; Hit description =Protein kinase; GroEL-like chaperone, ATPase
MAAFIDFFTLSSSSITNSRADLMNIAMTTLSSKILSQDKEYFAELAVDAVLRLKGSTNLEAIQILKKPGGSLKDSFLDEGFILDKKIGIGQPKRIENAKILVANSAMDTDLRLWGMQLIYNFPEELFADAGILAIEHADFEGIERLALVTGGEIASTFDNPESVKLGHCKAARLTILRRGAARSSAEEAAEIRGDRKP

SEQ ID NO: 56337 - protein, 135 aa, Zea mays
  Coding DNA Sequence Number=SeqID_14558
  Gene Ontology: Mol. function=transferase activity; Cellular component= integral to membrane
  Homolog annotation: Hit_ID=Q0HA27; Match level="QueryCoverage=54%, HitCoverage=14%, E-value=8e-32, Identity=94%"; Hit description=Beta 1,2-xylosyltransferase
MKEQLRAILEASVVIGAHGAGLTHLVSATPDTKVLEIISSMYGPPHFALISHGKSLEYHAINLPGSFARITDVIAAWRTAASQQAATAWALGGRPDVDRRGTEGEAGRGRAARSECRIEEAGTGSLGPGTLGHRL

SEQ ID NO: 56338 - protein, 297 aa, Zea mays
  Coding DNA Sequence Number=SeqID_14559
MDTDVNPNSASICKGSSNSTSFCEGGSREGGHEQKNPNTFVRESSFPKMQKRGLSACGNWRCSVDYSLFLTSMHRAGDMSNTLMSVIVEYFNSISGALFDTVSRPSTISKYVICPFLLKKVKKGCNFKVKDSLLKTLEETQKRDMIMLLILDGSHWQLLANFIELLKIHKCIKFDVNSFEKIKASEIVACRMKLTHMLIKSKQNSADPCYVVKKLDANIKKYGINSRKVITSKNLTMLMGLIDQEIEEINAEKRKRSGHPAGGQPELKDDDGQLRANSVKARDAELRCERAVKLRRL

SEQ ID NO: 56339 - protein, 613 aa, Zea mays
  Coding DNA Sequence Number=SeqID_14560
  Gene Ontology: Mol. function=glycerophosphodiester phosphodiesterase activity; Cellular component=membrane; Biological process=glycerol metabolic process
  Homolog annotation: Hit_ID=Q6ZFH9; Match level="QueryCoverage=89%, HitCoverage=71%, E-value=0.0, Identity=60%"; Hit description =Putative glycerophosphoryl diester phosphodiesterase 2
  Pfam annotation: Domain name=GDPD; Domain location=216-495; Score =66.3; E_value=9.6e-17; Accession=PF03009.8; Description =Glycerophosphoryl diester phosphodiesterase family
MYPIVNVTGLPSLVKPSPVWLNVQHPTFYKQRGLDMSSYILSTHQDLVPTVAYISSPELGFLQTISAVAGRTRTTTKLVFSFLDKALLDHSVNRTYGSLLANLTLVRSVASGIMVPKSYIWPVTGDNYLLPSTSVVTDAHKAGLEVYASDFANDRVIPYNYSYDPVAEYLSFVGDGGFSVDGVLSDYPITASEAIGCFAKLNSSKTDHGKPLVISHNGASGDYPDCTDLAYHSAIDDGADVIDCPVQVTSDGVLVCMSSVNLLDTTNVQTTPLATPLCLVPEIQSTPGIFTFNLTWASISSGALKPKISSPVSEYYLVRNPRYASQGKFLKLSDFLAMNAAYIATSLGIDVVDSVTAALNAAGFDKQTSKQVLIQSTDSAVLVKLKQQGTRCRLVYTLPLGIGDASNSSLQDMKNFAEAVVVDRGSVFAVSYAFIEGQNRLVPDLQAAGLAVFAQVFRNEFVARPIDFFGDATVEINYYVQALGLAGLIADFPRTARRYMENTCTVLGNGMPGYMRPVEPGAIMKLLRSFQAQPPYVAPMPALNASSVEEPPLPPAAPRTVPPGGGLSGPADAAGTPAAGARHTAAVGTGLLLVVVSAALLVWADTRETVANL

SEQ ID NO: 56340 - protein, 480 aa, Zea mays
  Coding DNA Sequence Number=SeqID_14561
  Gene Ontology: Mol. function=transporter activity; Cellular component= membrane; Biological process=oligopeptide transport
  Homolog annotation: Hit_ID=Q6ZKX5; Match level="QueryCoverage=77%, HitCoverage=72%, E-value=3e-53, Identity=34%"; Hit description =Putative peptide transporter
  Pfam annotation: Domain name=MFS_1; Domain location=19-426; Score =13.0; E_value=8.1e-05; Accession=PF07690.6; Description=Major Facilitator Superfamily
  Pfam annotation: Domain name=PTR2; Domain location=81-410; Score =108.3; E_value=2.3e-29; Accession=PF00854.12; Description=POT family
  Pfam module annotation: Pfam domain module=MFS_1::PTR2; Domain location=19-426::81-410
MEAAVDGGVGVGLGPVIWVVAAEIGERFAFYAVASTLITYLTGPLQEGIAAAAAATNVWNGTALMLPLLGGAIADLWLGRYLTIVLASLLYILGLGLLAVSTVVGGQHCDAAAHTAGEKCPPPPAAQVVLFYVSLYVVAVGEGGHKPCAHAFGADQFSGSDPGESVSRGAFFNWWYFGVCAGTVATLLVVSYVQENLGWGLGFAVPCAVMACALAVFLLAVLLVSETKDVLRLLPIWATTLVYAVVYSQSMTFFTKQAATLDRRVGELAKVPAAALLAFISVTIMALIPVYDRVVVPLARAGTPAGRRGSRCCSASARGMLLSVASTVTAALVEARRLRVARAAAGLLADTPGKAAAQQQLPMSLWWMVPQYVVFGAADVFAMVGLQEFFYDQVPDRLRSVGLALYISVFGVGSFVSSALVSGIHRATAARGQSWFSDNMNGGHLDYFYWLLAALSALQFFAYVFVAWRYKYKDAGAEHT

SEQ ID NO: 56341 - protein, 86 aa, Zea mays
  Coding DNA Sequence Number=SeqID_14562
MNHALHLGIDWVNTDKVDRLRVGARTWNKASESGEMRQRRCLGWASVEQHNQDACRTSTKRNHQGRKKQKIRLSCAKKEGELEGSN

SEQ ID NO: 56342 - protein, 126 aa, Zea mays
  Coding DNA Sequence Number=SeqID_14563
  Gene Ontology: Mol. function=unfolded protein binding; Cellular component=chaperonin-containing T-complex; Biological process =cellular protein metabolic process
  Homolog annotation: Hit_ID=Q1SBD4; Match level="QueryCoverage=79%, HitCoverage=19%, E-value=9e-41, Identity=82%"; Hit description =Protein kinase; GroEL-like chaperone, ATPase
MTRSGSLRPAVTCDAVCSDKFRADLMNIAMTTLSSKILSQDKEYFAELAVDAVLRLKGSTNLEAIQILKKPGGSLKDSFLDEGFILDKKIGIGQPKRIENAKILVANSAMDTDLRLWGMCLGGFNV

SEQ ID NO: 56343 - protein, 197 aa, Zea mays
  Coding DNA Sequence Number=SeqID_14564
  Homolog annotation: Hit_ID=Q2RB11; Match level="QueryCoverage=86%, HitCoverage=59%, E-value=2e-56, Identity=60%"; Hit description=Nse1 non-SMC component of SMC5-6 complex family protein, expressed
  Pfam annotation: Domain name=SMC_Nse1; Domain location=6-160; Score =42.1; E_value=1.9e-09; Accession=PF07574.3; Description=Nse1 non-SMC component of SMC5-6 complex
MAPLSRKHQVLIQALLARGPLFERDFHAIFDGAFGKNTANDQQLFNDTLWNINKELAFVSFELQAFINQYDGMVYYGVLEAIIREAGNDGSITSIDALNVQLENQVTTVDGSQDNQSHLPIKNLSLSEKEKALDELIRDCWLSYTSTGKIGLGSRSFLDLRSWFYYNDIPSCVDRLFTLPPLGALNWYRSRTLHVRD

SEQ ID NO: 56344 - protein, 112 aa, Zea mays
  Coding DNA Sequence Number=SeqID_14565
  Subcellular localization annotation: CTP_CleavageSite=34; ConfidenceScore=5.31e-01
MDARSTSTPEIHMTDNPSINDPSLRATQRPRILSVDSLSTRRTATTPIFSTGKNNTAPLRGCPSSSDLFLLRIHCRDGTSPRCDLTAPLTQPRRLCHGSSGPLASAAGGPAS

SEQ ID NO: 56345 - protein, 1029 aa, Zea mays
  Coding DNA Sequence Number=SeqID_14566
  Gene Ontology: Mol. function=protein serine/threonine kinase activity; Cellular component=integral to membrane; Biological process=protein amino acid phosphorylation
  Homolog annotation: Hit_ID=Q6ZGM3; Match level="QueryCoverage=97%, HitCoverage=96%, E-value=0.0, Identity=51%"; Hit description =Putative Phytosulfokine receptor
  Pfam annotation: Domain name=LRRNT_2; Domain location=29-69; Score =34.5; E_value=3.7e-07; Accession=PF08263.3; Description=Leucine rich repeat N-terminal domain
  Pfam annotation: Domain name=LRR_1; Domain location=120-140; Score =7.5; E_value=11; Accession=PF00560.23; Description=Leucine Rich Repeat
  Pfam annotation: Domain name=LRR_1; Domain location=142-163; Score =6.2; E_value=19; Accession=PF00560.23; Description=Leucine Rich Repeat
  Pfam annotation: Domain name=LRR_1; Domain location=165-188; Score =9.6; E_value=4.5; Accession=PF00560.23; Description=Leucine Rich Repeat
  Pfam annotation: Domain name=LRR_1; Domain location=189-211; Score =12.0; E_value=1.6; Accession=PF00560.23; Description=Leucine Rich Repeat
  Pfam annotation: Domain name=LRR_1; Domain location=213-235; Score =10.8; E_value=2.8; Accession=PF00560.23; Description=Leucine Rich Repeat
  Pfam annotation: Domain name=LRR_1; Domain location=237-259; Score =15.5; E_value=0.19; Accession=PF00560.23; Description=Leucine Rich Repeat
  Pfam annotation: Domain name=LRR_1; Domain location=261-283; Score =15.9; E_value=0.14; Accession=PF00560.23; Description=Leucine Rich Repeat
  Pfam annotation: Domain name=LRR_1; Domain location=309-331; Score =12.6; E_value=1.3; Accession=PF00560.23; Description=Leucine Rich Repeat
  Pfam annotation: Domain name=LRR_1; Domain location=333-355; Score =8.3; E_value=7.9; Accession=PF00560.23; Description=Leucine Rich Repeat
  Pfam annotation: Domain name=LRR_1; Domain location=357-379; Score =16.2; E_value=0.12; Accession=PF00560.23; Description=Leucine Rich Repeat
  Pfam annotation: Domain name=LRR_1; Domain location=381-402; Score =13.5; E_value=0.78; Accession=PF00560.23; Description=Leucine Rich Repeat
  Pfam annotation: Domain name=LRR_1; Domain location=407-431; Score =6.5; E_value=17; Accession=PF00560.23; Description=Leucine Rich Repeat
  Pfam annotation: Domain name=LRR_1; Domain location=433-455; Score =11.8; E_value=1.7; Accession=PF00560.23; Description=Leucine Rich Repeat
  Pfam annotation: Domain name=LRR_1; Domain location=457-479; Score =16.7; E_value=0.086; Accession=PF00560.23; Description=Leucine Rich Repeat
  Pfam annotation: Domain name=LRR_1; Domain location=481-503; Score =15.8; E_value=0.15; Accession=PF00560.23; Description=Leucine Rich Repeat
  Pfam annotation: Domain name=LRR_1; Domain location=566-588; Score =19.3; E_value=0.014; Accession=PF00560.23; Description=Leucine Rich Repeat
  Pfam annotation: Domain name=LRR_1; Domain location=590-612; Score =14.0; E_value=0.55; Accession=PF00560.23; Description=Leucine Rich Repeat
  Pfam annotation: Domain name=LRR_1; Domain location=614-636; Score =6.8; E_value=16; Accession=PF00560.23; Description=Leucine Rich Repeat
  Pfam annotation: Domain name=LRR_1; Domain location=72-94; Score=1.8; E_value=1.3e+02; Accession=PF00560.23; Description=Leucine Rich Repeat
  Pfam annotation: Domain name=LRR_1; Domain location=96-118; Score =6.6; E_value=16; Accession=PF00560.23; Description=Leucine Rich Repeat
  Pfam annotation: Domain name=Pkinase; Domain location=751-1023; Score= 126.0; E_value=1.1e-34; Accession=PF00069.15; Description=Protein kinase domain
  Pfam annotation: Domain name=Pkinase_Tyr; Domain location=751-1023; Score=74.4; E_value=3.6e-19; Accession=PF07714.7; Description =Protein tyrosine kinase
  Pfam module annotation: Pfam domain module=LRRNT_2::LRR_1::LRR_1::LRR_ 1::LRR_1::LRR_1::LRR_1::LRR_1::LRR_1::LRR_1::LRR_1::LRR_1::LRR_1: LRR_
  Pfam module annotation: Pfam domain module=Domain location=29-69::120- 140::142-163::165-188::189-211::213-235::237-259::261-283::309 -331::333-355::357-379::381-402::407-431::433-455::457-479::481
  Pfam module annotation: =614-636::72-94::96-118::751-1023::751-1023
MGGSRWLLHFLLVSVLLHVVRSLESQACHPADLRALLDFSGGWDSKAAGLVGWGPGAAACCSWTGVACDLGRVVALDLSNRSLHGVISPAVASLDGLAALNLSRNALRGAAPEALARLPRLRALDLSANALSGPFPAAGFPAIEELNISFNSFDGPHPAFPAAANLTALDVSANNFSGGINSSALCLSPLQVLRFSGNALSGEIPSGLSQCRALTDLSLDGNCFTGNVPGDLYTLPNLRRLSLQENQLTGNLGSDLGNLSQIVQLDLSYNKFTGSIPDVFGNMRWLESVNLATNRLDGELPASLSSCPLLRVISLRNNSLSGEIAIDFSRLPNLNTFDIGTNYLSGAIPPGIAVCTELRTLNLARNKLVGEIPESFKELTSLSYLSLTGNSFTNLASALQVLQHLPNLTSLVLTRNFRGGETIPVDGISGFKSMQVLVLANCLLTGVIPPWLQSLGSLNVLDISWNKLNGNIPPWLGKLDNLFYIDLSNNSFSGELPISFTQMRSLTSTNGSSERSPTEDLPLFIKRNSTGKGLQYNQVSSFPPSLILSNNLLVGPVLSSFGYLVKLHVLDLSWNNFSGPIPDELSNMSSLEVLNLAHNDLDGTIPSSLTRLNFLSMFDVSYNNLTGDIPTGGQFSTFAPENFDGNPALCLRNSSCAEKDSSVGAAGHSNKKRKAATVALGLGTAVGVLLLVLCAYVIVSRIVHSRMQERNPKAVANAEDSECSSNSCLVLLFQNNKELSIEDILKSTNNFDQAYIVGCGGFGLVYRSTLPDGRRVAIKRLSGDYSQIEREFQAEVETLSRAQHENLVLLQGYCKVGSDRLLIYSYMENGSLDYWLHERADDSGVLLDWRKRLRIAQGSARGLAYLHMSCDPHILHRDIKSSNILLDDNFEAHLADFGLARLICAYETHVTTDVVGTLGYIPPEYGQSPVATYKGDVYSFGIVLLELLTGRRPVDMCRPKGTRDVVSWVLRMKEEGREAEVFHPSIHHEDNQGQLVRILDIACLCVTAAPKSRPTSQQLVAWLDDIAEG

SEQ ID NO: 56346 - protein, 143 aa, Zea mays
  Coding DNA Sequence Number=SeqID_14567
MEEDLVDLVILGPRWIAESPKEDEGGESQKKDRDVGGCVDLGERLTEVESRRRRQPFEGTRRVCLLVWCIFFFCGFGVYSVTKLAPPLKIVGSTRMVVVDEEGPTVGVGGMSDNVGLIDDRGLIVSCAMLDVELWVGSTIVGR

SEQ ID NO: 56347 - protein, 136 aa, Zea mays
  Coding DNA Sequence Number=SeqID_14568
MAPHQHNPGPGQRPPVDASLIGSPRSMGSPWSANGRRDEYVRIPEEVEVASKGEGDAAAAIKAAVAAECPRVLRCRAIRWWAKVAVLGIFLAGAGAAAVVFLGPLVIKKECRINGGRAESHARSTLHHAARTDGRG

SEQ ID NO: 56348 - protein, 49 aa, Zea mays
  Coding DNA Sequence Number=SeqID_14569
  Gene Ontology: Mol. function=RNA binding; Cellular component=nucleus; Biological process=rRNA processing
  Homolog annotation: Hit_ID=Q6AT27; Match level="QueryCoverage=86%, HitCoverage=12%, E-value=1e-14, Identity=88%"; Hit description =Putative fibrillarin protein
MAKKRTNVIPIIEDVRHPARYQMLVGMVDVIFSDVAQPNQIRVSDASCA

SEQ ID NO: 56349 - protein, 113 aa, Zea mays
  Coding DNA Sequence Number=SeqID_14570
  Subcellular localization annotation: CTP_CleavageSite=43; ConfidenceScore=5.72e-01
MAYLSRTAAAVAVAVRSAVRSAPLTGRVLGAPLPSLASPSAARTAAAASAGLETLMPLHSAVAAARLRSCIVVDSSCWSSLSQGQVHIGATALGIRTSYTCEKNLNASSSSQN

SEQ ID NO: 56350 - protein, 128 aa, Zea mays
  Coding DNA Sequence Number=SeqID_14571
MRPPATKDAVLAKPSSTTEAPAPATEPVATRLDWYMELRMRKAALVLSRDGNSHGLVVAGLPRAKHESWDRESGSHQEGGEVTGEEEVAELTFFRFYQEKLLHAGGSGHSQRAGERVGISFTSPRRGC

SEQ ID NO: 56351 - protein, 225 aa, Zea mays
  Coding DNA Sequence Number=SeqID_14572
  Gene Ontology: Mol. function=protein dimerization activity; Cellular component=nucleus; Biological process=regulation of transcription, DNA-dependent
  Homolog annotation: Hit_ID=Q8S977; Match level="QueryCoverage=75%, HitCoverage=21%, E-value=2e-97, Identity=97%"; Hit description=Auxin response factor 8
  Pfam annotation: Domain name=B3; Domain location=160-225; Score=19.1; E_value=0.0005; Accession=PF02362.12; Description=B3 DNA binding domain
  Subcellular localization annotation: CTP_CleavageSite=54; ConfidenceScore=5.28e-01
MAPLAASGSGSATGTGTGKQQSWPTRSPVTSQSIHPDGGLEGGGQWTSGEKKCLNSELWHACAGPLVCLPTVGTRVVYFPQGHSEQVAASTNKEVDGHIPNYPNLPPQLICQLHDVTMHADVETDEVYAQMTLQPLNPQEQNDAYLPAEMGIMSKQPTNYFCKTLTASDTSTHGGFSVPRRAAERVFPPLDFTQQPPAQELIARDIHDVEWKFRHIFRGKFDKNP

SEQ ID NO: 56352 - protein, 111 aa, Zea mays
  Coding DNA Sequence Number=SeqID_14573
MVDGGATMVGGAGGRVCGRASSTAARRGAWRDDFVAPVDNRSSTSLGDEKLEGVEGPLVHTPSAQGPGRWLDAKTNVWQGWRAIAPHRWWSHGNGKASKTSRQSPLKDLKS

SEQ ID NO: 56353 - protein, 109 aa, Zea mays
  Coding DNA Sequence Number=SeqID_14574
  Subcellular localization annotation: CTP_CleavageSite=44; ConfidenceScore=5.19e-01
MKLFVNTQQAPTWRANYRLFETGGSLSRRVKCRRMPQPRWVGARLSAKGGSEAAGDRRERGGNPAAFVFVPRPGQVGRCGSSSEAEVESVFRGRGRVRAPGSGEAETVG

SEQ ID NO: 56354 - protein, 71 aa, Zea mays
  Coding DNA Sequence Number=SeqID_14575
MGMRCLRDGKWNKDYDVVPCVKRLNVISTCREIWLSGGYGCWSDLAVYLATGLDSRVGPYLGRRGAGGVMG

SEQ ID NO: 56355 - protein, 83 aa, Zea mays
  Coding DNA Sequence Number=SeqID_14576
MAGSRDNSDVSPSNSIEPTWETLPADEQLKFEEHKEQLIQEAKAKFLANFKVDMDPYPVNVIDFEGKRILIQTAWTIRAKARK

SEQ ID NO: 56356 - protein, 252 aa, Zea mays
  Coding DNA Sequence Number=SeqID_14577
  Gene Ontology: Mol. function=phospholipase A1 activity; Biological process=lipid metabolic process
  Homolog annotation: Hit_ID=Q6BTJ4; Match level="QueryCoverage=86%, HitCoverage=37%, E-value=3e-12, Identity=34%"; Hit description =Similar to CA1621|CaIFF6 Candida albicans CaIFF6 unknown function
MATPVDVVGPSPRLGEVEAPPRSRSSLSSEAEVESEPLGRARRSSSSFGAEPESEPWGRAKRSSSSSGAEPKSEPWGRAERSSSSSGAEPKSEPWGRVERSSPSSGAEPESEPWGRAERSSPSSGAEPKSEHWGQAERISPSSGAEPESEPWGRAERSSSSSGTEPESEPWGRAERSSPSYGAEPESEPWGWAKRSFLWRMRPDLAAVSLTLPSGTAVGAAQAALSSCQTGQWSGEVTTVTSALSTGGHASG

SEQ ID NO: 56357 - protein, 253 aa, Zea mays
  Coding DNA Sequence Number=SeqID_14578
  Gene Ontology: Mol. function=magnesium ion binding; Cellular component=membrane; Biological process=photosynthesis, light harvesting
  Homolog annotation: Hit_ID=Q41748; Match level="QueryCoverage=98%, HitCoverage=99%, E-value=6e-98, Identity=82%"; Hit description =Chlorophyll a/b-binding apoprotein CP24 precursor
  Pfam annotation: Domain name=Chloroa_b-bind; Domain location=63-242; Score=162.9; E_value=8.1e-46; Accession=PF00504.12; Description =Chlorophyll A-B binding protein
  Subcellular localization annotation: CTP_CleavageSite=44; ConfidenceScore=5.46e-01
MALASTSATAPAAVLKTPFLGARRALANAAAPKPAPRRALLAVAAAAAKKSWIPAFKSDAEFINPPWLDGSLKWTTSLRSAGEDKRPGFPQEYREAELIHGRWAMAAVMGIFVGQAWSGIPWFEAGADPSAIAPFSFGSLLGTQLLLMGWVESKRWVDFFNPDSQSVEWATPWSRTAENFANFTGDQGYPGGKFFDPLGLAGTVKDGVYVPDVEKLERLKLAEIKHARIAMLAMLVFYFEAGQGKTPLGALGL

SEQ ID NO: 56358 - protein, 139 aa, Zea mays
  Coding DNA Sequence Number=SeqID_14579
  Gene Ontology: Mol. function=magnesium ion binding; Cellular component=membrane; Biological process=photosynthesis, light harvesting
  Homolog annotation: Hit_ID=Q9XQB6; Match level="QueryCoverage=99%, HitCoverage=57%, E-value=6e-67, Identity=84%"; Hit description =Chlorophyll a/b-binding protein CP24
  Pfam annotation: Domain name=Chloroa_b-bind; Domain location=1-128; Score=63.6; E_value=6.2e-16; Accession=PF00504.12; Description =Chlorophyll A-B binding protein
MAAVLGIFVGQAWSGIPWFEAGADPGAIAPFSFGSLLGTQLLLMGWVESKRPSSGATPWSRTAENFANFTGDQGYPGGKFFDPLGLAGTVKDGVYVPDVEKLERLKLAEIKHARIAMLAMLVFYFEAGQGKTPLGALGL

SEQ ID NO: 56359 - protein, 282 aa, Zea mays
  Coding DNA Sequence Number=SeqID_14580
  Gene Ontology: Mol. function=binding; Cellular component=thylakoid; Biological process=photosynthesis
  Homolog annotation: Hit_ID=Q60D20; Match level="QueryCoverage=56%, HitCoverage=81%, E-value=3e-17, Identity=26%"; Hit description =Putative TPR domain containing protein, identical
  Pfam annotation: Domain name=TPR_1; Domain location=110-143; Score =5.8; E_value=1.1; Accession=PF00515.18; Description=Tetratricopeptide repeat
  Pfam annotation: Domain name=TPR_1; Domain location=144-177; Score =25.0; E_value=0.00026; Accession=PF00515.18; Description =Tetratricopeptide repeat
  Pfam annotation: Domain name=TPR_2; Domain location=110-143; Score =14.0; E_value=0.55; Accession=PF07719.7; Description=Tetratricopeptid e repeat
  Pfam annotation: Domain name=TPR_2; Domain location=144-177; Score =30.1; E_value=8e-06; Accession=PF07719.7; Description=Tetratricopepti de repeat
  Pfam module annotation: Pfam domain module=TPR_1::TPR_1::TPR_2::TPR _2; Domain location=110-143::144-177::110-143::144-177
  Subcellular localization annotation: CTP_CleavageSite=34; ConfidenceScore=5.49e-01
MAMAMPMAVARVTSLACAPRQAQHRRRHSLAPPCASGAVEVRVCTNRTCARQGGREVLAALAGLAPPAVDVASCGCLGRCGAGPNVAASVPGSAAVFGHVIGFNACGGLHLVYMSRSKARLEIGDIPGALGDAEEAIRIAPRFPQAHLLRGDALFAMGEYSVAEDAYADALDLDPSIRRSKSFRVKVTEMQHGYCLALSRCYIHFFVYEGCPSSKLHISDFRCTLPQLPLTVKQCLVGGMIPPFGAVWSVYVKRGLDSRLTLFLKDLFVLIIHVLVCSSSIA

SEQ ID NO: 56360 - protein, 343 aa, Zea mays
  Coding DNA Sequence Number=SeqID_14581
  Gene Ontology: Mol. function=hydrolase activity; Biological process =metabolic process
  Homolog annotation: Hit_ID=Q6ZDS0; Match level="QueryCoverage=75%, HitCoverage=81%, E-value=1e-120, Identity=84%"; Hit description =Putative CfxY protein
  Pfam annotation: Domain name=Hydrolase; Domain location=61-307; Score= 41.2; E_value=3.5e-09; Accession=PF00702.16; Description=haloacid dehalogenase-like hydrolase
  Subcellular localization annotation: CTP_CleavageSite=53; ConfidenceScore=5.18e-01
MRRGAFFLWMVYSLRRASQLDKRPLPLAPTPLRSILTPSRCLPLPSPSPPAPSASPALAAIHSSATDQPQAPRASAARPGSSWSPPRRLSRPSSLIATASYWSQSTSTAQAYNDAFANFGVRCPPGSADLLYWDEAFYDNLQNRIGGGKPKMRWYFGENGWPPSKIFETPPSTDSDKEKLVDIIQDWKTERYKEIINSGTVKPRPGVLQLMDEVKDAGIKLAVCSAATKSSVIMCLENLIGLERFNGLDCFLAGDDVKLKKPDPTIYITASEKLGVESKNCLVVEDSVIGLQAAKGAGMSCIITYTPSTASQDFKDAIATYPDLNNVRLEDLKLLLQKTLVTG

SEQ ID NO: 56361 - protein, 545 aa, Zea mays
  Coding DNA Sequence Number=SeqID_14582
  Gene Ontology: Mol. function=signal transducer activity; Cellular component=membrane; Biological process=response to light stimulus
  Homolog annotation: Hit_ID=Q7XIJ3; Match level="QueryCoverage=81%, HitCoverage=90%, E-value=8e-47, Identity=30%"; Hit description =Putative phototropic response protein family
  Pfam annotation: Domain name=NPH3; Domain location=171-406; Score =262.1; E_value=1.1e-75; Accession=PF03000.5; Description=NPH3 family
MCAFSGRLRTLVKQEKKKKKGGGRKEAVSINLAGGFPGGADGFELVARFCYNDGRVLLCTSNLPLLHCAAVSLEMTEEAFVNGLYYWTWGDVLAAVRSCEPFAAAADASGLLDRLISALFSKITGATPGPGPGTPNRSSSSCSSSPDTAGLRRSSSSANKTPDSMRPCAGREWWFDDMTSLSPPTVEKVMRVLGCYGVENKNLILTRFLLHYLRAATRRPPALEREGAALAGLAETAVHGVALVGGTAFSCRGLFWVLRIVSAVGLSRECRHKLERLMGLMLDQATLDDLLVSGDDGGGVYDVNLVMRLVRVFVASEEEADAPSERMRKVGRLVDKYLGEISPDQGLKVSKFLAVAESLPDSARDCYDGVYRALDIYLESHPALSLEERTTLCRCLNYEKLTLEACKDLAKNRRIPPGVAVQALASQQCKLHISEPGPGGSATAAAGKERRPDPSSCSQSQTPRRRVARRATRSVDLGRRSGGDDDEKELLRLNLQRMQSRVVELERACKEMKGQMSRMAKGKSLSLSFGSGAASCPPDRRQGLA

SEQ ID NO: 56362 - protein, 1040 aa, Zea mays
  Coding DNA Sequence Number=SeqID_14583
  Gene Ontology: Mol. function=magnesium chelatase activity; Biological process=chlorophyll biosynthetic process
  Homolog annotation: Hit_ID=Q10M50; Match level="QueryCoverage=70%, HitCoverage=56%, E-value=0.0, Identity=80%"; Hit description =Magnesium-chelatase subunit H family protein, expressed
  Pfam annotation: Domain name=CobN-Mg_chel; Domain location=588-1040; Score=157.9; E_value=2.6e-44; Accession=PF02514.7; Description =CobNMagnesium Chelatase
  Pfam annotation: Domain name=DUF689; Domain location=4-242; Score =228.5; E_value=1.5e-65; Accession=PF05093.4; Description=Protein of unknown function (DUF689)
  Pfam module annotation: Pfam domain module=CobN-Mg_chel::DUF689; Domain location=588-1040::4-242
MSAALAVTDEVALPIRAVGDLAAAAEVSREEVAVITQCAALVIKNVESLREQLVAEIRRVLKAGGRVLVQSPAPSSSQKPNTDIERKLLMGGFAEVQSSAASSQDSVQSVTVKAKKASWSMGSSFPLKKTTKALPKIQIDDDSDLIDEDSLLTEEDLKKPQLPVGRATKPVNLVQLPKKACKNCTCGRAEAEEKVGKLELTAEQINNPQSACGSCGLGDAFRCGTCPYRGLPPFKPGEKPGCLFLIETKDVDTDNLYIFPPPALPCSLLLLSLLCFRGTAAAKNNCPATSQEQAPYSSAMSSSLVSTPFAAAAQKQLLAAPVPLHSFLLSSRRQQPRRAGAIRCAVAGGNGLFTQTKPEVRRVVPADPRGLPRVKVVYVVLEAHSSTLTRAAPRRSRSWATFRADLADVNVFIGSLIFVEELALKVKAAAEKERDRMDAVLVFPSMPEVMRLNKLGSFSMSQLGQSKSPFFQLFKRSKSNSSNFADSMLKLVRTLPKVLKYLPSDKAQDAWLYILSLQFWLGGSADNLQNFLKMIAGSYLPVLRGAGIKYDDPVLYLDSGIWHPLAPTMYEDVKEYLNWLKDPNAPVIGLVLQRSHIVTGDDGHYVAVIMELEARGHIVWGAKVIPIFAGGLDFSGPTQRYLVDPITGKPFVNAVVSLTGFALVGGPARQDHPKAIAALQKLDVPYIVALPLVFQTTEEWLNSTLGLHPIQVALQVALPELDGKSHALHRRVEQLCTRAIRWAELKRKTKEDKKLAITVFSFPPDKGNVGTAAYLNVFSSIYSVLSDLKKDGYNVEGLPDTPEALIEEVIHDKEAQFNSPNLNVAYRMNVREYQALTSYASLLEENWGKPPGHLNSDGENLLVYGKQYGNVFIGVQPTFGYEGDPMRLLLSKSASPHHGFAAYYTFVEKIFQADAVLNFGTHGSLEFMPGKQVGMSDACYPDSLIGNIPNIYYYAANNPSEATVAKRRSYANTISYLTPPAENAGLYKGLKQLAELISSYQSLKDTGRGPQIVSSIISTAKQCNLDKDVPLPEEGRSSHQ

SEQ ID NO: 56363 - protein, 167 aa, Zea mays
  Coding DNA Sequence Number=SeqID_14584
  Gene Ontology: Mol. function=magnesium chelatase activity; Biological process=chlorophyll biosynthetic process
  Homolog annotation: Hit_ID=Q40001; Match level="QueryCoverage=99%, HitCoverage=42%, E-value=4e-52, Identity=65%"; Hit description =Protoporphyrin IX Mg-chelatase subunit precursor
MEIESLLPPCGVHVISEPPNAIETVATQVNIAALDRPEDGIISLPGILAATVGRDIEDVYRGSDKGILADVELLRQITEASRGAITAFVEKTTNSKGQNHGCSTKFIRADREKLRVLFGFLGECLKLVVQDNELGSGRGYWETSEENLDRLRELYSEVEDKIEGIDR

SEQ ID NO: 56364 - protein, 40 aa, Zea mays
  Coding DNA Sequence Number=SeqID_14585
MSRVFDDYYIMDCGIISVPEAWGVLSNDETMKSWHILKSA

SEQ ID NO: 56365 - protein, 325 aa, Zea mays
  Coding DNA Sequence Number=SeqID_14586
  Homolog annotation: Hit_ID=Q6QP51; Match level="QueryCoverage=64%, HitCoverage=81%, E-value=8e-11, Identity=32%"; Hit description =Putative growth-regulating factor 1
  Subcellular localization annotation: CTP_CleavageSite=41; ConfidenceScore=5.07e-01
MTTSKKASPSEGFNSRLRALGLRAHYWSEVRSLAPRKGSTAASSHSGSAPTTDQRLALEGFTAASDAERGMTLGLGLGFSPGKTTNSASPDPRARTRAQPPEDDELRFRPTLGLGLGLSPRKKTNSASPDPRARTRARPRKTTNSGLARPQGSDSALASADGLRLARPRGSDSGSAPEDDELRFARPQGSDSGSAPEDDELRIARPQGSDSGSAPEDDELRLARPQGSDSGSAPEDDELRLARPPGLGLSPGLSRRSPPRPTQGLGLDLGLGGQTRPRPRRSLHLARPKARTDHVTGGAIITLPQANSGYGEQDRRPIWLAPINK

SEQ ID NO: 56366 - protein, 498 aa, Zea mays
  Coding DNA Sequence Number=SeqID_14587
  Gene Ontology: Mol. function=transcription regulator activity; Cellular component=nucleus; Biological process=regulation of transcription
  Homolog annotation: Hit_ID=O80536; Match level="QueryCoverage=22%, HitCoverage=24%, E-value=3e-22, Identity=55%"; Hit description =Phytochrome-interacting factor 3
  Pfam annotation: Domain name=HLH; Domain location=316-365; Score =60.0; E_value=7.7e-15; Accession=PF00010.16; Description=Helix-loop -helix DNA-binding domain
MDNTIDRTGPGEELAELLWDRGPALRRAPPPFQPFTCSAAGSSRSQELKRHASDTTKASAFVTAVSVPLGTHDAGSGLGLAGLPVHDDDDAVPWLHCPVADDGDGDTAPLPPEFCAGLLSEYSEVAAPAPAFHAAATPPAEAAANKLAPPSAAGGGEGVLNFTFFSRPLQRPQAAAAPAAAAASNPVESTVVQAAANRLRSTPLFSEQRMAWLQPPKAPRTTAAAAAPPPPPLAPLLPDSRHGETVGTVAQPQPRSQPEARPPDAAAVTTSSVCSGNGGRSQLKRSRHLAADCSDLDDEPGATRRSAARSAKRCRTAEVHNLSERRRRDRINEKMRALQELIPNCNKVDKSSMLEEAIEYLKTLQLQVQMMSMGTGLCMPPAAMLLPAMQQQLLHHHPMAHFPHLGMGLGFGMGAAAGFDMLPFPCVAAGAHFPCPPGAMFGVPGQAMPSLPAAFAHMYGAGSGAGPAGQTEAADAAAPARPGEAEQGDQQVQHAKQT

SEQ ID NO: 56367 - protein, 83 aa, Zea mays
  Coding DNA Sequence Number=SeqID_14588
METLPAEEQLLFEERQEQLINETKAKFLADFKVDRDNKVVRLRATDLASLQPTTDTPNVWSTGTGAVKGECWVLTDKSEQPGD

SEQ ID NO: 56368 - protein, 51 aa, Zea mays
  Coding DNA Sequence Number=SeqID_14589
MGESDDDARTFKVVFTTTGEEQFRELVREKLRGFRRGLDDTLVVLTVVARA

SEQ ID NO: 56369 - protein, 558 aa, Zea mays
  Coding DNA Sequence Number=SeqID_14590
  Gene Ontology: Mol. function=nucleic acid binding
  Homolog annotation: Hit_ID=Q6ZK85; Match level="QueryCoverage=95%, HitCoverage=71%, E-value=1e-131, Identity=52%"; Hit description=RNA recognition motif (RRM)-containing protein-like
MTFPVCGKELATNCGGTKKQRLWGHLSSNMHLYVQPQERTREVKDDEAPKEVSGREKSSDVLPRSKHQTHSGHTIESSEATSRRRSNREWKGIGRKGNEKFPLRNVLTDILHGEDKRSQKSNEVRPPPSKQQNDRKRERDDETHQTKSKYLFIMKVQCEFRQFIFSKYYDLYNELVFFVNRRTPHHAPCLVMGASRRLLQFAVRDAVKAVQPTSTSAEPASKRLCSVVATTSTEHMRDRRSERSQDYLNDRRSERSQDNLSDRRSERTRPMLQVHGAALALRAAAEAAADSAKVRSTGSVFKRLGQGNVVKQPSRSREEKRDYEDFEPVTIADEHDSDQYVNNEESEEESGELTMADRVAGSGMYVDSSSEDDMDRDEGITRYQTSLSHDDTFSPFAEKKTVSAPCSVELETNAIRPSSVNDEEQPVPSTPTASKAVAISVDVNMVEPPSYATPKDVHVVEKPYVAPMNSNAASIATNAKELGHAEVQKDSQRSAPSVPVSYSTAHPMEDADSRTLYVNNVHFAATKDSLSRHFNKFGAVLKVVIVTNAATGQPTGSV

SEQ ID NO: 56370 - protein, 168 aa, Zea mays
  Coding DNA Sequence Number=SeqID_14591
AVLLAFVLQPFLDAVHSADADATITSGSRYYISSPGCLTFVLPLRMRRSPPRLHDACPCLLLPVLLDFLCLRAPIQRPPHSCADVEGALARPRGGYVTKRKLLYSGHHAPTDHLLHDRPRQDHRLPHPWAPLLLRCLRGYHCRSAQMDAHARVVLKINTPTFALGVTD

SEQ ID NO: 56371 - protein, 245 aa, Zea mays
  Coding DNA Sequence Number=SeqID_14592
  Gene Ontology: Mol. function=RNA-directed DNA polymerase activity; Cellular component=mitochondrion; Biological process=RNA-dependent DNA replication
  Homolog annotation: Hit_ID=UPI00004C1731; Match level="QueryCoverage =66%, HitCoverage=11%, E-value=1e-84, Identity=92%"; Hit description =UPI00004C1731 related cluster
  Pfam annotation: Domain name=rve; Domain location=71-223; Score=77.2; E_value=5.3e-20; Accession=PF00665.16; Description=Integrase core domain
  Subcellular localization annotation: CTP_CleavageSite=31; ConfidenceScore=5.26e-01
MTRPSPRRSRPYPRRPRLSPRLPRPPRVRHCASRKSGMGSCLIETGRPRTCNISTEESYPSIEPKLGDWRGAPSRSSCWVTKAPGGYTHLLVAIDKLSKWIEVRPLNSIRSEQAVAFFTNIIHRFGVPNSIITDNDTQFTDRKFRDFCEDHHIRVDWAAVAHPMMNGQVERANDMILQGLKPRIYNDLNKFDRRWMKELPSVVWSLRTTPSRATGFTLFFLVYGAEAILPTDLEYGSPRMKAYDD

SEQ ID NO: 56372 - protein, 75 aa, Zea mays
  Coding DNA Sequence Number=SeqID_14593
MAEQPEVVAEFVAAEIHGRKHGFGGDLLWRRRTGAGVTEGLTKWDPRNSGSSCGRARVLHYGCVLDSVDVLDILL

SEQ ID NO: 56373 - protein, 99 aa, Zea mays
  Coding DNA Sequence Number=SeqID_14594
  Gene Ontology: Mol. function=nucleic acid binding
  Homolog annotation: Hit_ID=Q3LRV2; Match level="QueryCoverage=76%, HitCoverage=32%, E-value=2e-27, Identity=72%"; Hit description=Gag
MENLKSSGNKQEDKTSSKEVKISGKPPYFDSEDYSMWSDKMRHHLTSLHESIWDIFEFGVQAPQVGDEDYDSSEAAQVRHFNSLATTILLASFCKEEYN

SEQ ID NO: 56374 - protein, 135 aa, Zea mays
  Coding DNA Sequence Number=SeqID_14595
MGKGNDCLEAPLMKKRTCGRLGRRVRRLSVGEVGASGSGQRTAAQGLCRVRRGVGSCGVGAGPWRVHVAGGRVLGVGRVGPPGGDRVRAGEEGWGQVDPAMRERRSGDDGLGKLGSGGWIRAARGCGHYMGVMGR

SEQ ID NO: 56375 - protein, 98 aa, Zea mays
  Coding DNA Sequence Number=SeqID_14596
MGPPWHVAVCLRAIIAKFESKCNEPGRGKFVAFAWAPPSAACTRAGDQRRVHARVWELWRRATVGGNGLLRGMPGVAAPWIVLGENAPAVGCRTGGRD

SEQ ID NO: 56376 - protein, 72 aa, Zea mays
  Coding DNA Sequence Number=SeqID_14597
MAWRHMATSHGGPAVFYALRRALVRHQGRRPGLICIEGWTTRHPDDAHDFRGGGYASARPAKTAARTRILLL

SEQ ID NO: 56377 - protein, 101 aa, Zea mays
  Coding DNA Sequence Number=SeqID_14598
MGDRTRRREETCARAGRGAARAAWGCRGESGLQVARVGTGGSLAAALVEQRPRDFWESSARASRGNIYARKQRMGIWGGQLWEAPCHSRLGRTREFRERRR

SEQ ID NO: 56378 - protein, 129 aa, Zea mays
  Coding DNA Sequence Number=SeqID_14599
MNVCELTLAVLTSSLGQEQKVPNSAYKLYKVDLLTNSLTTNSADQHRIGWSRLAQGLHRVGDVVTTQPRPTSGGRRSHDLLKSNLGRETNSRLARGQPQAGYGMMTRLMPTFRRRRRHNSSKANLRQKT

SEQ ID NO: 56379 - protein, 117 aa, Zea mays
  Coding DNA Sequence Number=SeqID_14600
  Subcellular localization annotation: CTP_CleavageSite=18; ConfidenceScore=5.09e-01
MQPTCNRAKWTRFSDSRHASMEAQAHTSSGRRFAFAVITAPKKGPGKGDTPKRILPREGTRLRASLLIRGSKAGPPKGSTAASDRVGPTPTTGQRFEGRPPEGFHGRLRLPGLRAHY

SEQ ID NO: 56380 - protein, 581 aa, Zea mays
  Coding DNA Sequence Number=SeqID_14601
  Gene Ontology: Mol. function=hydrolase activity; Cellular component =nucleoplasm; Biological process=mRNA polyadenylation
  Homolog annotation: Hit_ID=Q84JJ2; Match level="QueryCoverage=99%, HitCoverage=86%, E-value=0.0, Identity=82%"; Hit description =Putative cleavage and polyadenylation specifity factor protein
  Pfam annotation: Domain name=RMMBL; Domain location=309-351; Score =61.4; E_value=3e-15; Accession=PF07521.2; Description=RNA -metabolising metallo-beta-lactamas
MPPRFRTSWRRCFVQTTFKGRVFMTHATKAIYKLLLSDYVKVSKVSVEDMLYDESDIARSMDKIEVIDFHQTLEVNGIRFWCYTAGHVLGAAMFMVDIAGVRILYTGDYSREEDRHLRAAELPQFSPDICIIESTYGVQQHQPRIIREKRFTEVIHNTVSQGGRVLIPAFALGRAQELLLILDEYWSKHPELHKIPIYYASPLAKRCMAVYQTYINSMNERIRNQFAQSNPFHFKHIESLNSIDNFHDVGPSVVMASPGGLQSGLSRQLFDKWCTDKKNACVIPGYVVEGTLAKTIINEPREVTLANGLTAPLHMSVHYISFSAHADFPQTSNFLDELRPPNIILVHGEANEMSRLKQKLITQFDGWQNKYQKGGESSSGLLVKKGFTYQIMAPEDLRVFTQLSTANIIQRIAVPYSGSFEVIRYRLKQIYESVESATEESDVPTLIVHERVTVRLDSESYVTLQWSSDPISDMVSDSVVAMVLNIGREGPKVVPVEEAVKTKEETEKAALKVVYALMTSLFGDVKVAEEGKFVISVDGNVAHLDGRSGDVECENATLKERIKTAFRRIQGAVRPIPLSAS

SEQ ID NO: 56381 - protein, 114 aa, Zea mays
  Coding DNA Sequence Number=SeqID_14602
MGFNYAHRSAVDVVIVDVLLRYITHLDWPCRLPCQPCRPHTRQRARRRTCVRRWSALTQTASEHGGQEPLPGRLRSHGHKLMPRLQYISGGGRMRDSDRDAIFCFCCSMFEWVQ

SEQ ID NO: 56382 - protein, 196 aa, Zea mays
  Coding DNA Sequence Number=SeqID_14603
  Homolog annotation: Hit_ID=Q84T74; Match level="QueryCoverage=82%, HitCoverage=85%, E-value=4e-56, Identity=72%"; Hit description =Expressed protein
  Pfam annotation: Domain name=UPF0131; Domain location=38-149; Score =13.0; E_value=0.00014; Accession=PF03674.5; Description =Uncharacterised protein family (UPF0131)
  Subcellular localization annotation: CTP_CleavageSite=51; ConfidenceScore=5.06e-01
MAGHPLRGPLVRGPDRHRTHPPATKQRTTLVFTYGTLKRGFSNHRLLEELFASGDASLVGPAVTSARLPLVCGPYRVPFLLNLPGAGAGAHRVRGEAYAVTARGLARLDELEGVETGHYERLAVAVDLEGGRRGGCDRLLRAPELRQRHVAAQRGEGRPRVHPRRGGRVCPAQGPAAGADVPGADPDLQFVSSQSA

SEQ ID NO: 56383 - protein, 376 aa, Zea mays
  Coding DNA Sequence Number=SeqID_14604
  Gene Ontology: Mol. function=snoRNA binding; Cellular component =nucleus; Biological process=chromosome segregation
  Homolog annotation: Hit_ID=Q8W4D9; Match level="QueryCoverage=99%, HitCoverage=73%, E-value=1e-120, Identity=60%"; Hit description=SOF1 protein-like protein
  Pfam annotation: Domain name=Sof1; Domain location=285-372; Score =167.8; E_value=2.8e-47; Accession=PF04158.5; Description=Sof1-like domain
  Pfam annotation: Domain name=WD40; Domain location=203-241; Score =38.1; E_value=2.9e-08; Accession=PF00400.22; Description=WD domain, G-beta repeat
  Pfam annotation: Domain name=WD40; Domain location=246-284; Score =19.2; E_value=0.015; Accession=PF00400.22; Description=WD domain, G -beta repeat
  Pfam annotation: Domain name=WD40; Domain location=96-130; Score=1.8; E_value=23; Accession=PF00400.22; Description=WD domain, G-beta repeat
  Pfam module annotation: Pfam domain module=Sof1::WD40::WD40::WD40; Domain location=285-372::203-241::246-284::96-130
MVIFLYHVALTAHRGILVSTGFPYVSSCFTSLNVFDSGKFRCLKWWILVSVLEIIPRHPSAVYTWKHAFWGADHQWDGNLFATVGAQVDIWDPDRSEPINSFEWGKDTVLSVRFDPGDSNILITSGRGFEGVAAGCCATVLRHNSTHGDRSLTLYDLRMSSPARKLIMKTRCNSVCWNPREPMNFTAANEDTNCYSFDARKLDEAKIVHKGHVSAVMDIDYSPTGREFVTGSYDRTVRIFNYLGDHSREIYHTKRMQRVFCVKYTYDGTYLVSGSDDTNLRLWKSKASEQLGVLLPRERKKQEYQDALKERYKHLPEVKRIVRHRHLPKPIYKAANLRRTMIEAESRKEERRRKHSAPGSMPVQPFRKRRIIREVE

SEQ ID NO: 56384 - protein, 162 aa, Zea mays
  Coding DNA Sequence Number=SeqID_14605
  Homolog annotation: Hit_ID=Q84T58; Match level="QueryCoverage=61%, HitCoverage=26%, E-value=9e-14, Identity=43%"; Hit description =Expressed protein
MTTSMCDFSLIAGIYKTTFAKTMIKNLTYQESCVSVISGMFNGCLKRIISVRLGPFSFLFLDLKYDTIESTYNTKHAVPRRESPWKVDVESSGVPAKLRLLEQELLNLEKKVKPKRICILCSKTSDPCDSRIYLRSLKHERQTEFFAGNGFNLWHRATGKRA

SEQ ID NO: 56385 - protein, 154 aa, Zea mays
  Coding DNA Sequence Number=SeqID_14606
  Subcellular localization annotation: CTP_CleavageSite=17; ConfidenceScore=5.14e-01
MSEKDCGRSGPKARTVRSAKQQSGLRRRQSSDPLVDREQSALKARTTRTTSSDEEGRRGGGPAGRSAFLGNDWAWDDGLGEEDGSDWTTVAWATSAKRMAATGCVLRQGCVLRRGCALRRGNDWDAKRTTVAWASRTDLAYGGLAGGVRQNICG

SEQ ID NO: 56386 - protein, 70 aa, Zea mays
  Coding DNA Sequence Number=SeqID_14607
MGFSAGSTVASVSRGYSVHVLVRGRGSELILEVGEGLHQHTLQEDELGDGVARPGGIVGVEEEGQLVLAT

SEQ ID NO: 56387 - protein, 90 aa, Zea mays
  Coding DNA Sequence Number=SeqID_14608
  Gene Ontology: Mol. function=ATPase activity, coupled to transmembrane movement of ions, phosphorylative mechanism; Cellular component=membrane; Biological process=metabolic process
  Homolog annotation: Hit_ID=Q8RW27; Match level="QueryCoverage=62%, HitCoverage=6%, E-value=1e-11, Identity=60%"; Hit description=Plasma membrane H+-ATPase
MGGPFSSIVGALGPCYPVPRGAAPSAMEAFEHGLLPIQKLVFLEEHKCEIVQMLQTRKHICGMTGHRVNDALDLKIADIGIVVADATDTA

SEQ ID NO: 56388 - protein, 389 aa, Zea mays
  Coding DNA Sequence Number=SeqID_14609
  Gene Ontology: Mol. function=protein dimerization activity; Cellular component=endoplasmic reticulum; Biological process=proteolysis
  Homolog annotation: Hit_ID=Q8H3C9; Match level="QueryCoverage=96%, HitCoverage=97%, E-value=1e-147, Identity=64%"; Hit description =Putative IAA amidohydrolase
  Pfam annotation: Domain name=M20_dimer; Domain location=176-284; Score=32.7; E_value=1.3e-06; Accession=PF07687.4; Description =Peptidase dimerisation domain
  Pfam annotation: Domain name=Peptidase_M20; Domain location=107-371; Score=187.0; E_value=4.4e-53; Accession=PF01546.18; Description =Peptidase family M20M25M40
  Pfam module annotation: Pfam domain module=M20_dimer::Peptidase_M20; Domain location=176-284::107-371
  Subcellular localization annotation: CTP_CleavageSite=23; ConfidenceScore=5.06e-01
MAPPPWPLLATSLLLILFHHSPRAAVAFPPSLGDSLLGAARAPGFAAWLRGLRRRIHERPELAFQEHRTSELVRDELDAIGVPYAWPVAQTGVVATIAGGSDGPVVALRADMDALPLQELVDWEHKSKESGKMHACGHDAHTTMLLGAAKLLHARKDDLKGTVKLVFQPGEEGYGGAYHVLREGRFRVTVTGKGGHAAGPQDAVDPIVAASSAIVSLQLLVAREIDPLQAAVVSVTFMKGGDAYNVIPESASFGGTFRSLTTEGFSYLMKRIKEEKLRPYPATVNDEGMYRHAREVAEAMLGQDKVSVGAQMMGAEDFSFYAEKFAGAFFMIGVRNKSMEEAMRPLHSPYFVIDEDVLPVGAAFHSAVAMEYLNKYSTTRQTELLRIEL

SEQ ID NO: 56389 - protein, 83 aa, Zea mays
  Coding DNA Sequence Number=SeqID_14610
MERVGAETDEDGGRRGSRRGQGATRGVRRGRAWSEASKTGRTRTRGATSRGWGLDRNFWGRDEFGPGKQDRGTRYEAWDKTTA

SEQ ID NO: 56390 - protein, 160 aa, Zea mays
  Coding DNA Sequence Number=SeqID_14611
MAAWVLGLQLSSGQGDRGRRQRGAGRQPHYKQGMESFCPSPLLRLKPQAATGHRASAPAGQRKKKNGYPSSGYPYPTRDFRYPFRVPIPFSSLCMQRKQEHSSDREGWGESSGRDDDGGGGGQGLEDASPPLDTAICRAMANGRSSRSETQSTVLKFGST

SEQ ID NO: 56391 - protein, 212 aa, Zea mays
  Coding DNA Sequence Number=SeqID_14612
  Homolog annotation: Hit_ID=Q75LK0; Match level="QueryCoverage=78%, HitCoverage=77%, E-value=5e-29, Identity=42%"; Hit description =Putative harpin inducing protein
  Pfam annotation: Domain name=Hin1; Domain location=38-178; Score =102.2; E_value=1.6e-27; Accession=PF07320.4; Description=Harpin -induced protein 1 (Hin1)
MCGCWYDCCGKVKDWLIFLAIVIGLAIAAAVVIVILIFGGPLRHVKISVEDASLTRFALVTTPTTALAYNLTLALAIRNPNWAIGIKHDKPLEAAYSFDGQPFERVQVADKGEKQGARKTVVYHLASSSDARGVALGNAGEAEFRKENATGLFEVEVAVTGKFKYTLRKTKCKIEATCPLKLQLATPGAATSSSVVFQKVDCEVAKSDDKYC

SEQ ID NO: 56392 - protein, 356 aa, Zea mays
  Coding DNA Sequence Number=SeqID_14613
  Gene Ontology: Mol. function=protein dimerization activity; Cellular component=endoplasmic reticulum; Biological process=proteolysis
  Homolog annotation: Hit_ID=Q8H3C9; Match level="QueryCoverage=87%, HitCoverage=68%, E-value=1e-131, Identity=71%"; Hit description =Putative IAA amidohydrolase
  Pfam annotation: Domain name=M20_dimer; Domain location=137-241; Score=30.6; E_value=5.5e-06; Accession=PF07687.4; Description =Peptidase dimerisation domain
  Pfam annotation: Domain name=Peptidase_M20; Domain location=40-347; Score=165.4; E_value=1.4e-46; Accession=PF01546.18; Description =Peptidase family M20M25M40
  Pfam module annotation: Pfam domain module=M20_dimer::Peptidase_M20; Domain location=137-241::40-347
MDPFFFGYSSSSSVTTVRNSILLCWTSNFRNKLPPEDSEVKELVDWEHKSQESGKMHACGHDVHTTMLLGAARILQDRKSDLMGTVKLVFQPAEEGQGGAYYVLQEGVLDDASAIFGLHVDPALPVGVVSSRPGPFAATSGRFLATVTGKGGHAAMPHESIDPVVAAATTVVSLQKIISREIDPLQGAVVSVTFLKGGEAYNVIPENVAFGGTMRSMTNEGLSYLKKRIKEIVEGQAAVHHCSASVDFMEDTMKPYPAVVNDEGMYAHAKEVAEGLLGEKNVRVGPQVMGAEDFGFYAQRMAGAFFTIGVGNASTMATIHSTHSPHFVVDEDVLPVGAAFHAAVAIEYVRKNRAST

SEQ ID NO: 56393 - protein, 123 aa, Zea mays
  Coding DNA Sequence Number=SeqID_14614
MNTRPVVLVFLLLVLVITSQFEWKQQIGEAADADPAAARRRQQLHAREDAVKEKVLAKSAPFPLYPSVCALVVKDIENLSIDSYVQLQYVDFYFHFRSKDNLLSKWEYFLENQVPFSRFKGAL

SEQ ID NO: 56394 - protein, 124 aa, Zea mays
  Coding DNA Sequence Number=SeqID_14615
MGRPKGRTYCIDRTNLYSQQQGLSQSHPIPASSGATYYIYSSKYAASERQLGMSSIVGWAPGILARNLIFGPSPGAKPENGTIRYVLISKQGAVHEEDQEQTPETAIEDLPVAPAIEGKPQFYA

SEQ ID NO: 56395 - protein, 72 aa, Zea mays
  Coding DNA Sequence Number=SeqID_14616
MATLTKGVILIFQRGPVQPAILPEPYLRSVIDQKVNWDAKVIDWKVAGFAPEEFRVQLYLLMGIPKQNNSLL

SEQ ID NO: 56396 - protein, 292 aa, Zea mays
  Coding DNA Sequence Number=SeqID_14617
  Gene Ontology: Mol. function=molecular_function; Cellular component =cellular_component; Biological process=biological_process
  Homolog annotation: Hit_ID=Q67UK2; Match level="QueryCoverage=82%, HitCoverage=97%, E-value=1e-128, Identity=89%"; Hit description =Putative leucine zipper protein
  Pfam annotation: Domain name=DUF298; Domain location=172-287; Score =223.8; E_value=3.9e-64; Accession=PF03556.6; Description=Domain of unknown function (DUF298)
  Pfam annotation: Domain name=UBA; Domain location=53-93; Score=23.8; E_value=0.0006; Accession=PF00627.21; Description=UBATS-N domain
  Pfam module annotation: Pfam domain module=DUF298::UBA; Domain location=172-287::53-93
MKFRAWCHIQSKNIVGIKWMFHKKQDEYGVVTRNKSRLMAKCYAKLQHKLGRGSRDKVQQFMAITGASEKAALQALKASDWHLEGAFDVFYSQPQIAVANTRHLEELYNRYKEPDADMIMVEGISQICNDLQVDPQDIVMLVISWHMKASTMCEFTRQEFIGGLQSIGVDSIEKLQAKLPSLRAELKDDQKFHEIYNFAFAWAREKGQKSLALETAIGMWQLLFAERSWPLIDYWCQFLQVRHNKAISRDTWAQLLEFVKTIDPQLTNYDEEGAWPYLIDEFVDYLKENGLA

SEQ ID NO: 56397 - protein, 440 aa, Zea mays
  Coding DNA Sequence Number=SeqID_14618
  Gene Ontology: Mol. function=metal ion binding
  Homolog annotation: Hit_ID=Q6Z2U9; Match level="QueryCoverage=50%, HitCoverage=97%, E-value=4e-67, Identity=64%"; Hit description =Putative NEP1-interacting protein
  Pfam annotation: Domain name=zf-C3HC4; Domain location=339-380; Score= 21.0; E_value=0.001; Accession=PF00097.15; Description=Zinc finger, C3HC4 type (RING finger)
MSKTPAEPLRARAVSLPSSDVFGTSGQAARLIRNKCWGRAAERPYVRLRPLDYVTSSGPRGSIGSPPEREQKRTPHGSDTCRLWTSRLAFNKVRLFFVPESRDPVGSGTFPWGSGPTADILEDIIFSGHVAAPEPSVWWGQALFVTRLEIAASSRDDMELAEAPAPVPDEDGLDERGVALHLPRLLAGVVSGALTGIFALGTCTVALTCASSFRLPFALLASDSGGVLRGAGLGAVAGAVLSIEVLEASRAYWCSSDRLGSHGGASSMADFIEQLLRARFVQEQFTASGYASYRWQDDLYDIFGDISSEGLSQESLKKLPHHVVSDHQTRDLLGEILCCPICLQDIVAGETARRLPGCSHAFHQPCVDRWLVGHGSCPAPGAVPPVSAIFLLSSFLRMQTLGLASGVGEQVYRTESSASDQSVKQPKIECPYPPKQTPSR

SEQ ID NO: 56398 - protein, 210 aa, Zea mays
  Coding DNA Sequence Number=SeqID_14619
  Gene Ontology: Mol. function=DNA binding; Cellular component=nucleus; Biological process=regulation of transcription, DNA-dependent
  Homolog annotation: Hit_ID=Q4TUZ8; Match level="QueryCoverage=47%, HitCoverage=96%, E-value=3e-33, Identity=74%"; Hit description =Knotted 1-type homeobox protein 3
  Pfam annotation: Domain name=KNOX1; Domain location=73-134; Score =56.5; E_value=9.1e-14; Accession=PF03790.4; Description=KNOX1 domain
  Pfam annotation: Domain name=KNOX2; Domain location=142-193; Score =84.4; E_value=3.4e-22; Accession=PF03791.4; Description=KNOX2 domain
  Pfam module annotation: Pfam domain module=KNOX1::KNOX2; Domain location=73-134::142-193
  Subcellular localization annotation: CTP_CleavageSite=41; ConfidenceScore=5.34e-01
MEDLSDLGGHGHPGAAAWRPAAPSLASSSKVSVQVYTVPSSAATGREARGQGVAPMMHASSVAGHGGRAADLDPVKAKIVSHPSYHRLLAAFLDCHKARAPIDDPSTLARARAHVGCPPEAAEEIAAVAREREAWQRAAAGDVAHTRPDPELDQFMESYCELLVTWKEELTRPLREAEEFLTTVEAQLNSITNTGPTMGAFISSAAAAGD

SEQ ID NO: 56399 - protein, 236 aa, Zea mays
  Coding DNA Sequence Number=SeqID_14620
  Homolog annotation: Hit_ID=Q93ZR2; Match level="QueryCoverage=48%, HitCoverage=29%, E-value=2e-12, Identity=44%"; Hit description =Putative storage protein
  Subcellular localization annotation: CTP_CleavageSite=66; ConfidenceScore=5.22e-01
MQLRCYVFPWSGAGAAGGGGAAADDDDGNSTVVSAAVSVRTSRQQQNSTRQAKCTPLQRPSGGTPSASCTPAYVVAPYDYVFLWEWDEDVDATLASSTPTSTCPSSGATPRGGKRPTTSSSGGPRAGEVLHRNTVGGPGNCSDLHRPPCSGFVEVIAPVFTRELRRGPACGSTWCRTTSCSARLGPGPQLLEGRVSLSVKPYPHNMQSLGFEPGIFRLQTVGSTAAPGPPFIIQIR

SEQ ID NO: 56400 - protein, 219 aa, Zea mays
  Coding DNA Sequence Number=SeqID_14621
MASSRIKGGAAVEAAIIQLAGVYHVDIIGTVRYEQATKDPGVQQVEVAEQELIEGKLDLRVNSKDDGFYSQKAEGVLRKTTIAKGDEDEAGRISGGARSRTAAELYRRRIQAQGAWRQGSSDGLEEPARVAQLGGDVGTAISACVRAVRAGERLKEEGEGLASGARGTMAQTSERRSSRSADRATPPNSEREKGKRGAGQRRQAGPTCQRPKARGRSWA

SEQ ID NO: 56401 - protein, 437 aa, Zea mays
  Coding DNA Sequence Number=SeqID_14622
  Gene Ontology: Mol. function=protein serine/threonine kinase activity; Cellular component=chloroplast; Biological process=protein amino acid phosphorylation
  Homolog annotation: Hit_ID=P27450; Match level="QueryCoverage=73%, HitCoverage=78%, E-value=1e-117, Identity=62%"; Hit description =Probable serine/threonine-protein kinase Cx32, chloroplast precursor
  Pfam annotation: Domain name=Pkinase; Domain location=90-372; Score =164.6; E_value=2.5e-46; Accession=PF00069.15; Description=Protein kinase domain
  Pfam annotation: Domain name=Pkinase_Tyr; Domain location=90-372; Score=137.0; E_value=5.2e-38; Accession=PF07714.7; Description =Protein tyrosine kinase
  Pfam module annotation: Pfam domain module=Pkinase::Pkinase_Tyr; Domain location=90-372::90-372
  Subcellular localization annotation: CTP_CleavageSite=33; ConfidenceScore=5.69e-01
MGNCASAIDAFVQRGNRASPAATAGMSASRRTSSSATTGKLSTLSSASTFMPSTVSGGDDDDDDPVGQILESPNLKIYTFAELKSATRNFRPETVLGEGGFGKVYKGWVDEKTMNPSKASTGVMVAVKKLNPESVQGMEQWQSEVNFLGRISHPNLVRLLGYSMDDNELLLVYEFMAKGSLENHLFRRGAVYEPLPWSLRLKILIGAARGLAFLHSSERQIIYRDFKASNILLDSHFNAKLSDFGLAKHGPDGGESHVTTRVMGTYGYAAPEYVSTGHLYVKSDVYGFGVVLLEMISGLRALDPSREREKVNLVNWARPLLSDRRKLSQLMDGGLEGQYNPKAALLAAQLTLRCLNGDPKRRPSMKEVVEALEKIESSAKGRMAREPRNSSRRGLVQSPRGDSARNNSSSRGRIKFEILCDKIVELLEAVIMVLYKC

SEQ ID NO: 56402 - protein, 104 aa, Zea mays
  Coding DNA Sequence Number=SeqID_14623
  Subcellular localization annotation: CTP_CleavageSite=49; ConfidenceScore=5.02e-01
MSSSSSSAASASPATPSFEETLSNLAVVELQPGHTVEFGTSRIFLGHVLEMQRLGYFGNGVGRAPGAEEVPEPEGELIVFEAFFAAGLRLPTHWFVVEVLRKFE

SEQ ID NO: 56403 - protein, 77 aa, Zea mays
  Coding DNA Sequence Number=SeqID_14624
MALGVDGKGEKGEGLARVYRGEAQPKALMKTRKSRWVPGVRKVRTWTCAVKAEIPVRVGSSEEKQLTARSKSQWRRE

SEQ ID NO: 56404 - protein, 106 aa, Zea mays
  Coding DNA Sequence Number=SeqID_14625
MAPLARRSLHQRSIGRRAVPAGSVVLAVDVVHAKAQAPPSLRQAEAKIINDFEDRMTEATKATRLCVPRCEKVPVCNLAHVVGPRPQIAMFPKFREYGSLISPFTV

SEQ ID NO: 56405 - protein, 88 aa, Zea mays
  Coding DNA Sequence Number=SeqID_14626
MELNTTTRDVMDEVVVQAHDDYSFLAHRSIFVYCVFLGGSLIAWKIKKQLAVSLFEYRELQLASFFTKAETRSQHRFYPSKLTLVDLP

SEQ ID NO: 56406 - protein, 107 aa, Zea mays
  Coding DNA Sequence Number=SeqID_14627
MAREQVARELALVPSSAAPETKDEVSAVATEATVLQAGGAVTEPSEGSSDDNDDIDIEEDNTIIRPTKSSDVDFGKSKIKGGHIEVLTKFDYIDNVEWVWLGVIIYY

SEQ ID NO: 56407 - protein, 130 aa, Zea mays
  Coding DNA Sequence Number=SeqID_14628
MGLGSERDAEGRAERRGELEVRAATREEAARGKELGPSSRHGEAEQPVTFHGRRLRRGAAGEGQRELGNGARASRRSGRGWGEPGMELMPARKKTQGAVGARREREEQNTVGYLKNPGRDAGDSAMDSEA

SEQ ID NO: 56408 - protein, 140 aa, Zea mays
  Coding DNA Sequence Number=SeqID_14629
  Subcellular localization annotation: CTP_CleavageSite=13; ConfidenceScore=5.18e-01
MAAIVKLGLALCRAPSSVPGAREVYSPAHVFFLAVPLFPMASVLPLPWPPSTLQSSLLAGALYRAQPSPLLSPSAAALQLAVPACCSPQLPAMASARAPARCVPSSLFRVCVLGSLFCAPSILLPLVPARLRSARIQSCT

SEQ ID NO: 56409 - protein, 69 aa, Zea mays
  Coding DNA Sequence Number=SeqID_14630
MWCISIGSRFATQKVIKNIIAEDPKGGISGWGTPPVSRGRPWRGYRLGSPWLFAVPAPKPPFSGSRPVS

SEQ ID NO: 56410 - protein, 146 aa, Zea mays
  Coding DNA Sequence Number=SeqID_14631
  Homolog annotation: Hit_ID=Q6F3C6; Match level="QueryCoverage=31%, HitCoverage=21%, E-value=4e-07, Identity=51%"; Hit description =Putative C3HC4 type RING zinc finger protein
  Pfam annotation: Domain name=zf-C3HC4; Domain location=73-116; Score =23.0; E_value=0.00066; Accession=PF00097.15; Description=Zinc finger, C3HC4 type (RING finger)
MAAVVCLAVLIVAIVAAAAGACELPVARAAAVHDVEQALGPGTLMPYGQAKAAAGKTGSASPGGVGEEEAPCCAICLSEYAEGDEMVRVLPACGHFFHADCRIDWWLRQRGTCPVCRGGLLPLPPRPECPLMPPRPAGAAVVRGRG

SEQ ID NO: 56411 - protein, 885 aa, Zea mays
  Coding DNA Sequence Number=SeqID_14632
  Gene Ontology: Mol. function=translation initiation factor activity; Cellular component=cytoplasm; Biological process=stem cell maintenance
  Homolog annotation: Hit_ID=Q69UP6; Match level="QueryCoverage=99%, HitCoverage=83%, E-value=0.0, Identity=43%"; Hit description =Putative leaf development protein Argonaute
  Pfam annotation: Domain name=DUF1785; Domain location=213-271; Score =27.9; E_value=3.6e-05; Accession=PF08699.1; Description=Domain of unknown function (DUF1785)
  Pfam annotation: Domain name=PAZ; Domain location=279-421; Score =85.8; E_value=1.3e-22; Accession=PF02170.12; Description=PAZ domain
  Pfam annotation: Domain name=Piwi; Domain location=534-854; Score =314.0; E_value=2.7e-91; Accession=PF02171.8; Description=Piwi domain
  Pfam module annotation: Pfam domain module=DUF1785::PAZ::Piwi; Domain location=213-271::279-421::534-854
MDFNGNGRDEANPSGSEAGNHNEHRGDDPSRVGQSLPADIRQNGQPTLGEEITAPLWEEFEALGIHVRRSEPVFPPRPGYGAAGTPYVVRANLFLGRLVDEALHQYNVTISPEPTPKAAYREIMTKLLSENQHTDFDGRFSVYDDGDSLFTAGALPFDTKEFEVPLSAGGDEKMDRKYKVMINHAATISLLQLRMLLAGYPTDIPAQALVVLDTVLRDVFNERNDMECVVIDKKDRTLGVDAWKGLYLSIRPTQNCLSLIADVSSSVFVQPLLLIEFVQKILKIDAVDRNLTKPEYDKLLKALRGVRIQVTHRDNRRRVWSKKKDNRRQLSTYRVAGLSVNPTNDLSFESKVGVTTTVIDYFREIYGLELKYKYLPCVNAGSEQDPIYFPIEVCKIAPKQCYQKKLEGSQFSTPRKSAWIHPEAEQSCPQLKYDDSVSQKTWFPLDGYWNMKDKKVINGAKIRNWACLNFCEDLSKEDIKKFCFKLAEMSRITGLDFADLKLPIFTARPDRVEDGIRRCYQEAKNKLRDQKIDLLLAILPDKKDSLYGNIKRICETDIGLVSQCCRRSRVLVNNNQILANIAIKINAKVGGRISVFDDVQKSLPVVSNKPTIIFGAHVSHPSVVDGSTGPSIASVVASQDWHEVSKYNGVVRAQGHTEEIGGLEDIVKELLHAFANESKEKLQQLIFYRDGISEGQFNRILEKEIPAIEKAWNALYDNEKPQITFVVVQKRHKLRLFPVDDNYKIRSAKKKIVEPGTVVDSEICHPAEFDFFLCSQSGGIKGPRRPVRYLVLRDDNNFSADELQALTNNLCYTFLTVCPVLSLISYSGGNRSLSVAPPAYYAQKLAHRARVYLAKGSDNNAAAANGGRKQIPEIKNELKGSMFYC

SEQ ID NO: 56412 - protein, 55 aa, Zea mays
  Coding DNA Sequence Number=SeqID_14633
MVSTEDPRPLPGARVTRMAQVSDDGTQGSVAGGGGPPAKRVLAQEWSSSVQTGTS

SEQ ID NO: 56413 - protein, 155 aa, Zea mays
  Coding DNA Sequence Number=SeqID_14634
  Gene Ontology: Mol. function=metal ion binding
  Homolog annotation: Hit_ID=Q5VMB7; Match level="QueryCoverage=39%, HitCoverage=28%, E-value=7e-07, Identity=54%"; Hit description=EL5 -like
MSLDTTSAIAVAAAAALAALIVAIVAAASAGACGGPPGGAAAVHDVERALGDATLMTYEQARAAARKSAAADEEAPRCALCLSEFAGGRAGELVRVVSACGHFFHAECGVDAWLRARGDVPALPGRGVGDTAAPRVPAVAGAIRRRHCGLALVRQ

SEQ ID NO: 56414 - protein, 179 aa, Zea mays
  Coding DNA Sequence Number=SeqID_14635
  Homolog annotation: Hit_ID=Q6H7Q8; Match level="QueryCoverage=77%, HitCoverage=23%, E-value=3e-35, Identity=60%"; Hit description =Tubulin-specific chaperone C-like protein
MALLRPRQEAFEHGLLPIPKLIFPEGMLAQTLAQLKEKLAASVPDGRMRAAALAEAQQIPQEQAALALGTLTAVLPAEDPVLGDGAMDGAATDIRDVLLFLYIQSYKRLVPRSSHKDSHAVPDVWPSTSAFDGYLSALSPIQCHSDYTAQIILSSEVCLVLCFECKDEQDVFNISELVK

SEQ ID NO: 56415 - protein, 731 aa, Zea mays
  Coding DNA Sequence Number=SeqID_14636
  Gene Ontology: Mol. function=histone-lysine N-methyltransferase activity; Cellular component=nucleus; Biological process=chromatin modification
  Homolog annotation: Hit_ID=Q7XHM7; Match level="QueryCoverage=87%, HitCoverage=96%, E-value=0.0, Identity=71%"; Hit description =Putative SET-domain transcriptional regulator
  Pfam annotation: Domain name=Pre-SET; Domain location=468-569; Score =102.4; E_value=1.3e-27; Accession=PF05033.6; Description=Pre-SET motif
  Pfam annotation: Domain name=SET; Domain location=571-726; Score =117.4; E_value=4.1e-32; Accession=PF00856.18; Description=SET domain
  Pfam annotation: Domain name=YDG_SRA; Domain location=304-451; Score =244.6; E_value=2.2e-70; Accession=PF02182.8; Description=YDGSRA domain
  Pfam module annotation: Pfam domain module=Pre-SET::SET::YDG_SRA; Domain location=468-569::571-726::304-451
MSDNPHEKNTDFDSTVQARLTQPDALSKGVVFPLVLVKVESSKDIDRVDDSGDITKDSEEAREDGQGSLVVEMDVVESSPSSSPISSPAGSSESIDLNFLPFLKREPKSEPASPELGPLPLPAPPTQTPQQQHAAAPAPEATAPLSPATPDLSSAPVMAPLQSLPPNLDEDALLREYYRLAGLYLSSARSGAIIPALAPEAAAPAVVQSGSGSVVKKRRPRSSDLVRVSSLGVQDQIYFRDLVRRARITFECLRGLLLRDDERAESLGLAAVAGFGVARDRRRVRADLRAAALMGDHDLWLNRDRRIVGPMPGISVGDAFFFRMELCVLGLHGQVQAGIDYVSAGRSASGEPIATSIIVSGGYEDDDDHGDVLVYTGHGGRDPNLHKHCVDQKLEGGNLALERSMAYGIEIRVIRAVKSRRSPVGKVYFYDGLYKVVDYWLDRGKSGFAEQLKVDVFAIRPTGYLSFDISMGRDTLSVALFNDVDDDQDPLLFEYLARPIFPTSAVQGKFAEGGGGGCDCAEICSIGCNCAGRNGGEFAYDRTGTLLRGKPLVYECGPYCRCPPSCPNRVSQKGLQHRLEVFRSRETGWGVRSLDLIKAGTFICEFSGIILTHQQSEVVAANGDCLVRPSRFPPRWLDWGDISDVYPDYVAPDHPSIPELKFAIDVSRARNVACYFSHSCSPNVFVQFVLFDHYNVSYPHLMIFAMENIPPLRELSIDYGMVDEWIGQLTM

SEQ ID NO: 56416 - protein, 352 aa, Zea mays
  Coding DNA Sequence Number=SeqID_14637
  Gene Ontology: Mol. function=RNA-directed DNA polymerase activity; Cellular component=mitochondrion; Biological process=RNA-dependent DNA replication
  Homolog annotation: Hit_ID=UPI00004C1733; Match level="QueryCoverage =99%, HitCoverage=25%, E-value=1e-176, Identity=87%"; Hit description= UPI00004C1733 related cluster
  Pfam annotation: Domain name=RnaseH; Domain location=8-123; Score= -24.0; E_value=0.01; Accession=PF00075.14; Description=RNase H
  Pfam annotation: Domain name=rve; Domain location=213-345; Score =83.2; E_value=8e-22; Accession=PF00665.16; Description=Integrase core domain
  Pfam module annotation: Pfam domain module=RnaseH::rve; Domain location=8-123::213-345
MYFDGLLMKTGAGAGLLFISPLRKHLRYVLRLHFPASNNVAEYEAMVNGLHIAIELGVRRFDARGDSQLVIDQVMKNSHCRDRKMEAYCDEVQRLEDKFYGLELNHIARRYNKTADELAKIASGRTTVLPDVFSRDIHQPSVKIGDTPEEASAQPEVSSAAEAPRALVGNAFRQGFYWSTTVADATRIVRSCQGCQFYARQTHLPAQALQTISITWPFAVWGLDLVGPLQKAPRGFSHLLVAIDKFSKWIEVRPLTSIRSEQAVAFFTNIIHRFGVPNSIITDNGTQFIGKKFLDFCEDHHIRVDWAAVAHPMTNGQVERANGMILQGLKPRIYNDLNKFGKRWMKELPSVV

SEQ ID NO: 56417 - protein, 270 aa, Zea mays
  Coding DNA Sequence Number=SeqID_14638
  Homolog annotation: Hit_ID=Q1S8C9; Match level="QueryCoverage=48%, HitCoverage=18%, E-value=1e-20, Identity=44%"; Hit description =Protein phosphatase 2C, putative
MGSHLELAVTGACLVVVLLRDDDVYVMNLGDSRAIVAQRWDDEDCLIGSMWVEDIGVGLETETRIPGYSAIGLEALQLSTDHSTSIEEEVQRIRREHLDDDQCVVNDRVKGRLTVTRAFGAGYLKQSLIEELLSRAAKKAGKLIVWSSSSKPDAPRTTPSKPSSESAIRKWWRSLALALLAAALAITVAALQQTTEHADTKERPLLRFGLGTRGRQGAAAAVAHLFGLLGWAAFLASRCRDQGGTTIGHEGFCLRGSTRRRLNFGGAESD

SEQ ID NO: 56418 - protein, 115 aa, Zea mays
  Coding DNA Sequence Number=SeqID_14639
MTEDDVVLNTTLDLIMRSKAEKRCLKRRDATLKRRLKQHVATTKQQKEEAPPSTLVAVIDRQLSFILNLLEDNSSRGSTGANSDTDEALERACFVATPQRNNNDGGDKEATQPGG

SEQ ID NO: 56419 - protein, 403 aa, Zea mays
  Coding DNA Sequence Number=SeqID_14640
MMVLASVAAISVAILLLLSLPSSLRLHATPFSAQGVGVGAYSPYSSDTKLDTDPHIGYCTSMRTLHSIRVPSFSPSSDIPFVFPAFALFFLPNLLPRPWLPPPPPSSLVARATSPHKPRHASYPTLSLRKQPLRQSSSTLACLDKDARSKSSFDRFPTSLKPRPECTTSSSHLNDFGGMDFMFTIVGFLTACSVDRRGHKNPHRMFTIVGFLTACLNTIHYADSVSVNSNVVQLDAIPTRVKLASCELDLRFCSATCLERRQTLVVVEPNEINFTRIKKKKKKQVDLDLTFNELGDGEDTQGPWFDSLGPGHGHSHMGYSDAVYGWGRGSEHQSIHAQIIRKGGGKCSTCYQFSSLTSLSHEPTYFYNVDIPLESSKNKARMGATELWDLLASDSDKFMKNWL

SEQ ID NO: 56420 - protein, 75 aa, Zea mays
  Coding DNA Sequence Number=SeqID_14641
MGALCTRSDSARLGPLTIVDLPKLESCGNNRLAEFLARFVPRANYNNVGGPYSGDGVTASAVGTAVSVYRLDQGA

SEQ ID NO: 56421 - protein, 111 aa, Zea mays
  Coding DNA Sequence Number=SeqID_14642
MAEAWAVVAGGGAACSRRSPGGLGEQGAGKGGLGGRGRAWPRVRCRQMVQAWPGQGTVHMDGPASSTDGGGSGEAQARKRAGSRGDTGWFGQGRGSASGRVAVVRVVRRGH

SEQ ID NO: 56422 - protein, 96 aa, Zea mays
  Coding DNA Sequence Number=SeqID_14643
MNLWCLSWGGAGGGDGAATSKRQLLDLSQPVQGSVEDSSLVVVGYNPPAMVVGRVEKIRIVRVEQPKVRHDQDKYRKNQSKDMTHCQDRLTSPFLR

SEQ ID NO: 56423 - protein, 105 aa, Zea mays
  Coding DNA Sequence Number=SeqID_14644
MTGFDWPNKAAWVHLGPYVGAYICVDRDFPMRLRCATCMPRRDMWMMLLVVVDMGQQYWIGTSASPSCSIRSWSAIPPRSVTWWGPGRLLYLAELLGGDLWLYLA

SEQ ID NO: 56424 - protein, 340 aa, Zea mays
  Coding DNA Sequence Number=SeqID_14645
  Gene Ontology: Mol. function=protein binding; Cellular component =nucleus; Biological process=regulation of transcription, DNA -dependent
  Homolog annotation: Hit_ID=Q8VZY7; Match level="QueryCoverage=90%, HitCoverage=93%, E-value=3e-84, Identity=93%"; Hit description =Polycomb group protein FIE1
MPPSKARRKRSLRDITATVATGTVANSKPGSSSTNEGKQQDKKKEGPQEPDIPPLPPVVVNIVPRQGLGCEVVEGLLVPSRKREYKPNSKYTVGNHPIYAIGFNFIDMRYYDVFAIASCNSVIIYRCLENGGFGLLQNYVDEDKDESFYTLSWTIDQVDSSPLLVAAGSNRIIRVLTAAVHSDYVDCTRWLGDFILSKSVKNAVLLWEPKPDKRRPGEGSVDVLQKYPVPKCSLWFMKFSCDFYSNQMAIGNNKGEIYVWEVQSSPPVLIDRLCNQECKSPIRQTAVSFDGSTILGAADDGAIWRWDEVDPAASSSKPDQAAAPAAGVGAGAGADADADA

SEQ ID NO: 56425 - protein, 142 aa, Zea mays
  Coding DNA Sequence Number=SeqID_14646
MGYQNSYAEKSYCYRGDAKGGTAKLELDASASAQRVVALGGGEGHGSTERSSGRSSTGGQQAAGAELGLGHGRSRRHPDDLADERRQVARAGGGPRAGAREHGSARGDDNWRQSHGADHLVETTVAWPFLFASGVGGGSLRR

SEQ ID NO: 56426 - protein, 143 aa, Zea mays
  Coding DNA Sequence Number=SeqID_14647
MSCELSKGVRAPPSGFSHQRDSELGLRRGRTSVDWLEPVRDLRLGWESSGWGDFSLECYAAARMVLCRGRPGRSRFIIEVKLILFAEVSHIVFVYLLLRTARLVSVQSSPTRAPPWLCWGRGTTSAPLDLCRAVRIKLRSSIV

SEQ ID NO: 56427 - protein, 156 aa, Zea mays
  Coding DNA Sequence Number=SeqID_14648
MTRGSSEAVKRRESNTVGEWGPQCSERPVDGVREPHKVPTNPCWCTYAKMLNTLFCAKCQRDANGKASLRCTELSGAQAGALGELAALGKSCGSHGYNSPDCPTEGNNGLPNGAPMTPSCLGAIKGTPRSMEHYTKPPLNILQHLNSANTHLVHCV

SEQ ID NO: 56428 - protein, 321 aa, Zea mays
  Coding DNA Sequence Number=SeqID_14649
  Homolog annotation: Hit_ID=Q10SR0; Match level="QueryCoverage=35%, HitCoverage=19%, E-value=2e-10, Identity=41%"; Hit description =Kinesin motor protein, putative, expressed
MTAVESRVVVATPANTKVMSEKENHILRISNSLNKKLDHAKNTPEAPEAACNERKRKGEARNASIDGGEQENNNNGGRKRSLPAEREARLKRKSTEPPPQVKNLRSVSVICRATAIEGGFLRPPPSRRLDICAFYLCLSSCSTMTPVELTLAYHPAIGDAALGLNGRALLPAAPAKVTLRRVAANAYASADRVAAAEVARFVVLAATGEEVAAKGVFSARREGVARGVPSSTTLAGGVCGGGGGAREGWRADAGQGPRGRPRPGRMRCGATRLEGIPEEDATTGLCGWCRCECDDDGLGGGRGRRVGGAGGRDGDGAVGDG

SEQ ID NO: 56429 - protein, 273 aa, Zea mays
  Coding DNA Sequence Number=SeqID_14650
  Subcellular localization annotation: CTP_CleavageSite=49; ConfidenceScore=5.54e-01
MDKKPPSSKNQLPVPPAAAAAAAAAAKNNGGGKLPGLSRKLFQKASSTEAAAPRKTKALMEVKNSGNNANTRTLGMVLRSERELLAQTRAQEDEIAALRLQLENKDREVERLKDLCLRQREEIRTLKDAVLFPDVEPEPEPDRRLRHEISTLTDQIQCLAQEVAQVKAEKHSARSCFDEDGYFSSPRTPGFNEETAFSLECSIGEAETPNYGSPDEMFSKDLNPCLTPCIAKSRSDVSAQFQSSSSQFTKLAQLFGMECQFGSAMSSIGECSM

SEQ ID NO: 56430 - protein, 1256 aa, Zea mays
  Coding DNA Sequence Number=SeqID_14651
  Gene Ontology: Mol. function=protein transporter activity; Cellular component=nuclear envelope; Biological process=protein import into nucleus
  Homolog annotation: Hit_ID=Q6Z7R9; Match level="QueryCoverage=35%, HitCoverage=99%, E-value=1e-153, Identity=61%"; Hit description =Translocated promoter region-like
  Pfam annotation: Domain name=Pox_A_type_inc; Domain location=107-127; Score=2.6; E_value=34; Accession=PF04508.3; Description=Viral A-type inclusion protein repeat
  Pfam annotation: Domain name=Pox_A_type_inc; Domain location=1071 -1095; Score=6.1; E_value=11; Accession=PF04508.3; Description=Viral A-type inclusion protein repeat
  Pfam annotation: Domain name=Pox_A_type_inc; Domain location=1125 -1147; Score=6.0; E_value=11; Accession=PF04508.3; Description=Viral A-type inclusion protein repeat
  Pfam annotation: Domain name=Pox_A_type_inc; Domain location=273-295; Score=4.2; E_value=20; Accession=PF04508.3; Description=Viral A-type inclusion protein repeat
  Pfam annotation: Domain name=Pox_A_type_inc; Domain location=619-641; Score=3.2; E_value=28; Accession=PF04508.3; Description=Viral A-type inclusion protein repeat
  Pfam annotation: Domain name=Pox_A_type_inc; Domain location=675-694; Score=3.8; E_value=23; Accession=PF04508.3; Description=Viral A-type inclusion protein repeat
  Pfam annotation: Domain name=Pox_A_type_inc; Domain location=809-829; Score=5.7; E_value=12; Accession=PF04508.3; Description=Viral A-type inclusion protein repeat
  Pfam module annotation: Pfam domain module=Pox_A_type_inc::Pox_A_type_ inc::Pox_A_type_inc::Pox_A_type_inc::Pox_A_type_inc::Pox_A_type _inc::Pox_A_type_inc; Domain location=107-127::1071-1095::1125
MPLFISDEELRLLGGDTAAVAERADAAIRELRRQVDTVRAEADAAAIAAEQTCALLEQRYASLSAEFDRSKAEAAELTASAERRAAELASSQAEIHQLRIQAIAKDGEVERLKIEISELHKSKCQSLELIEQRDAEIKEKDGIIQSYYNKIVNLAETSAGKEARIQEVEAKFTHCQAICNRMTQEKELLEKHNVWLDEELKAKLEREISESSSSLRRSKERISELEQRELRSTKDTAAANEQRLGAELSTVKKLAELHQESSEEWSKKAGELEGVIKALEEAVNLKQKLEKCEFDLENTRKSSELSLVPLTSIAAGSSDVVDTTVQGLPISDAVNQNDLMVIPKVPSGVSGTALAASLLRDGWSLAKIYEKYQEATDAFLHERRGRRHAEAVLERVLHEIEEKAELILDERAEHERMVEAYAMMDQKLQQALLEHDNFENNVRNLKVAVLLKECQDIQLRCGSSLPNVGYVASSSLVNVLSNVEHDIKDNMSFKDINGLVQQNVQLRNQIHMLSADLDKKDMELRESFQIELKKITDAAASRVEKVMKKSEEQAIMIESLHRSVAMYRKLCEEQQKARSNVESAPTTLQDSSRTDLMVLFEGSQEVSKKAYEQVSERARSLDEELTKLRTELESLRSERDKAVLEADFARDRLNGFAAELEHQRKESNSASLRNAELTRLVVDYERRLREDLDSKQALEENLRKLSMEKGHNSKGAEPAARGHRRRAGGPSTSRKAAGRGQADRDARKGWSAVVIRRSADGGEPHGGGGLGWPTSLRGPTLGMADIGRRLLGERHQQLRATIDTIHTTEEVQERDWAELNKELQEQRDHVRVLSLDKKNVFDSCMKQVEDMRKELNNSWKAVSDAEARAAIAEAKCSDLEAKVKSRKTEVGRKALEDEIVNLRDKLSEMEKSYVIKCEEAANAIESKEKHITSLMNEISVLRTEVSQKLPQLEKLEIELALSKSSLDEQYKRWRTAQDNYERQAETEISLLKQEKSRLQIELESSLKSAKEAQDLLRSQADSARALMFKDEEFKSLQIQKFREEAQKAKMESERLQNLLLEKEVDAEMCKRELEMQKAEIANLNQSISESTLRENSMELESAKILLSEKEVAIKILEDKLSLCQSELDSKEKKLNDVEASLKSEIDKHKKINLNLKRKHDNLMKEKGEIAKENQSLVKQMEDLKSTQKTTSETTLEQAIKEKDFRIQTLERTLEKERDDNKKEKAKSRRNENTIFGALQKVQQDYRSFLMSYLYGC

SEQ ID NO: 56431 - protein, 580 aa, Zea mays
  Coding DNA Sequence Number=SeqID_14652
MAGEEGCGRAAPWPVPPGEEGPRWRRGAGRGHASAEEGDRRGVLIASIDLQDKKQVEESIDKHKQAVRELIENYPGLSSEVPPISALEEQLLSYFRAAKDMEESSSPFRDGAATQTPVVETAPVDAPTSAGVLISHSEAFDVVSYVMTFDSLLFRSMWELISRSVAGRPVDTSSRPAKAKMTEERAVPKPSSEVRRPGGRRPLVRPTLERTEEPHADTDISAVDASTVQDKGGPPAEQETSGILPVLQPLSRKRLITSSQTVDSASQGEANDVNPPSKKPKEEESSQGTSELKSGQPPLGDVAAQVNVLPATDDLDGQQPTEEIDTDQAPEPMVEVEATREEDGGDKDDSGDASTDIKGQDADANIDANAIPLEEEHVVAKSEAIIESFDDDRKTEDSKEDAQRTTATDVDDDMEEGELAEEPEDKSDVDMSEIEGEATAERAAVEPDQSPITQPGAADASPSRTADASPAREPSPSPVQAGASSRPQNTSTATEAREPSSNPAQAGASSEQRNTSTVVEAAETRSRTINLSERARQNRQTRFQRAQQPGTARGRGQQSVTLRKDATGRGSRGRGGRGQS

SEQ ID NO: 56432 - protein, 128 aa, Zea mays
  Coding DNA Sequence Number=SeqID_14653
MELHMQVLEDGHDKRMKGLVHQRARPYVMPPPPKERLKALQASCSACTYALGHRIDLLAQFHQLGFLPCSETKRNISLNAPDRKEGNEKQSEWDTRHMGLYNGQSRLKTCNMSVGCSYDRLRCLPPIP

SEQ ID NO: 56433 - protein, 46 aa, Zea mays
  Coding DNA Sequence Number=SeqID_14654
MGIITGIIDRGKCCIFLEQKSSQEAIPRARGRLDRSGKQQGGVEKT

SEQ ID NO: 56434 - protein, 142 aa, Zea mays
  Coding DNA Sequence Number=SeqID_14655
MAQEVMSQVSTYKIPQEVWFELQKTYASQSTTRTMNTRIALTTTRKDEMESTKKMPISQSSADLALKGLDQLHYFLGIEKRGFIQTVELQTLRMPPAVKSLSIRWTRDIDDRRSTRDFAVYLGKDFGVLVCSQAAHSLKVKY

SEQ ID NO: 56435 - protein, 522 aa, Zea mays
  Coding DNA Sequence Number=SeqID_14656
  Homolog annotation: Hit_ID=Q10QQ9; Match level="QueryCoverage=96%, HitCoverage=43%, E-value=1e-129, Identity=52%"; Hit description =Expressed protein
  Subcellular localization annotation: CTP_CleavageSite=72; ConfidenceScore=5.49e-01
LLLSPQPKSVSKVKLSNNIPKGNISSSPAPSPEQPGASNPSFPVGSDANNEVTTPFDLNKGENSKHEKSTASKMSNKGINRRASSHAANVDNNTKEVRSYLISVLSKNPKGMGLKALEKVAADAFPNASKKIESIVKNIANYQGPERYVLKPGLEVESSKRHASEGVRSISENIEESAPSLKIDDPDICERIDIVGSPLAVTDGKLSNDSEGKAGTSSDSGSDSDSDSDSSDSGSDSESQSRSAAETGSGSSSDSDSDASSSSKEGSDAIVDITSDDDKANTAHTKVVDDLNLSSSPRDLTRLNVDDEQIDIGTNLDYRSASPHIDLNNFNTGNDDAAAEGFSSGNLNKPSEMPGSKNMTNTRMDSIGVDNKHNEMSFVDNLFDDSMRAASENSPKGEAGQLTVQHGNKRKSTSKDESKLVPVNIAKPKLKRSSGSENSTAKPESAKKAKPDVTSPIGSLSEHKRSLPPEKHTNDRLNKETGNVSRDASRDSSPAHERKTFSSWKFTEDRSEPKFTYPNNAF

SEQ ID NO: 56436 - protein, 84 aa, Zea mays
  Coding DNA Sequence Number=SeqID_14657
MEHHLHVENARDSLRSYSTEFRDKFLEVLIHPLLGVTVSFTAVGHLAHRTVWCSLVTIGLADVARADCAADQWPDVRLTHWTVR

SEQ ID NO: 56437 - protein, 272 aa, Zea mays
  Coding DNA Sequence Number=SeqID_14658
  Homolog annotation: Hit_ID=Q2QW75; Match level="QueryCoverage=39%, HitCoverage=36%, E-value=1e-34, Identity=67%"; Hit description =Uncharacterized plant-specific domain TIGR01627 family protein, expressed
  Pfam annotation: Domain name=DUF579; Domain location=133-271; Score =31.5; E_value=5.1e-14; Accession=PF04669.4; Description=Protein of unknown function (DUF579)
MEAVRCPISSPSSAKKGSCMQQAWDVMTGGEELVMGLEEKKNQHAHMISARNGDDAGARPLERRLHVVDEVVAEDATVLHRRLLRQGPTHARKDVHLASLRARLAQQGKAGVALRLLLAAALAGFLLVFAARTLVTSPVPSSPSCLLEPQPLVHYATSNATPQQTAEEIRVALRVLQRRTPCNFLVFGLGLDSPMWAALNHGGRTVFLEEDAAWIGSVRGRHPALESHHVAYDTALADADALLGLRTHPACVAQPDRRGVRRERREPRRVCE

SEQ ID NO: 56438 - protein, 202 aa, Zea mays
  Coding DNA Sequence Number=SeqID_14659
MDRVHEQHLDRNWTDVDRNRMEMDRVQTIIKKSKRSEGVWLKRDRVGFSGQSGVPRTCLVLARAIGHNWLLSGFCFGSLAKIYQTVWCAPDISGGPDDKRSTTRSTSAASAHQQSRKGHRTVRCLPEKESDQSTDLVTVAYQSVRCTHRQKAIFSFQRKKQSPWLLGAIKEAHMRECVYTRTPSILRAHYSSETPRPRCSSV

SEQ ID NO: 56439 - protein, 197 aa, Zea mays
  Coding DNA Sequence Number=SeqID_14660
  Homolog annotation: Hit_ID=Q10QR1; Match level="QueryCoverage=41%, HitCoverage=36%, E-value=4e-31, Identity=77%"; Hit description =Expressed protein
  Pfam annotation: Domain name=GRP; Domain location=37-110; Score= -24.9; E_value=0.026; Accession=PF07172.2; Description=Glycine rich protein family
YEQMVLEDLLRKGHAEPAKKIGAGVEAFEIGNHPVWKSHCFFVRRTDGSVDDFSFRKCVDNILPLPEDFKIGNGKKSGGHQKDGGGGRAGGRRGGGRGGWRGGRGRGRRGGSMDSCMQALRHRHPSRQRLSDAHEPQPAATVLWWLKLKSVLTKVTAKPQSRRQSASSMNEITWPCARYGSNDSYGVDDHLFLVLTS

SEQ ID NO: 56440 - protein, 110 aa, Zea mays
  Coding DNA Sequence Number=SeqID_14661
  Homolog annotation: Hit_ID=Q10QQ9; Match level="QueryCoverage=48%, HitCoverage=4%, E-value=3e-20, Identity=88%"; Hit description =Expressed protein
  Subcellular localization annotation: CTP_CleavageSite=42; ConfidenceScore=5.20e-01
MYKLSGRGGGRGGSGAAKRPLPPHGRGRGGASSIGGMAGPPRGRAGAGAATQPAGRDEAFRLESSGPPAFAAIIRLTPDLVDEIRRAEEAGGGARIKFNPNMYNSSENCI

SEQ ID NO: 56441 - protein, 300 aa, Zea mays
  Coding DNA Sequence Number=SeqID_14662
  Gene Ontology: Mol. function=DNA binding; Cellular component =mitochondrion; Biological process=DNA integration
  Homolog annotation: Hit_ID=UPI00004C1731; Match level="QueryCoverage =99%, HitCoverage=28%, E-value=1e-113, Identity=93%"; Hit description= UPI00004C1731 related cluster
  Pfam annotation: Domain name=rve; Domain location=77-233; Score=94.8; E_value=2.6e-25; Accession=PF00665.16; Description=Integrase core domain
MFFDGSLMKTGSGAGLLFISPLGKHLRYVLRLHFPASNNVAEYEALVNGVRIAIELGVRCLNARGDSQLVIDQVMKNSHCRDSKMEAYCDEKAPGGYTHLLVAIDKFSKWIEVRPLNSIRSEQAVAFFTNIIHRFGVPNSIIIDNGTQFIGRKFLDFCEDHHIRVDWAAVAHPMTNGQVERANGMILRGLKPRIYNDLNKFGKRWMKELPSVVWSLRTTPSRATGFTPFFLVYGAEAILPTDLEYDSPRARAYDDQSNQANREDSLDHLEEAQDMALLHSARYQQSLRRYHARGVRSRDL

SEQ ID NO: 56442 - protein, 527 aa, Zea mays
  Coding DNA Sequence Number=SeqID_14663
  Gene Ontology: Mol. function=binding; Cellular component =mitochondrion; Biological process=protein amino acid phosphorylation
  Homolog annotation: Hit_ID=Q10Q32; Match level="QueryCoverage=98%, HitCoverage=89%, E-value=0.0, Identity=73%"; Hit description =Expressed protein
  Pfam annotation: Domain name=PPR; Domain location=132-165; Score =11.9; E_value=0.29; Accession=PF01535.11; Description=PPR repeat
  Pfam annotation: Domain name=PPR; Domain location=166-200; Score=5.4; E_value=1.7; Accession=PF01535.11; Description=PPR repeat
  Pfam annotation: Domain name=PPR; Domain location=204-238; Score =18.4; E_value=0.025; Accession=PF01535.11; Description=PPR repeat
  Pfam annotation: Domain name=PPR; Domain location=239-273; Score =25.4; E_value=0.00021; Accession=PF01535.11; Description=PPR repeat
  Pfam annotation: Domain name=PPR; Domain location=274-308; Score =26.1; E_value=0.00012; Accession=PF01535.11; Description=PPR repeat
  Pfam annotation: Domain name=PPR; Domain location=309-343; Score =32.0; E_value=2.1e-06; Accession=PF01535.11; Description=PPR repeat
  Pfam annotation: Domain name=PPR; Domain location=344-378; Score =12.1; E_value=0.28; Accession=PF01535.11; Description=PPR repeat
  Pfam annotation: Domain name=PPR; Domain location=380-414; Score =23.7; E_value=0.00065; Accession=PF01535.11; Description=PPR repeat
  Pfam annotation: Domain name=PPR; Domain location=415-449; Score =29.4; E_value=1.3e-05; Accession=PF01535.11; Description=PPR repeat
  Pfam annotation: Domain name=PPR; Domain location=480-514; Score =34.5; E_value=3.6e-07; Accession=PF01535.11; Description=PPR repeat
  Pfam annotation: Domain name=PPR; Domain location=97-131; Score=14.4; E_value=0.15; Accession=PF01535.11; Description=PPR repeat
  Pfam module annotation: Pfam domain module=PPR::PPR::PPR::PPR::PPR::PP R::PPR::PPR::PPR::PPR::PPR; Domain location=132-165::166-200::204 -238::239-273::274-308::309-343::344-378::380-414::415-449::480
MVTVGACVCRAAPCLLDSVVDGTEDVSVGFGGIDGEPLADGYDGGKRRGPRRRPTRPTVFQKEVGARTAPPAMASEPDSKSEHGVSRLHFLEERDEETLSRRLIKLSQNNKVRSATELFDSMRASGLQPSAHACNSLLACYVRRSPLADAMRMFEFMKAKGMATGHTYTMILKAVASNQGYVSALEMFDKIEEEEGSKKIIDVIVYNTMISVCGRAKEWMLVERLWRRLEQHSLNGTLLTYDLLVSIFVQCGQSELAIAAYQEMLQKGLDPSEDIMKAIIASCTKEGKWEFAMSTFSRMLRAGMKPSLILFNSIINSLGKAGQDELAFRMYHLLEKSGLKPDQYTWSALLLALYRSGRCWDCLKLFHGIKGKHPTLLNDHLYNTALMSCEKLGQWEHGLQLLWLMEKRGLKLSVVSYNHVIGACEVASKPKVALKVYQRMINQRCSPDTFTHLSVIRACIWGSLWTEVEDILEEVAPDSSIYNAVIHGLCLRGKTGLANKVYAKMRSMGLVPDGKTRAFMLQHIATD

SEQ ID NO: 56443 - protein, 189 aa, Zea mays
  Coding DNA Sequence Number=SeqID_14664
  Homolog annotation: Hit_ID=Q10Q34; Match level="QueryCoverage=54%, HitCoverage=14%, E-value=1e-13, Identity=42%"; Hit description =Expressed protein
MTVAARPYSRSGAVYMKSVGRDNWLILYRFSLQDRSNRVQRRVFERAVADDQHDGSQWKLDSATSICERMQGQLPHAVAVVEKRHAKSDFPAARATGNAADNDTSGKVFDSRMNNGASHCQSVSETSSDGGLHEKLKSMLTGPSVFVGDENTSEQGGLKSRIFIPHQSPEELSDNQIYEEYDFELSGIR

SEQ ID NO: 56444 - protein, 173 aa, Zea mays
  Coding DNA Sequence Number=SeqID_14665
  Gene Ontology: Mol. function=NADH dehydrogenase (ubiquinone) activity; Cellular component=mitochondrial membrane; Biological process=photorespiration
  Homolog annotation: Hit_ID=O49313; Match level="QueryCoverage=99%, HitCoverage=100%, E-value=3e-62, Identity=68%"; Hit description =Expressed protein
  Pfam annotation: Domain name=GRIM-19; Domain location=16-171; Score =73.1; E_value=8.6e-19; Accession=PF06212.2; Description=GRIM-19 protein
MTESLVRNKPGMASIKEMPVLQDGPPPGGFAPVRYARRIPTSGPSATAIFLTAFGAFAYGMYQVGQGNKVRRALKEEKIAARSAILPMLQAEEDERYYPILFAIIIGVIYSLAFTKHLKGPWRSCRFVKEWKKYLEEEARIMKDVPGWKVGESVYNSGKWMPPATGELRPEVW

SEQ ID NO: 56445 - protein, 643 aa, Zea mays
  Coding DNA Sequence Number=SeqID_14666
  Gene Ontology: Mol. function=inositol-3-phosphate synthase activity; Cellular component=cytoplasm; Biological process=phospholipid biosynthetic process
  Homolog annotation: Hit_ID=O65195; Match level="QueryCoverage=82%, HitCoverage=99%, E-value=0.0, Identity=88%"; Hit description =Inositol-3-phosphate synthase
  Pfam annotation: Domain name=Inos-1-P_synth; Domain location=331-444; Score=237.9; E_value=2.1e-68; Accession=PF01658.8; Description=Myo -inositol-1-phosphate synthase
  Pfam annotation: Domain name=NAD_binding_5; Domain location=89-515; Score=599.3; E_value=3.6e-177; Accession=PF07994.3; Description=Myo -inositol-1-phosphate synthase
  Pfam module annotation: Pfam domain module=Inos-1-P_synth::NAD _binding_5; Domain location=331-444::89-515
MFIESFRVESPHVRYGPTEIESEYRYDTTELVHEGKDGASRWVVRPKSVKYNFRTRTAVPKLGLSAACLCLTDDANFSVLVVQGDACGVGEATTGPTMTAGVFANREGISWATKDKVQQANYYGSLTQASTIRVGSYNGEEIYAPFKSLLPMVNPDDIVFGGWDISNMNLADSMTRAKVLDIDLQKQLRPYMESMVPLPGIYDPDFIAANQGSRANSVIKGTKKEQVEQIIKDIREFKEKNKVDKIVVLWTANTERYSNVCAGLNDTMENLLASVDKNEAEVSPSTLYAIACVMEGVPFINGSPQNTFVPGLIDLAIKNNCLIGGDDFKSGQTKMKSVLVDFLVGAGIKPTSIVSYNHLGNNDGMNLSAPQTFRSKEISKSNVVDDMVSSNAILYEPGEHPDHVVVIKYVPYVGDSKRAMDEYTSEIFMGGKNTIVLHNTCEDSLLAAPIILDLVLLAELSTRIQLKAEGEDKFHSFHPVATILSYLTKAPLVPPGTPVVNALAKQRAMLENIMRACVGLAPENNMILEYNGTEPVIVLYDNVIEVVELRLAPAFSTFVDVACVVGSDREYPMIIKQLHEIALRSLKPLSPPSPFPTILQQNCVRGKLNAGTSYMRTLGVLGNKFVHTNTREKGQQMREKGRL

SEQ ID NO: 56446 - protein, 132 aa, Zea mays
  Coding DNA Sequence Number=SeqID_14667
MSGEVRTVHNEISGQGISWLESGAYRSPTQTLVGILSGTPTLPAWAETRCCHVSVACDESRRAGPDVRIQARAISAFIAEIVRRLTALLTGEVPTRHLMRPVHSGGRRRPERAAYLSNQSSGQYARTAACSQ

SEQ ID NO: 56447 - protein, 59 aa, Zea mays
  Coding DNA Sequence Number=SeqID_14668
  Homolog annotation: Hit_ID=O24587; Match level="QueryCoverage=56%, HitCoverage=3%, E-value=5e-10, Identity=79%"; Hit description=Pol
MGELKYFLGSKSALREGTSIDQIKFGLWYPKGSTFDLIEYPNADYAECKIDRKSTSGTF

SEQ ID NO: 56448 - protein, 78 aa, Zea mays
  Coding DNA Sequence Number=SeqID_14669
MGNGDDEEMSPRLFVGIPVGNLFRCSDGEIFPDGEFLIAIPRCGSGCTGEVVVAPDYGACGALARNTLLLQFVILMVR

SEQ ID NO: 56449 - protein, 96 aa, Zea mays
  Coding DNA Sequence Number=SeqID_14670
MSDHLGSDQWGVMIPRQNGNYDSWVNFSYSRISTYWSLLQPYNVDGRYNFKEQQGRGVERAQEHKNNSTKQEHKYKVTAWLNLMTNGAQITLMFFL

SEQ ID NO: 56450 - protein, 129 aa, Zea mays
  Coding DNA Sequence Number=SeqID_14671
MQDVARCALSQYCSLFSRVADDLNLRYYPRRSTGSIGSVIVSPIGEGNPRLSGTVNLVVVLNTKLDHALEELSRVCVEIVELRAERVEHHHQEDGSPAPARTQHLYRSPPRGHHVYGTPNCRTKIDLDP

SEQ ID NO: 56451 - protein, 502 aa, Zea mays
  Coding DNA Sequence Number=SeqID_14672
  Gene Ontology: Mol. function=protein serine/threonine kinase activity; Cellular component=membrane; Biological process=protein amino acid phosphorylation
  Homolog annotation: Hit_ID=Q2R0I7; Match level="QueryCoverage=56%, HitCoverage=54%, E-value=1e-107, Identity=61%"; Hit description =Protein kinase domain containing protein, expressed
  Pfam annotation: Domain name=APH; Domain location=160-334; Score= -15.7; E_value=0.075; Accession=PF01636.13; Description =Phosphotransferase enzyme family
  Pfam annotation: Domain name=Pkinase; Domain location=158-429; Score =93.9; E_value=4.7e-25; Accession=PF00069.15; Description=Protein kinase domain
  Pfam annotation: Domain name=Pkinase_Tyr; Domain location=158-434; Score=72.3; E_value=1.6e-18; Accession=PF07714.7; Description =Protein tyrosine kinase
  Pfam module annotation: Pfam domain module=APH::Pkinase::Pkinase_Tyr; Domain location=160-334::158-429::158-434
  Subcellular localization annotation: CTP_CleavageSite=22; ConfidenceScore=5.53e-01
MSRTNTGGTSARQNSDESVSPRCVLDDGGYRMSTSNAGSSTTTTMASGSSTPATTSASSPATTVAVTTYTDPSALLKAAGRRDGSAAPPWKAVAEAWRSRAKRQLSVRIPSLGPTMSSTLRRLSSRRTDNIEVHEFCVLKPTLRTFSLAELKKATRNFSKENVVGRGGFAKVYRGSLPGGELVAVKKLTATQGAERMEGFLSELGHVVNVSHPNIARLVGVGVDGGEHLVFPFSRLGCLSGMLHSNSGAEPMPWEARYRVALGTARGLEYLHERCARRIVHRDIKPANILLMDNYEPLICDFGLARWLPAKLTHLQVSVFEGTFGYVPPEYTTHGVFSEKTDVFALGVVLLELLTGRRAVDTAKLSLVAWAKQYLEVDDDDEDETLKMADPALGGRYDAEQLRNMAWAAKLCVHASPHQRPQMSEILAGEGAHLRGGRGAHGVDDELLPETDGYDGDAAPGYVDDLSRHKALAFAVDVDVDSDEDSTPPVRHAPATTFVREV

SEQ ID NO: 56452 - protein, 108 aa, Zea mays
  Coding DNA Sequence Number=SeqID_14673
MASFPVTMFGRNIHLCSAPLPMQGQSAAAQCVGNGEHVCGKGLPSGFYHGGVLTFDEASAQRAPAGRGKHQEQESQRMKKRAKATFHHLLFPQPMSSKNSVRQQNFPK

SEQ ID NO: 56453 - protein, 399 aa, Zea mays
  Coding DNA Sequence Number=SeqID_14674
  Gene Ontology: Mol. function=protein binding; Cellular component =integral to membrane; Biological process=protein amino acid phosphorylation
  Homolog annotation: Hit_ID=Q2R0I6; Match level="QueryCoverage=92%, HitCoverage=92%, E-value=1e-133, Identity=68%"; Hit description =Leucine Rich Repeat family protein, expressed
  Pfam annotation: Domain name=LRRNT_2; Domain location=28-69; Score =47.2; E_value=5.5e-11; Accession=PF08263.3; Description=Leucine rich repeat N-terminal domain
  Pfam annotation: Domain name=LRR_1; Domain location=128-147; Score =5.7; E_value=24; Accession=PF00560.23; Description=Leucine Rich Repeat
  Pfam annotation: Domain name=LRR_1; Domain location=150-172; Score =9.8; E_value=4.2; Accession=PF00560.23; Description=Leucine Rich Repeat
  Pfam annotation: Domain name=LRR_1; Domain location=174-193; Score =10.0; E_value=3.8; Accession=PF00560.23; Description=Leucine Rich Repeat
  Pfam annotation: Domain name=LRR_1; Domain location=196-215; Score =5.7; E_value=24; Accession=PF00560.23; Description=Leucine Rich Repeat
  Pfam annotation: Domain name=LRR_1; Domain location=217-239; Score =9.6; E_value=4.6; Accession=PF00560.23; Description=Leucine Rich Repeat
  Pfam annotation: Domain name=LRR_1; Domain location=241-263; Score =9.2; E_value=5.3; Accession=PF00560.23; Description=Leucine Rich Repeat
  Pfam annotation: Domain name=LRR_1; Domain location=265-294; Score =0.7; E_value=2.1e+02; Accession=PF00560.23; Description=Leucine Rich Repeat
  Pfam annotation: Domain name=LRR_1; Domain location=336-363; Score =4.5; E_value=41; Accession=PF00560.23; Description=Leucine Rich Repeat
  Pfam module annotation: Pfam domain module=LRRNT_2::LRR_1::LRR_1::LRR_ 1::LRR_1::LRR_1::LRR_1::LRR_1::LRR_1; Domain location=28-69::128 -147::150-172::174-193::196-215::217-239::241-263::265-294::336-3
MASRLLPLVAALLLLLLLTAASSEATLHPVDYLALQAVRRALSDLPGSRFFASWDFTGDPCSFAGVSCTADGARVETLALGDPRAGAPGLGGAFPSAAVARLPALTSLSLVPGRVTGGLPAAVAALPALRFLALAGNLLSGDLPRAFAPALRTVDLSKNGFTGTVPAPLLQLRGLRTLVLSHNALSGEIPRSVRAPLLHLDLRGNRLSGGVPPLPGTLAYLSLAGNRLSGPVGGVLRRLPRLTFLDLGRNWLSGEVPGEVFAFRRIAYLQLRKNAFSGELRPAGRVPAGATVDLSHNALSGRVPPELATAGAVYLNGNRLAGEVPREVAAAAEAGRMRVLFLQDNFLTGVGVGGALPASAAVCAHWNCVAPPPAVVAACPAKGGRGRRRPQAQCRGRTG

SEQ ID NO: 56454 - protein, 723 aa, Zea mays
  Coding DNA Sequence Number=SeqID_14675
  Gene Ontology: Mol. function=porin activity; Cellular component =nuclear pore; Biological process=transport
  Homolog annotation: Hit_ID=Q2R0I9; Match level="QueryCoverage=98%, HitCoverage=70%, E-value=0.0, Identity=75%"; Hit description=Nuclear pore protein 84/107 containing protein, expressed
  Pfam annotation: Domain name=Nup84_Nup100; Domain location=2-659; Score=507.0; E_value=2.2e-149; Accession=PF04121.4; Description =Nuclear pore protein 84  107
MRNSNLSPKQDELLLEDIWTLLRAGRLEEASDLCRSAGQAWRVATLCPFGGINMFPSLNALHKNGKYRTLQAMELESGVGRQWRLWKWASYCASEKIAEQDGGRYEMAVYALQCSNLKRVLPICTDWESACWAMARSWLDVQVDLELSQYQTSRPEKQLDDDMNGAQSSVGPESWPYHVLDQQPHDLTALLQKLHSSDLVHETVSRACREQHRQIQMNLMSGNISHLLDLLWSWLSPAEENHNNTARPLDDPEMIRFGAHIVLVLRHLFSDGMDDELDEKLVTVGDLIINMYVRYLFSEDQEELVGIYASQLQHDLCITLFVEMMELRLNSSLHTMYKLFLSAVEYLPFSSDNVSKACFEEIIERVLSRSRQTKPTKYDGDFSDVAHQHHLQSLQKAMVIQWLCFTPPSSIPDFQMISWKLLIRALTHSNTLFREFSLISMRRVPELPAGPHKLLAILAEPLKQKENLISREDPEHEYYSLDATYRSWLKIEMMNAAVSPEMLSAEEKGQAVAAAKETLNLACSLLRNATSCTALTSALYSTVSEDDVLHRLLKVDVQVSSRDPCCIEVALRCLAAEGDGYGLHEANDGGLLAAVMAAGFKGELSRFQPGVSMAISRLDAWYSDRSGSVESTAAYIIRGLCRRCCLPETILRSMQACIALSAAGDDLDYSLDKCDELVELVGSAESGMMHLFSQQQLQEFLIFEREYLICTMEFEEDRLPCDG

SEQ ID NO: 56455 - protein, 723 aa, Zea mays; identical to SEQ ID NO: 56454
  Coding DNA Sequence Number=SeqID_14676
  Gene Ontology: Mol. function=porin activity; Cellular component =nuclear pore; Biological process=transport
  Homolog annotation: Hit_ID=Q2R0I9; Match level="QueryCoverage=98%, HitCoverage=70%, E-value=0.0, Identity=75%"; Hit description=Nuclear pore protein 84/107 containing protein, expressed
  Pfam annotation: Domain name=Nup84_Nup100; Domain location=2-659; Score=507.0; E_value=2.2e-149; Accession=PF04121.4; Description =Nuclear pore protein 84  107

SEQ ID NO: 56456 - protein, 994 aa, Zea mays
  Coding DNA Sequence Number=SeqID_14677
  Gene Ontology: Mol. function=protein serine/threonine kinase activity; Cellular component=integral to membrane; Biological process=protein amino acid phosphorylation
  Homolog annotation: Hit_ID=Q8S7A6; Match level="QueryCoverage=97%, HitCoverage=91%, E-value=0.0, Identity=56%"; Hit description =Putative receptor protein kinase
  Pfam annotation: Domain name=LRR_1; Domain location=107-129; Score =13.1; E_value=1; Accession=PF00560.23; Description=Leucine Rich Repeat
  Pfam annotation: Domain name=LRR_1; Domain location=131-153; Score =8.1; E_value=8.8; Accession=PF00560.23; Description=Leucine Rich Repeat
  Pfam annotation: Domain name=LRR_1; Domain location=155-177; Score =13.1; E_value=1; Accession=PF00560.23; Description=Leucine Rich Repeat
  Pfam annotation: Domain name=LRR_1; Domain location=179-201; Score =8.1; E_value=8.7; Accession=PF00560.23; Description=Leucine Rich Repeat
  Pfam annotation: Domain name=LRR_1; Domain location=203-225; Score =14.6; E_value=0.36; Accession=PF00560.23; Description=Leucine Rich Repeat
  Pfam annotation: Domain name=LRR_1; Domain location=228-250; Score =4.4; E_value=44; Accession=PF00560.23; Description=Leucine Rich Repeat
  Pfam annotation: Domain name=LRR_1; Domain location=252-274; Score =4.9; E_value=35; Accession=PF00560.23; Description=Leucine Rich Repeat
  Pfam annotation: Domain name=LRR_1; Domain location=276-298; Score =10.0; E_value=3.9; Accession=PF00560.23; Description=Leucine Rich Repeat
  Pfam annotation: Domain name=LRR_1; Domain location=306-328; Score =13.4; E_value=0.84; Accession=PF00560.23; Description=Leucine Rich Repeat
  Pfam annotation: Domain name=LRR_1; Domain location=331-353; Score =11.0; E_value=2.4; Accession=PF00560.23; Description=Leucine Rich Repeat
  Pfam annotation: Domain name=LRR_1; Domain location=355-377; Score =16.4; E_value=0.11; Accession=PF00560.23; Description=Leucine Rich Repeat
  Pfam annotation: Domain name=LRR_1; Domain location=379-401; Score =9.1; E_value=5.5; Accession=PF00560.23; Description=Leucine Rich Repeat
  Pfam annotation: Domain name=LRR_1; Domain location=403-425; Score =12.6; E_value=1.2; Accession=PF00560.23; Description=Leucine Rich Repeat
  Pfam annotation: Domain name=LRR_1; Domain location=427-449; Score =9.7; E_value=4.5; Accession=PF00560.23; Description=Leucine Rich Repeat
  Pfam annotation: Domain name=LRR_1; Domain location=452-474; Score =6.1; E_value=20; Accession=PF00560.23; Description=Leucine Rich Repeat
  Pfam annotation: Domain name=LRR_1; Domain location=476-498; Score =10.2; E_value=3.5; Accession=PF00560.23; Description=Leucine Rich Repeat
  Pfam annotation: Domain name=LRR_1; Domain location=500-522; Score =14.8; E_value=0.3; Accession=PF00560.23; Description=Leucine Rich Repeat
  Pfam annotation: Domain name=LRR_1; Domain location=524-546; Score =17.1; E_value=0.064; Accession=PF00560.23; Description=Leucine Rich Repeat
  Pfam annotation: Domain name=LRR_1; Domain location=548-572; Score =9.3; E_value=5.1; Accession=PF00560.23; Description=Leucine Rich Repeat
  Pfam annotation: Domain name=LRR_1; Domain location=59-81; Score =22.3; E_value=0.0017; Accession=PF00560.23; Description=Leucine Rich Repeat
  Pfam annotation: Domain name=LRR_1; Domain location=83-105; Score =9.8; E_value=4.2; Accession=PF00560.23; Description=Leucine Rich Repeat
  Pfam annotation: Domain name=Pkinase; Domain location=670-966; Score =131.8; E_value=1.9e-36; Accession=PF00069.15; Description=Protein kinase domain
  Pfam annotation: Domain name=Pkinase_Tyr; Domain location=670-966; Score=67.6; E_value=4.1e-17; Accession=PF07714.7; Description =Protein tyrosine kinase
  Pfam module annotation: Pfam domain module=LRR_1::LRR_1::LRR_1::LRR _1::LRR_1::LRR_1::LRR_1::LRR_1::LRR_1::LRR_1::LRR_1::LRR_1::LRR _1::LRR_1::LRR_1::LRR_1::LRR_1::LRR_1::LRR_1::LRR_1::LRR
  Pfam module annotation: Pfam domain module=location=107-129::131 -153::155-177::179-201::203-225::228-250::252-274::276-298::306 -328::331-353::355-377::379-401::403-425::427-449::452-474::476 -498::500-522::524-546::...
  Pfam module annotation: =548-572::59-81::83-105::670-966::670-966
  Subcellular localization annotation: CTP_CleavageSite=42; ConfidenceScore=5.09e-01
MGALSSWDGDASNRSAPHFCRWNGVTCSSHQHGSHVTALRLRAFGLEGNISQSLGNLSHLQTLDLSNNNLEGEIPSSIGNLFALHFLNLSVNHLSGNVPQSIGRLSELEILNFRDNDIVGSIPSSVLNLTGLTMLSATENYMTGRIPDWLGNLTDLTDLNLAWNNFSGQIPQALGKLPNLARLTMQGNQLEGLISPTLFNISSLENLNLGYNKLSGSLPPNIGFTLPNIVAFSVCYNKFEGPVPSSLSNISVLQQLILHGNRFHGRIPPNIGVHGSLTNLELGNNQLQVVDTKDWDFLTPLVNCSHLKYLNLELNNISGILPNAVSNLSYELEALLMGGNQITGTVPSGIGRLQKLQILDLSDNLFSGAVPSSIGKLSSLDSLVLFSNKFDGEIPSSLGNLTKLTELVLHSNDLHGSMPPSLGNMTILESIDLSYNRLSGQIPQEILSMYSLTKFLNLSNNFFSGPISQQIRLLISLGTMDLSSNNLSGEIPHTLGSCVTLQFLYLQGNLLQGQIPVELNALRGLEVLDISSNNLSGPIPDFLGDFQVLKKLNLSFNNLSGPVLDRGIFHNNATSVSLSGNAMLCGGPGFFQLPPCSTQATYGRSNHQRMHVLAFSFTGALVVFVCITVCYFMKRASDKASDAEHGLVTLPRNKYKRISYAELYEATDSFSDSNLVGRGRFGTVYKGILHDDSNTETVAVKVLDLKQQGASRTFFTECDALKRIKHRKLVKVITVCDSLDNNGDEFKALVLEFIPNGTLDEWLHPSALVTNRATGSLSIIQRLNIALDVAEALAYLHHHSNPSIVHCDIKPSNILLDENMTAHVGDFGLARILNMDACEHNSGGSSSAGIRGTIGYLAPEHAMGLRVGVEAEVYSYGVLLMEILTKLRPTDHMSFDGATSLVKHVEMAYPYRLLEILDDIMLQGSTSHSTQETMDMVIIPVVRIGLACCRTAASQRIRMDEVVKELNDIKKTWEDHFAEITGATGRAADGRAIH

SEQ ID NO: 56457 - protein, 119 aa, Zea mays
  Coding DNA Sequence Number=SeqID_14678
  Subcellular localization annotation: CTP_CleavageSite=58; ConfidenceScore=5.38e-01
MAGGVGAKSAAVVGIPAKSRRSWQAAARGVRGSRGFTAAVARGRAEDGVACCAGGCCRCGQGAGVSQRLRRVRRTAWRAVQEAVAGAGRELGFRGGCGARVREAVAGAGRERGQSTLPP

SEQ ID NO: 56458 - protein, 65 aa, Zea mays
  Coding DNA Sequence Number=SeqID_14679
MAVSMFPYLIICKILLSYTEECICSRLVCIPSKIRIDLRFNNHFAPKRVDIYFLLVESYYDEMLD

SEQ ID NO: 56459 - protein, 73 aa, Zea mays
  Coding DNA Sequence Number=SeqID_14680
  Subcellular localization annotation: CTP_CleavageSite=21; ConfidenceScore=5.11e-01
MPPYPLRYPPKSLLKCLQNVVVTKTKEFKNLVSNCSSYMFFYNSMNNSISLSYNDRTCADGCLDFNGDVGGED

SEQ ID NO: 56460 - protein, 88 aa, Zea mays
  Coding DNA Sequence Number=SeqID_14681
  Subcellular localization annotation: CTP_CleavageSite=58; ConfidenceScore=5.63e-01
MAGGPNFPQPNRPQSPLLPSPFTFRETVSGGRRTPARRRRTDGALRRGDAEEVFGNLRAKEATRCGAEHGAGGPERRAQPAWRGGVRA

SEQ ID NO: 56461 - protein, 247 aa, Zea mays
  Coding DNA Sequence Number=SeqID_14682
  Gene Ontology: Mol. function=fumarate hydratase activity; Biological process=tricarboxylic acid cycle
  Homolog annotation: Hit_ID=Q10LR5; Match level="QueryCoverage=37%, HitCoverage=18%, E-value=9e-42, Identity=87%"; Hit description =Fumarate hydratase 1, mitochondrial, putative, expressed
  Pfam annotation: Domain name=Lyase_1; Domain location=99-247; Score= -137.3; E_value=0.071; Accession=PF00206.10; Description=Lyase
MLKPAKVDRMMVVTTCSHIYTPQKISSLVFKKITNRVAYKTVIKAHSDVVLKAKSMADKVEWANKTKVVIQSKGGSFKGPSIEGGSMRQINLDGALVNMDYGLDPTIGKAIIQAAEEVVEGKLDDHFPLVTWQTGSGTQSNMNANEVNMDYGLDPTIGKAIIQAAEEVAEGKLDDHFPLVIWQTGSGTQSNMNANEVIANRASEILGHKGGQKFVHPNDHVNRSQSSNDTFPTMFIIHGVDISRDSD

SEQ ID NO: 56462 - protein, 370 aa, Zea mays
  Coding DNA Sequence Number=SeqID_14683
  Gene Ontology: Mol. function=oxidoreductase activity; Cellular component=vacuole; Biological process=response to oxidative stress
  Homolog annotation: Hit_ID=Q5U1K0; Match level="QueryCoverage=85%, HitCoverage=91%, E-value=1e-101, Identity=59%"; Hit description =Class III peroxidase 93 precursor
  Pfam annotation: Domain name=peroxidase; Domain location=45-312; Score=265.8; E_value=8.5e-77; Accession=PF00141.13; Description =Peroxidase
MRRLQFLAAAAAAIFLLALPLMATAQPKLRPDYYAGVCPNLESIVRGAVRQSVALSPLAAPATLRLFFHDCAVRVRACDYNTDDADERTDAVPVPPLSCEFKGCDASVMLIDPAGGDEWRSPDGVMLKPEGFSTVMSAKAAVDSDPQCRNMVSCADILALAARDSVFLSGGPDYEVELGRFDGRVSSGGSVVVPHGTFDLDQLNAFFSSLGLSQTDMIALSGGHTIGAASCGSFAYRVGADPAMDPALAQQVLARCPGGGPAGFAFLDATTPLRFDNEYYRNLLGGMGILASDQVLYADPRSRGAVERYAADQAAFFGDFAAAMTRLGRVGVRTAADGEIRRDCRKALGLVGCVLCGSKMGVISVVKGNE

SEQ ID NO: 56463 - protein, 163 aa, Zea mays
  Coding DNA Sequence Number=SeqID_14684
  Subcellular localization annotation: CTP_CleavageSite=75; ConfidenceScore=5.07e-01
MERAHRRVSQVADGKAKLTVALDGAWAQRRPQNRQWTSAGQWRSSPVHAGRARERARGLGRGTNERGGCGRVGARGSGVAEERAVVGVYTAGEIMGERLETANRWGQRDREREGAGARERNSADRTGPRDRERGKGVSALVGADRRGPPVRHKGMRGRARGLD

SEQ ID NO: 56464 - protein, 485 aa, Zea mays
  Coding DNA Sequence Number=SeqID_14685
  Gene Ontology: Mol. function=transferase activity, transferring hexosyl groups; Cellular component=intracellular; Biological process= metabolic process
  Homolog annotation: Hit_ID=Q5Z8I3; Match level="QueryCoverage=78%, HitCoverage=78%, E-value=0.0, Identity=81%"; Hit description =Pentatricopeptide repeat-containing protein-like
  Pfam annotation: Domain name=PPR; Domain location=165-198; Score=4.0; E_value=2.5; Accession=PF01535.11; Description=PPR repeat
  Pfam annotation: Domain name=PPR; Domain location=199-233; Score=7.3; E_value=1; Accession=PF01535.11; Description=PPR repeat
  Pfam annotation: Domain name=PPR; Domain location=234-268; Score =32.8; E_value=1.2e-06; Accession=PF01535.11; Description=PPR repeat
  Pfam annotation: Domain name=PPR; Domain location=270-304; Score =25.0; E_value=0.00027; Accession=PF01535.11; Description=PPR repeat
  Pfam annotation: Domain name=PPR; Domain location=305-339; Score =24.9; E_value=0.0003; Accession=PF01535.11; Description=PPR repeat
  Pfam annotation: Domain name=PPR; Domain location=340-374; Score =32.0; E_value=2.1e-06; Accession=PF01535.11; Description=PPR repeat
  Pfam annotation: Domain name=PPR; Domain location=375-409; Score =19.0; E_value=0.017; Accession=PF01535.11; Description=PPR repeat
  Pfam annotation: Domain name=PPR; Domain location=410-444; Score =16.8; E_value=0.076; Accession=PF01535.11; Description=PPR repeat
  Pfam module annotation: Pfam domain module=PPR::PPR::PPR::PPR::PPR::PP R::PPR::PPR; Domain location=165-198::199-233::234-268::270-304::305 -339::340-374::375-409::410-444
MPLRLLPPPRRAAAPLLTPTVSHLACLLLGQGPDTPPLLLALLPVCPALLTPLLSRLLLSHTPPLPALSLYRRLLALRHFNVPESSLPVLLRLLARSRRHAHLSFPLLESLPYTHPHLLSTPALAALLSTALSASAPGASFDAAVTCFESAARVWARAGRAFGAAELNVLLRAFCARGRVAEARALFHRYCDAYPPDTRTFNTLLLGFKEAGHVHALDLFYHDAVLRGFVADAVSYCIRMDAYCKKGRFLDALELLDEMRSKGDYKPTLQVFTTLIYGAGIVRNAARARALFDEMEKWGVTPDRGAHNALMGVYVRVRDLQSAMAVMSDMERKGIGLDDVSYNTMLCGFQRVGDLEGIWKVYSKMVSSGFMPRTRTTMLLMKVFCENGRPDLGLELWDYLMGRGCVPHQHALDILVTGLCCRGVVAEAYRCFREIIETGMAPTERAFTVLEGFLRRKREHGKVEEIRQMMKAAQLQGHQIEEEAT

SEQ ID NO: 56465 - protein, 216 aa, Zea mays
  Coding DNA Sequence Number=SeqID_14686
MDSQDNSWMWAPGMATDLLRIHRILSTLLEIKGIIIVKYIKGRDNIQEITRSLLRAGEQELLCTLEEPMDEHCVRDSKDSVRTTIVEHDKVFRQQGSKLNLKSSPSTSGTNQSARLGNAQHSTPQQVTEDSSLHECKPVNCLSLFSEENSTVKERFHRETHKSVEDESWSASVESDLDLKLSIGPSSHSPKTQHWKAEASIENGMWICGNTGLKKK

SEQ ID NO: 56466 - protein, 311 aa, Zea mays
  Coding DNA Sequence Number=SeqID_14687
  Homolog annotation: Hit_ID=Q339V3; Match level="QueryCoverage=43%, HitCoverage=31%, E-value=9e-27, Identity=50%"; Hit description =Expressed protein
MTGPKRGIELCGSIIIEFDMRIKMGGEEKDDPQLIDGASVVLDDRCMPNSAYAFTRRIYGDSGAVDITVSRLDFAVEATIEVHISEVEGSFSLCVGCFTSGLCEEIQLFKGVIIEPSALRRHVVAAVIDTWMDVKLKLPSSVCPHSLCDVGPPHQRQLPSSARPCLYAVGPPYQSRLLRNRGGPAHTHARREAQPRRLPTRPSSFLSPARTRSISPASFHSRSLSFALCRRRQSPPEIRARRASHPSRPEPRQAVPSTVPSPASMFVESSSPVPASPGDLRSLRACVCPVSDDFAAADRATPITALFTPAR

SEQ ID NO: 56467 - protein, 112 aa, Zea mays
  Coding DNA Sequence Number=SeqID_14688
MGLAASMPRSSVGETSCGEGGGQRQRWRISPTKGASMEARPSPDFGAWRRLEEGACSRYWDSREAGNRHGGEVQGGGKRWSWRRSSSTQGIERRGAGADLGRSHGGAQLLHL

SEQ ID NO: 56468 - protein, 93 aa, Zea mays
  Coding DNA Sequence Number=SeqID_14689
MEKLADQGSWYGGEASPNFGAGKRLEEGDEESRWGRRMLTLLGSERIREPTWRGGATKAEPAPTRWVASSAGVKHGDEVKKRVTGRRKKCCGG

SEQ ID NO: 56469 - protein, 98 aa, Zea mays
  Coding DNA Sequence Number=SeqID_14690
MESSENLVLLSSENPVVGAIMESYIPASVEPSFVESANPVAGAMVESYIPASVEPSNAVSSRDSIAVKEKKRKRGKEVDYSWKFTEFGVIRSRDKCRN

SEQ ID NO: 56470 - protein, 71 aa, Zea mays
  Coding DNA Sequence Number=SeqID_14691
MALYLFAASTLQKRPSVFVKLIHGPDQWRAVSWRSCGLALVFPVEEPVTGDPGDQQIKVAEQELIEGKLCP

SEQ ID NO: 56471 - protein, 177 aa, Zea mays
  Coding DNA Sequence Number=SeqID_14692
MERGRAASIAEFRDVKRVCGCARLTEDAPTGGRTKPEREFEDEFRTDVWAPNVMLHTANPLSREGCRHFEVFEQSNEDLDMWVFQVDDVPFKQSVGALFDRMWGSHSRSVARERVAWAMEQAQKDEETKYLDCLEGSLATLDDVGVETGSEEQSSRAGVDIGEPSATETSHRSAGEV

SEQ ID NO: 56472 - protein, 145 aa, Zea mays
  Coding DNA Sequence Number=SeqID_14693
MNKNTLALKVPSHTELRLPLRRYEQPHKTGEPAERSWADGRPAATRSDNRGNHPRPGRRSSFGSGFGAGVTTEGLSPAGDENQPFRPGDGDPGLLAGLAISSVEKPPPAADASKRAGRLPPQSEPPRAWAPHSRYAAQPSSGRKA

SEQ ID NO: 56473 - protein, 230 aa, Zea mays
  Coding DNA Sequence Number=SeqID_14694
  Gene Ontology: Mol. function=ATP-dependent helicase activity
  Homolog annotation: Hit_ID=Q2QXQ5; Match level="QueryCoverage=64%, HitCoverage=32%, E-value=8e-37, Identity=50%"; Hit description=ATP -dependent RNA helicase, putative, expressed
MDPKGKGIVINDNEKEKRRIKKIVYYDDSDESSSSQKDNCNTLNLGNRPATRAPVDPPPLHSPTVGGRLAEVAQPVQPRWRRAMGAEEDRGGFDRPCGDIIHGADNWGMELWRCCSAQASSDVLNAIDTCATVLQTVWLVSKTCDNVSRKEKHEMIVSCPFLLYLVSSQDKAVQIFGLKTCEREFLIATTKRLLNLVSLKAIDISGVSMLVIDGLKCLIDHHINDKIFSD

SEQ ID NO: 56474 - protein, 279 aa, Zea mays
  Coding DNA Sequence Number=SeqID_14695
  Homolog annotation: Hit_ID=Q2QXQ5; Match level="QueryCoverage=33%, HitCoverage=16%, E-value=8e-19, Identity=52%"; Hit description=ATP -dependent RNA helicase, putative, expressed
MDKEKKRNIKEKAQNSFPFISPFLGRSATLAHAPSPPPPPPHPARAPGPLRAPTAQLDRAPGSLPQRALPAHPARPSAQAPTPRSPGQRPLPGPATAAHPARSRGRARPSCLAPAWANVAPALAPPGPPATLSNYSSSLGTLRDLRSHSAKNRPATRAPVNPPPLHSPTVGGRLAEVAQPVQPRWRRVMGAEEDRGGFDRPCGDIIHGADNWGMELWRCCSAQASSDVLNAIDTCATVLQTVWLVSKTCDNVSRKEKHEMIVSCPFLLYLISSQDKAVQ

SEQ ID NO: 56475 - protein, 115 aa, Zea mays
  Coding DNA Sequence Number=SeqID_14696
MGAVIITCKLASRKESVHKSGGARKREGGIRAEAETREEAHGRSQWLRETRVRMHGVGGLMRGGDGAKDFAAWEELGPGKRRGRKKGTKNKGSAEVIKKLGDATLLFAEEKFNEV

SEQ ID NO: 56476 - protein, 79 aa, Zea mays
  Coding DNA Sequence Number=SeqID_14697
MSRTQQQQMAAQLHEQSQACSRERQAGETETGHAVSIVTDKRFLITFPYTGRLRVEGHAMWSGGTTTSRSWQDGTPPLT

SEQ ID NO: 56477 - protein, 75 aa, Zea mays
  Coding DNA Sequence Number=SeqID_14698
  Gene Ontology: Mol. function=oxidoreductase activity
  Homolog annotation: Hit_ID=Q2QYY6; Match level="QueryCoverage=64%, HitCoverage=12%, E-value=8e-11, Identity=69%"; Hit description=Trans- 2-enoyl-CoA reductase, mitochondrial, putative
MIDYLFLMVLVHEGKLKCQMESISFGEFSLALEKAMGKHGSQPKQVIKFWDQGGLEDLRAYDCHRSVSMMNPTVS

SEQ ID NO: 56478 - protein, 364 aa, Zea mays
  Coding DNA Sequence Number=SeqID_14699
  Gene Ontology: Mol. function=binding; Cellular component=thylakoid; Biological process=photosynthesis
  Homolog annotation: Hit_ID=Q2R7H8; Match level="QueryCoverage=96%, HitCoverage=40%, E-value=1e-157, Identity=76%"; Hit description=TPR Domain containing protein, expressed
  Pfam annotation: Domain name=TPR_2; Domain location=197-230; Score =3.8; E_value=12; Accession=PF07719.7; Description=Tetratricopeptide repeat
  Pfam annotation: Domain name=TPR_2; Domain location=275-308; Score =12.8; E_value=1.1; Accession=PF07719.7; Description=Tetratricopeptide repeat
  Pfam module annotation: Pfam domain module=TPR_2::TPR_2; Domain location=197-230::275-308
MGRWTKAVEGALMVKSMRKLPNIVLHERVKVLGEQRPDSVFQGLRPIASPDELQKANRAKKLIEKRTAANEELKHDYLKHSSIGYLNTQVEVSLCRTLALLQRYWDALQIINRTLKLGNDALTGDKKEELRSLGAQIAYRAPDPSHGFKYVRYVVQQHPYSLAAWNSYYKVVSRIEDRFPHHFKYLLRTREANPDCVPPIIISGHRFTAISQHQSAARDYLEAYKLDPENPLINLCVGTALISLALGFRLQNKNQCIVQAFAFLYRYLRLCDNSQEASYNIARAYHHIGLNTLAAVYYDKALSTEEKDHPIPKLPYEAGSRAPEDLRPGYCDVRREAAFNLHLIYMKSGATDLARRILKTYCTV

SEQ ID NO: 56479 - protein, 154 aa, Zea mays
  Coding DNA Sequence Number=SeqID_14700
MEISPHSRNAGVNAATGVAHADDSLFADNVEIAECKGVEPLSRCRASGSCGRYSCRERRKRQAGQVAGTSATRGKACDAPGGAKVTVAQEGAIYKVGDTVVKEVAVDEDDDVKSPWTRPAPCLPRLETRRRRMHVPMLPVPHVPGRRPQPSVSV

SEQ ID NO: 56480 - protein, 120 aa, Zea mays
  Coding DNA Sequence Number=SeqID_14701
  Gene Ontology: Mol. function=protein dimerization activity; Biological process=DNA integration
  Homolog annotation: Hit_ID=Q2R1H1; Match level="QueryCoverage=60%, HitCoverage=29%, E-value=2e-21, Identity=64%"; Hit description=HAT family dimerisation domain containing protein
MTLIDMARTMLGEYKTLERFWSEVVNTACHAINQLYLHHLLKKTSYELLTVATATVERAFSTMNIIKTERKNKMGDEWMNNIMLCYIERDMFVDIHDEKILKHFQGLRTRKINLPRSINS

SEQ ID NO: 56481 - protein, 69 aa, Zea mays
  Coding DNA Sequence Number=SeqID_14702
MEQGKERPVTQMTPLLPHLDIIVGGGIKMLDNPNHHVKQEGRGKPKLKPLPGAPNVGAKYALNGDVWWS

SEQ ID NO: 56482 - protein, 108 aa, Zea mays
  Coding DNA Sequence Number=SeqID_14703
MAIASRVSRLEADAARLRRDLADRDRAEADLRACLADSDARLAAALDENAKLAKERDSLAATVKKLTRNLAKGIFVPNMDRFNEESEHGLTVAKRSNLNPLLDEKDKP

SEQ ID NO: 56483 - protein, 266 aa, Zea mays
  Coding DNA Sequence Number=SeqID_14704
  Homolog annotation: Hit_ID=Q6ASS2; Match level="QueryCoverage=94%, HitCoverage=100%, E-value=3e-45, Identity=62%"; Hit description=Zinc finger protein, putative
  Pfam annotation: Domain name=zf-LSD1; Domain location=137-161; Score =47.8; E_value=3.7e-11; Accession=PF06943.3; Description=LSD1 zinc finger
  Pfam annotation: Domain name=zf-LSD1; Domain location=175-199; Score =56.4; E_value=9.7e-14; Accession=PF06943.3; Description=LSD1 zinc finger
  Pfam module annotation: Pfam domain module=zf-LSD1::zf-LSD1; Domain location=137-161::175-199
MASPRRRGPIRAAYAEPDHVPCLPDPSALPAWRVQRLLRGLPGHHHRAATRFPRFTARFVAWRLSGSSASLGGIGAPACVVPYVSDVRDIQARCITLPARARPTVTQERLQLRAQVGRRGVKPNWTKAGLEMAQLICGGCRTLLMYTRSADTVRCSCCNTVNLVRPVNNIAHVNCGQCRTTLMYPYGAPSVKCAVCNYVTATGVNTVAPTPSARPTSDGSSYSGSSTSAPKSQSQNVTVVVENPMTVDDKGKLVSSVVVGVTAGKE

SEQ ID NO: 56484 - protein, 92 aa, Zea mays
  Coding DNA Sequence Number=SeqID_14705
MTGFGRVGVRVAAGCAGGSQARREAAVAGVRCGMDGIARRACAAASRDGVRVAAGFAGGCGRAARHGRRQAVGFVDNSSGGRLRLAPSRGGG

SEQ ID NO: 56485 - protein, 67 aa, Zea mays
  Coding DNA Sequence Number=SeqID_14706
  Subcellular localization annotation: CTP_CleavageSite=24; ConfidenceScore=5.34e-01
MGSKTLSMKGTFASLTRLRKKTLKDMLAFGNQGSSINIVLRSSPPVTSSWVDLALILRLTWLINVPK

SEQ ID NO: 56486 - protein, 159 aa, Zea mays
  Coding DNA Sequence Number=SeqID_14707
  Gene Ontology: Cellular component=membrane
  Homolog annotation: Hit_ID=Q69P43; Match level="QueryCoverage=83%, HitCoverage=27%, E-value=5e-48, Identity=69%"; Hit description =Integral membrane transporter-like protein
MAASSSRGAAAAAADDDDEPYLLGFIISNIYATTAARRGMLGTVSAAIVAVTIGLPMSSVVLCLMGILTAVAIADVTIDASIAKNSIDKPTLAPDMQSLCAFSSSLGALVGYATSGLFVHHLGAQGALGVMAIPPTTVVFLGFFIYELKTHRHNFKEKK

SEQ ID NO: 56487 - protein, 744 aa, Zea mays
  Coding DNA Sequence Number=SeqID_14708
  Gene Ontology: Mol. function=protein serine/threonine kinase activity; Cellular component=cell surface; Biological process =protein amino acid phosphorylation
  Homolog annotation: Hit_ID=Q6Z8M5; Match level="QueryCoverage=92%, HitCoverage=96%, E-value=0.0, Identity=51%"; Hit description =Putative lectin-like protein kinase
  Pfam annotation: Domain name=Lectin_legB; Domain location=58-304; Score=170.3; E_value=5e-48; Accession=PF00139.10; Description=Legume lectin domain
  Pfam annotation: Domain name=Pkinase; Domain location=381-665; Score =132.7; E_value=1e-36; Accession=PF00069.15; Description=Protein kinase domain
  Pfam annotation: Domain name=Pkinase_Tyr; Domain location=381-665; Score=86.2; E_value=9.8e-23; Accession=PF07714.7; Description =Protein tyrosine kinase
  Pfam module annotation: Pfam domain module=Lectin_legB::Pkinase::Pkina se_Tyr; Domain location=58-304::381-665::381-665
MAVAACGGGGGRGRSPLSRLSPQLGCLLVVSLLCLRAAVVCRAQVQEQGQLQPLPALEIETYNYTSFDEGNSREQRELAFSRDARIYQGAIQVSPDTGNVGSYQDIMVNKSGNVLLQRRFTMSCRFNSTFSINVFHLPDSSPRPGEGLAFVVAPSRAEPPPGSYGGYLGLTNATLEASSGGGPARSRFVAVEFDTLKQDYDPSDNHVGLNVGSVVSVATADLTAFRIATNSTGPANYTAWVEYDGAARRVAVYMAVRGEPKPAAPVLDSPLDLSQHLPEQAYIGFTASTGADFELNCVLDWALSIEIIPERKSRAWVVAVAAAVPAAAIAASVAAFFLARTLRARRAVEKRQERLERRLTNLPGMPRVFAYDKLRKATGNFDERLRLGRGGYGVVYKGLLPADDARPEGTMEVAVKRFTRDDGKDVNDFLQEVDIINRLRHKNIVPLIGWCFNKGQLLLVYEYMPNGSLDQHLFRRGAHEQRPVLDWASRYAIVRDVAAGLHYVHHEHTRMVLHRDVKASNVLLDAAWRARLGDFGLARVLDQGRESFTDVHVAGTFGFIAPEYSVGHRATRETDVFAFGALVLEAVTGQPALRDGGGDGGGCRLLSDWVWQMHGRGALLGAVDQGLGATGFDHAEAARLLLLALACCSPNPGDRPAMPQVLQVLSKASPPPEVPPFKPQFVWPPEGGAQFRLSDIERTTTGTGDADADGASTRATRSTSYDSFRPHNTADSSDGYFPALSSGR

SEQ ID NO: 56488 - protein, 137 aa, Zea mays
  Coding DNA Sequence Number=SeqID_14709
MAPASGWGRAVGNTRSFVGNALGGLRGWSNLASWTVAGTLAYYLWVKPARQLQKEQELMLFLSTCRHSCGISNCSMWILLVLEVGLYLCLLRMQEERAALAAATDPYRYVEKRKPIPDPQDTGLIYGKKREPTKSQD

SEQ ID NO: 56489 - protein, 204 aa, Zea mays
  Coding DNA Sequence Number=SeqID_14710
  Homolog annotation: Hit_ID=Q6QP54; Match level="QueryCoverage=37%, HitCoverage=25%, E-value=2e-07, Identity=44%"; Hit description =Putative kinase
  Subcellular localization annotation: CTP_CleavageSite=44; ConfidenceScore=5.29e-01
MVSDTLVMVALTGQTARLGKIQAPVCLPASRFRPSLPRGESQATASPAGGGCMSFEEAHDGGATVQLAGGRARLRNDAGTTEAVDVFVDGNEIYPQAPQEAPPRSTLGLGLRRSLRLARPQGSAPASASDNGLRLARPQGSAPASASEDGLRLARPQGSASTSTSGGIASSLGLNLDLGGVSASPDLGLGPTTPQGDHHYPTPS

SEQ ID NO: 56490 - protein, 175 aa, Zea mays
  Coding DNA Sequence Number=SeqID_14711
MDGEELDDQGIILDSTMQQANQTPRLVVPSYLVMMWRASQMLLSWFFMGTHDFVDCEGSVSLLHVDVKQVMVHCPRLRFDWIKHGPDHHGYCGHVLFEDFMTGKNLRLVLALALLESDNGVECEASRACGDRRVKVGEAEFANGGGEEVEGAKGNAASKREGLTTGETQMIEPSE

SEQ ID NO: 56491 - protein, 651 aa, Zea mays
  Coding DNA Sequence Number=SeqID_14712
  Gene Ontology: Mol. function=binding; Cellular component=thylakoid; Biological process=photosynthesis
  Homolog annotation: Hit_ID=Q337L2; Match level="QueryCoverage=91%, HitCoverage=82%, E-value=0.0, Identity=78%"; Hit description=TPR Domain containing protein, expressed
  Pfam annotation: Domain name=TPR_2; Domain location=149-182; Score =9.6; E_value=2.5; Accession=PF07719.7; Description=Tetratricopeptide repeat
  Pfam annotation: Domain name=TPR_2; Domain location=334-367; Score =0.5; E_value=29; Accession=PF07719.7; Description=Tetratricopeptide repeat
  Pfam annotation: Domain name=TPR_2; Domain location=455-488; Score =6.6; E_value=5.7; Accession=PF07719.7; Description=Tetratricopeptide repeat
  Pfam annotation: Domain name=TPR_2; Domain location=490-523; Score =8.6; E_value=3.3; Accession=PF07719.7; Description=Tetratricopeptide repeat
  Pfam annotation: Domain name=TPR_2; Domain location=526-559; Score =14.7; E_value=0.34; Accession=PF07719.7; Description=Tetratricopeptid e repeat
  Pfam annotation: Domain name=TPR_4; Domain location=149-174; Score =3.5; E_value=14; Accession=PF07721.5; Description=Tetratricopeptide repeat
  Pfam annotation: Domain name=TPR_4; Domain location=490-515; Score =7.6; E_value=4.7; Accession=PF07721.5; Description=Tetratricopeptide repeat
  Pfam annotation: Domain name=TPR_4; Domain location=526-551; Score =9.0; E_value=3.2; Accession=PF07721.5; Description=Tetratricopeptide repeat
  Pfam annotation: Domain name=TPR_4; Domain location=83-108; Score =4.0; E_value=13; Accession=PF07721.5; Description=Tetratricopeptide repeat
  Pfam module annotation: Pfam domain module=TPR_2::TPR_2::TPR_2::TPR _2::TPR_2::TPR_4::TPR_4::TPR_4::TPR_4; Domain location=149-182::334
MDGRKRKGKFRNSLRRMAMECLCSGEQLKASDETMRSSDSTITKDFSASGYSSQNGEIEQYLDNGNIEEAELSLREGICLNYEEARALLGRLEYQRGHVEAALRVFDGIDISALVPKMKISIARKTDRRKTHSQWDSPPMPLHAVSLLMEAIYLKARALHDLGKDKEAAQECRMILDIVEAAVPEGLPAGFGKGCKLNEIICKAVELLPELWKSGGFSLETISSYRRSLLNNWNLDGETIARIQKKFAVFLLYSGCEARPPNLHSQLDGSFVPRNNIEEAILLLMILLRKSNLKRIEQDPSVMHHLTFALSMSGQLIPLAGQFEELLPGVLDKKEWLYSVALCYLAEEDDLSALNLLKIILKSGEDSVQLIELLLASKACIEMSIHTEGAFYARRAIANMQGGCKPMAGLANLLLGVALSNQARSAISDTDRASWQCEALEALGNAEKNIHGKDSRALYSLSLENAVQRKLELAAFYAKRLVKLEAGSELRSWLLLARILSAQKLFADAETVVDAALDQTGKWCQGDLLRTKARIQAAQGQFREAVETYTQLLAIIQLRTKSLTAGVCLPKSLPVSSATPSTMSYSVVPPFVIMMSMWKPTVSWRRLKLVVLDRVLVVLVLEDLRGVWLRLWRPIAHAASLPCTLYTYRRC

SEQ ID NO: 56492 - protein, 215 aa, Zea mays
  Coding DNA Sequence Number=SeqID_14713
  Homolog annotation: Hit_ID=Q6ZJN4; Match level="QueryCoverage=37%, HitCoverage=4%, E-value=1e-15, Identity=53%"; Hit description =Phosphatidylinositol 3,5-kinase-like
MNGCSIFAVVISPLIAVHVDKENQIHILNQKPKHHEKLEEEIIDAKYTLTCDRIVSLKDKARKIEESIELTRRDMVHPTEVEIELKKRLDQLTDRLIQKQMQHLLRFCCQFFFDQYGFYSGVPIFREGSSVNENQDDNAPSNASGHRHGGISRHASTSSVDDRSIKSGDDSDGAESTNGRSSNTEISFLENDTVWIPPQAADKEDEAQSGYIMPS

SEQ ID NO: 56493 - protein, 238 aa, Zea mays
  Coding DNA Sequence Number=SeqID_14714
  Gene Ontology: Mol. function=sequence-specific DNA binding; Cellular component=nucleus; Biological process=regulation of transcription, DNA-dependent
  Homolog annotation: Hit_ID=Q84NC2; Match level="QueryCoverage=64%, HitCoverage=86%, E-value=3e-67, Identity=80%"; Hit description=MADS -box transcription factor 31
  Pfam annotation: Domain name=K-box; Domain location=71-172; Score =4.8; E_value=0.00017; Accession=PF01486.8; Description=K-box region
  Pfam annotation: Domain name=SRF-TF; Domain location=9-59; Score =102.2; E_value=1.5e-27; Accession=PF00319.9; Description=SRF-type transcription factor (DNA-binding and dimerisation domain)
  Pfam module annotation: Pfam domain module=K-box::SRF-TF; Domain location=71-172::9-59
MGHGKVELKKIENPTNRQVTFSKRRMGLFKKANEVSILCDAQIRVIIFSGSGRMYEYSSPPWRIASVFDRYLKAPSTHFEEMDIQQKIIQEMTRMKDERNSLRMIMARYMAEDLASFSVQDLSNLEQQIEFSLYKVHLRKQELLDQQLLEIRQREMHMPAEQGGYLCLMVKNLRSFNLSHILDCLKLNFTTTSLLHQLWTRGIVVQDVINTIGGHLLAVHLLPICIHKKFQDITLLIR

SEQ ID NO: 56494 - protein, 54 aa, Zea mays
  Coding DNA Sequence Number=SeqID_14715
MAAGHHVAAPHTGAPQLHQEGILGKKHGATKSVVVRMFRVVVQCVEDLKLSGWL

SEQ ID NO: 56495 - protein, 193 aa, Zea mays
  Coding DNA Sequence Number=SeqID_14716
  Homolog annotation: Hit_ID=UPI0000661122; Match level="QueryCoverage =53%, HitCoverage=98%, E-value=2e-07, Identity=33%"; Hit description =UPI0000661122 related cluster
MEMDEEEMQLVEEGMRASMMKYDLNRRKSVRSFKLQQQICLKAYLGLRSCGSRRCVAANPRRCPAVRITTSKKLVQETNYEHGKRFDPRITTSKKLVQETNYEHGKRFDPRITTSKKLVQETNYEHGKRFDPRITTSKKLVQETNYEHGKRFDPRITTSKKLVQETNYEHGKRFDPRIPETNYDTRKEKCMKR

SEQ ID NO: 56496 - protein, 127 aa, Zea mays
  Coding DNA Sequence Number=SeqID_14717
  Homolog annotation: Hit_ID=UPI0000D9F841; Match level="QueryCoverage =81%, HitCoverage=85%, E-value=6e-08, Identity=34%"; Hit description =PREDICTED: hypothetical protein, partial
MAEGVLTIGSPFWKRLNIHEHPGVRGWALGPEELGRKVPDGTAECARVAGDGTTRGRPAGEETTARGWAGEETARGRATGEETTARGWAGEETARGRPTGEETTARRWVWEETARGGWMFWSPLLGK

SEQ ID NO: 56497 - protein, 154 aa, Zea mays
  Coding DNA Sequence Number=SeqID_14718
  Gene Ontology: Mol. function=mismatched DNA binding; Biological process=mismatch repair
  Homolog annotation: Hit_ID=Q69MM0; Match level="QueryCoverage=81%, HitCoverage=10%, E-value=8e-40, Identity=64%"; Hit description=DNA mismatch repair protein-like
MPMHSPIFYFHQGPQGSKCLHLGIDDKREVVGTTVVVRELFYNQPVRRKQMQSSEKRELHHVKKCVLQIALIHPQISLRLLDNDSEDELLYTEFSSSPLPLISKTFGDDISRCLHEITASDQGWTLSGHISGPADVFCTKEGGPRGSLCGLGHV

SEQ ID NO: 56498 - protein, 167 aa, Zea mays
  Coding DNA Sequence Number=SeqID_14719
MWMLLVLNARHNFEAKFTDACYWHQVSRLREYQGVDSRFDVIARQYLEIVWVIFPVLLPLVCLLTMVELQKLESMQWTIHQIAILSFQKANQSGIDNNLDRAKLGKLGDLRNSWNMLSKQYKEEYEKCIEESKSPDYDKLYKGLEVLADLDKHANSTVIIPLTGSPL

SEQ ID NO: 56499 - protein, 175 aa, Zea mays
  Coding DNA Sequence Number=SeqID_14720
  Homolog annotation: Hit_ID=Q8H458; Match level="QueryCoverage=24%, HitCoverage=24%, E-value=1e-11, Identity=58%"; Hit description =Putative TGF(Transfoming growth factor) beta inducible nuclear protein TINP1
MGCRLIVYHYCLSVLVPTNIQHIVAFSGNASQGGTTLPMIYVLGDSLAPVKNNNNLVTLLKANFLRNNIDYLGHKATGCFSNGKNSIDFLGTKKVGEKQGSRSYHGASCYRQRGSSLNNSLLISSRARVSLQPQGDHIELHQKRHGKHLDHELIGTKGKRFVKKRYAEKAQMKKT

SEQ ID NO: 56500 - protein, 61 aa, Zea mays
  Coding DNA Sequence Number=SeqID_14721
MSVLSCPSLGVVHLFGRGEEAGTGGPATGEVAALCQLDMQQMSSSSDLEQQQPDSASLVEM

SEQ ID NO: 56501 - protein, 44 aa, Zea mays
  Coding DNA Sequence Number=SeqID_14722
MRVEERKNHRVSSGPDDIRLPLDDVRLPIDDARLPPNPFDYPVY

SEQ ID NO: 56502 - protein, 106 aa, Zea mays
  Coding DNA Sequence Number=SeqID_14723
MATERCRTDVKSALYHTGVDYDAFFTILITVSTTTTIPSGRIRYASELPVVASALCSVKMQDTGAGRSPLVQINRQYKGHSIGNTGYKGSGSPPLPYTTNCGAPGI

SEQ ID NO: 56503 - protein, 189 aa, Zea mays
  Coding DNA Sequence Number=SeqID_14724
  Gene Ontology: Mol. function=molecular_function; Cellular component =clathrin vesicle coat; Biological process=intracellular protein transport
  Homolog annotation: Hit_ID=Q7XI39; Match level="QueryCoverage=99%, HitCoverage=36%, E-value=1e-79, Identity=82%"; Hit description =Putative clathrin-adaptor medium chain apm 4
  Pfam annotation: Domain name=Adap_comp_sub; Domain location=1-189; Score=106.1; E_value=1e-28; Accession=PF00928.11; Description =Adaptor complexes medium subunit family
MNYRMTQEFKPPFRVTALIEEAGPARAEVLLKIRADFSASATANTIVVQMPVPAYTMRASFELEAGAVGQTTDFKEGSRRLEWNLKKASTSKDILLNNFNYTLQIVGGSEHTLRAKLTFSQESHGNITKEAGPVNMNFTIPMYNASKLQARPYTFCMVRYLQIAKKSKAYNPYRWVRYVTQANSYVARL

SEQ ID NO: 56504 - protein, 608 aa, Zea mays
  Coding DNA Sequence Number=SeqID_14725
  Subcellular localization annotation: CTP_CleavageSite=67; ConfidenceScore=5.25e-01
MHSPRSRIRVRDPHPNPHRPSGGGRGGGGGCLRRRSPPAPPSPRYRRRPQRHTPPPRRGSDPHPDISAIARHRILLEAGRFAAHYLVAQGVLPDHVLRDREDPPASRGRNLDGGGDPRSSWNDGDWARAWEDDDRQARKSTRWDRRSQSFDDRGKKYHDAGRDVDRGARRTRDYDEPRRPPMSRSYSHNDRRPSGSADGGRVDPRSRSRSRSRARIRRDLDHTKVTDSGIIPADAADDGDCDVHYGHVDEMPRQQRRVPSSVVVADSADQAMATEDGEAEFDIHGLNRTRDVSEDEDGEFAAARLNGEDDVHPLKSVKEPALHRGSQLSNAVEDREAANAPTMVMDACTRETSGEDNAYSEATNEMVAPHPHSEGKPELPASCRPFDLNVVETPDACEMAGDPQADHVSDLVGWIHQQTNCHASEFQGQDERHMLKNGHDLIRYDLNSEAVEDAQDIHLLEDEKLPVGLGIDAHDTTRIQCWRGSHLRLNQNAGELEHENDCVIGEQLLLSDGMDGHLVRDYQMASEPKMGVYDLHSYNLESEKMLLDDGAEKHAHDNCHLHDGQVLFNQSANLQAHNRANERTIPVINLEDDDYEEQSDIREFLESK

SEQ ID NO: 56505 - protein, 137 aa, Zea mays
  Coding DNA Sequence Number=SeqID_14726
MGGSKASTCLEKVVYFKASTVSPDLHGRVPDPWIYSPDPKVGLGPSDIQVGPPVLVLNLHLCQPDPWNGIRTPRMGSGLPTGWSQGPKTEHTQAVNRTQAGVWCRHVSRPSLVWTYPHSLLLLVQAETRCCHVANRA

SEQ ID NO: 56506 - protein, 233 aa, Zea mays
  Coding DNA Sequence Number=SeqID_14727
  Homolog annotation: Hit_ID=Q70KS2; Match level="QueryCoverage=41%, HitCoverage=38%, E-value=3e-26, Identity=65%"; Hit description=BSD protein
MAHTIRKAHSHNLENYSFVPSSVYWADSVQSLLRCSWPIKGQGVCPASHWGDLLGSQGMAAAIPSHIRSFVPAWLHVCAYMLQQYMRLLHLSFTIVEARAMLMQRLQYQSKLETEHLGHHKDDLGVQLRGDTLKDATEAFPFTRWEAASVMPITEIEIEKHPIQVTEVAVVDKSVIEEELPKGHAETSNVLQEAFDDDIDDWFEEADLAGHPTIHIGDEEDVSFSDLEEDDVK

SEQ ID NO: 56507 - protein, 506 aa, Zea mays
  Coding DNA Sequence Number=SeqID_14728
  Gene Ontology: Mol. function=amino acid binding; Biological process =metabolic process
  Homolog annotation: Hit_ID=Q851F2; Match level="QueryCoverage=99%, HitCoverage=100%, E-value=0.0, Identity=78%"; Hit description =Putative ACT domain containing protein
  Pfam annotation: Domain name=ACT; Domain location=141-204; Score =28.9; E_value=1.8e-05; Accession=PF01842.15; Description=ACT domain
  Pfam annotation: Domain name=ACT; Domain location=294-372; Score=9.5; E_value=0.24; Accession=PF01842.15; Description=ACT domain
  Pfam annotation: Domain name=ACT; Domain location=36-105; Score=12.0; E_value=0.11; Accession=PF01842.15; Description=ACT domain
  Pfam annotation: Domain name=ACT; Domain location=379-442; Score =37.1; E_value=6.2e-08; Accession=PF01842.15; Description=ACT domain
  Pfam module annotation: Pfam domain module=ACT::ACT::ACT::ACT; Domain location=141-204::294-372::36-105::379-442
MKYVSGPYFEPDFDPLLDRFGTPGVVVDNETREDCTLVKVDSVNRDGVLLEMVQLLTDLDLVISKSYISSDGGWLMDGKDCSSLFHVTDQIGRKLTDPSLPEFIQRALVPTHRPGNGPSPRFTTCLGNVVGPGGPDVSGCAALEFTVHDRPGLLSSITSVLADNGCHVASGQAWTHNGRAAGVLYVTDTAGGAALLPGRCARIERLVNAVVDARENVTGERHWVRVSEPAQGRVHTERRLHQLMHDDRDYESGPAPTPVDEDLFSVGEKAATARTARRAVTRVSIDSWEERGYAVVKMTSRDRPRLLFDTVCALTDMQYVVFHATVGSQGPLAIQVVSQLLSEYYIRHKDGRTVDNSAERQKVSRCLVAAVERRATHGVRVEVRAADRSGLLSDFTRVLREHGLSLLRVELKRHKDEAFGIFYLVTDTGGEVRAESLRAVQARVAEMDISLDVVKEAPGWPPVRKTSVPAPPAAGSQPQERPRPSLGSLLWSHLGKLSNNFNNIRS

SEQ ID NO: 56508 - protein, 253 aa, Zea mays
  Coding DNA Sequence Number=SeqID_14729
  Gene Ontology: Mol. function=calcium ion binding; Cellular component =membrane; Biological process=homophilic cell adhesion
  Homolog annotation: Hit_ID=Q6BTJ4; Match level="QueryCoverage=87%, HitCoverage=38%, E-value=3e-19, Identity=28%"; Hit description =Similar to CA1621|CaIFF6 Candida albicans CaIFF6 unknown function
MAVGRLLSHGAPDSPVRHRTLFGLGLNLDAGLRSPPRLTPGIELSLDLGRRTPPHPTPGLGLSLDSGRQSPPRPTPWLGLNLDAGRRSLPRPTPGITLSLDLGRRTPPCPTLGLGLSLDSGRRSPPRPTLGLGLNLDLGRRTLPRPTPWLGLSLDLGRRTPPRPTPGLGLSLDSGRWSPPRPTPGLGLSLDLERRTPPRQTPGLGLSLDLGRRSPPRSTPGPGLSLNLGGASASLDLGLGPTTSQGGPSLPYS

SEQ ID NO: 56509 - protein, 255 aa, Zea mays
  Coding DNA Sequence Number=SeqID_14730
MSRRAKHQQQSSAAGSRRTRRAELASLAEAPQIVSNPIFRYEAGPSQPNNSPPGGQLRCVYGPGSLYALVHDPAAAAAAETGSGIGFGEGAQQPLPLPPCRVHPSGRVGPARAVGGPHPHGRVLRRAPHDPFLAAYVACSKSAAEAVDRPHQKRRQKQGRRRKEKEEEEATGKKCGEVLFRGCGVWSGWAAGAKYAGAMSCRYGCAVAGQDGDADADAAKTKTKSEDDAPGGPTLDLSWTPAVLSARALERREQR

SEQ ID NO: 56510 - protein, 189 aa, Zea mays
  Coding DNA Sequence Number=SeqID_14731
  Gene Ontology: Mol. function=monooxygenase activity; Cellular component=nucleus; Biological process=electron transport
  Homolog annotation: Hit_ID=Q7XI44; Match level="QueryCoverage=92%, HitCoverage=17%, E-value=4e-61, Identity=68%"; Hit description =Putative anther ethylene-upregulated protein ER1
  Pfam annotation: Domain name=IQ; Domain location=10-30; Score=10.1; E_ value=3.5; Accession=PF00612.17; Description=IQ calmodulin-binding motif
  Pfam annotation: Domain name=IQ; Domain location=33-53; Score=17.6; E_ value=0.045; Accession=PF00612.17; Description=IQ calmodulin-binding motif
  Pfam module annotation: Pfam domain module=IQ::IQ; Domain location=10- 30::33-53
MWSSSTPRVYRSWVRIQNKFRGWKGRKEFMFIRQKIVKILAHVRGHQVRKNYRKVVWSVGIMEKVILRWRRKGRGLRGFQPEKQLEGPSWQIQPAKAEAEDEYDFLKDGRKQATGRLDRALARVRSMNQYPEARDQYRRLQACVNSLRESQAMQDRMLADSAGTDGGDFMTELEELCRDDGDAPMSTIS

SEQ ID NO: 56511 - protein, 149 aa, Zea mays
  Coding DNA Sequence Number=SeqID_14732
MTRTLLATSDSIRARQFTLSSKGARKRDGWIEPPMQQLPQQQQQIRQSREPSITPVASTTSTTPASIAPAPTSAPPIPPPHFWERDETKMRPLAADPCLLDLQRATAARVCRFRHVLVDSWLPAQQDRAATPLFSTRTQESFLRAQLST

SEQ ID NO: 56512 - protein, 130 aa, Zea mays
  Coding DNA Sequence Number=SeqID_14733
  Subcellular localization annotation: CTP_CleavageSite=65; ConfidenceScore=5.05e-01
MRLHNMCYGTSDPPRRPHGGVAPGTAHVAAMFRPPFTDGSRRSPADLTPAVKFLYELMRRTLLPRMGYRVATTHIQLRLLGALLIHPPQFQATLDASILQFGFYRPASEDTALASVDPLVSGLRDEDEAI

SEQ ID NO: 56513 - protein, 728 aa, Zea mays
  Coding DNA Sequence Number=SeqID_14734
  Gene Ontology: Mol. function=DNA binding; Cellular component=nucleus
  Homolog annotation: Hit_ID=UPI000034EF88; Match level="QueryCoverage =90%, HitCoverage=33%, E-value=4e-58, Identity=30%"; Hit description =DNA binding
  Pfam annotation: Domain name=HSA; Domain location=646-708; Score =37.0; E_value=6.6e-08; Accession=PF07529.4; Description=HSA
MWEVRVVSAGGLRWLLLNCSAFGFWRAWGGTCTRPLHVIVAEPELTSNVHELKARVATFQFWENVAIELCSMGGIAECGVSIDTKASPRRAAIEKAQEELRQEYDVREERRRELEFLEKGGNPLDFKLGHVASLSVQSTSVTEQIAEQNVISEAKGSSAFATSSHGDSVESNDKPGNSLCREGNTADNLTLLDGDASNLGVDKIVKHGTKRTNSAQAEQFLHCDGQNNAKEEDSGLFRLGPKSQAYARRRSKPIRENAYSLSVMYPPIPPLSSQQKDVTGLIPETKTEDNGVSSIGDSKPTSPNSKNMVTNASLLNDKVEMETENVQAIPEGNQAPKNELSNSNNGSPAMEISPNSVPDNSRLTVSDQMATAFVSVESPDAISKVAASRIVCSLPYISNEILKEAQTLEKAGNNPSMVSVVDVHAYGMDNNGAAPYSAVKSASLNENEVDPIHAYAAKAVTEHPYQNENLVPVNADEMADEGLNEILPDDKDDKKDCQLEVSSGPVILNDSSTPVYPEFSNFFYAKDGTEVSNNAVDSKNNAEQHASSNQGKGNMEECKDSDGNNASESSVAQKLVSVIVLPASDTGDVSNFVENDVEKSSRDQEKVAKKEYEDSVVAKKDHEDAILRRARYIEANIKRAGEWSLCNISLEKKQKSHWDFVLEEMVWMANDFTQERLWKNTVAAQMSHWISSRVHTLRASGGIPKPMQIQQPNELEENKLGGVKTRKA

SEQ ID NO: 56514 - protein, 86 aa, Zea mays
  Coding DNA Sequence Number=SeqID_14735
  Homolog annotation: Hit_ID=Q9LRX3; Match level="QueryCoverage=48%, HitCoverage=2%, E-value=2e-11, Identity=71%"; Hit description =Arabidopsis thaliana genomic DNA, chromosome 3, TAC clone:K7P8
MAATAAGRSATTTTEGKTTTMAKKRLENPNNNLLCYHMPAGHSGPGSPWSSFEDQALVVLVHDMGENWELVSDALNSIIQLKGFGS

SEQ ID NO: 56515 - protein, 129 aa, Zea mays
  Coding DNA Sequence Number=SeqID_14736
MAAIGGGGGQPRGRKGVAAKRGVKGKKGWPPRVFVGERNDASDDFYLCIQWPTTLYLIHAPKINFWSTFFWDITEWKVQNENVIIEDCDSDNEDEYASPTYDELAYLLKEYTQIEREIGLHLFLIDFGG

SEQ ID NO: 56516 - protein, 121 aa, Zea mays
  Coding DNA Sequence Number=SeqID_14737
MALPPRLGFGVGYRGWKGRASGGSDDGGADGVGRSVRRGENLGRAFTSQNDQEEAQDTPSSITAVAAHVTQGRAVDPEQPTTVQHADIEPEQFQHFCLLHSLLDCTNILPSPFLSPDVELH

SEQ ID NO: 56517 - protein, 253 aa, Zea mays
  Coding DNA Sequence Number=SeqID_14738
MGSNIVPLPCVTCAATAVMDEGRIQSRPLTLRCLLPSPPAKLSPHAIPHPQHSVAVPRSFLGPSLRSCHVGGWSTVSTTSPDFPATGAVPGSHGAHGREARSHWVHAKGGGAMSSSQVVALTLVMLLGNEMFVSVLGLILESSRKQREQCGSHCQDHASRVRPSSVTAAIRDELDLEEAGVVEALDAKRATVVTAEEACTAAREMEKKAATTAKLAAIAMDKVGFVVVDVASAVAEEANALDSVAHRYLDMNL

SEQ ID NO: 56518 - protein, 271 aa, Zea mays
  Coding DNA Sequence Number=SeqID_14739
MEAEKPRKSKSIGTRRRGVRAGGGWGRSIHPQWRGVGKVCGGAGNGCSDCSLAAEEDAPAPKRRECEEPESVQRSARQSVKAKKTASAMAMTGKKTAQRRSPNDSELSDRCQGRKQTRNHEMNPEKRRDLPRTRWGYSPGEGWTLQPPGTYHAAGGGAGVHGDRAPWAWSELGSRLSGSWHSCAALRLSSNEKTNSMATGNGIAPSGISLGQCFCLCLHEDSTPLVTGDHGSPSIVWCAPDSPVHMRTEGNQGLPNGAPTAPKSIGEIHES

SEQ ID NO: 56519 - protein, 180 aa, Zea mays
  Coding DNA Sequence Number=SeqID_14740
  Gene Ontology: Mol. function=calcium ion binding; Cellular component =membrane; Biological process=abscisic acid mediated signaling
  Homolog annotation: Hit_ID=Q3HRN8; Match level="QueryCoverage=97%, HitCoverage=54%, E-value=2e-62, Identity=72%"; Hit description =Calcineurin B-like protein 9
  Pfam annotation: Domain name=efhand; Domain location=110-138; Score =28.7; E_value=2.1e-05; Accession=PF00036.22; Description=EF hand
  Pfam annotation: Domain name=efhand; Domain location=22-50; Score =22.8; E_value=0.0012; Accession=PF00036.22; Description=EF hand
  Pfam annotation: Domain name=efhand; Domain location=66-94; Score =18.2; E_value=0.03; Accession=PF00036.22; Description=EF hand
  Pfam module annotation: Pfam domain module=efhand::efhand::efhand; Domain location=110-138::22-50::66-94
MVLHQEELQLALFKTPSGENLFLDRVFYLFDEKKNGVIEFDEFIHSLSVFHPLAPIEDKIDSCISYVSVAFRLYDLRQTGFIEREEVKQMVIAILMESDLKLSDDLLEAIIDKTFEDADADKDGKINKEEWKEFALRHPNLLKNMTLPYLRFTPDLLIFMKSRDITTVFPSFVFNTAVED

SEQ ID NO: 56520 - protein, 65 aa, Zea mays
  Coding DNA Sequence Number=SeqID_14741
MELRRPPQARALPDQRVGVLGGGKVAVPLAPRVAPRSEPTPEQEQDAASGNGERRGAASSSAAAG

SEQ ID NO: 56521 - protein, 455 aa, Zea mays
  Coding DNA Sequence Number=SeqID_14742
  Subcellular localization annotation: CTP_CleavageSite=76; ConfidenceScore=5.24e-01
MMMPEFQLQVSQGNNHAVHFSGPPYSNTGASSPVQSLPAQQSQPHQMPQQSHMYGNTHLLHTQGTNQSNPQQQQAYAMRLAKERHMQQMMPQQQRPLSVASAVSAVQNGSPMQQQSQGSATCVIPATQTQHKQQYPAQNAQGSSMLPHQPSATTTHKQKKQQGQQQPRQNQQQRNQGSQQAKLMKSLGRGNMMQQSPVDVIQASGISTSCKDQVPDKNMMQQGPGHFVVSKGSIPLIPQPGNQPNVYTSQMPPSPMQTPDISNQGAVKGSSNHALLTSQQGSLHTPSQLAQQQQQQLRFMNPSQNNMQRLIMQQNRHVNTDGRIELPADQVQHNQVMSSASLARSTDSGSPGISSISQRKQESSHDPSAITSTSQLASSPQDTFVGSDRVLPSSSQSMPQRQMSGGVPVHGYGIGGQVQLQQSRQQLQSQQQQQQQQRPVVQGGVYAHPSNSGQG

SEQ ID NO: 56522 - protein, 229 aa, Zea mays
  Coding DNA Sequence Number=SeqID_14743
  Pfam annotation: Domain name=zf-CCHC; Domain location=91-108; Score =18.0; E_value=0.0011; Accession=PF00098.13; Description=Zinc knuckle
MDQEEEPDSSKSYAFACDEHKRMKGKTKAPSSSEEEEDDDDQASTSSSNDEEIVQHVGKVMWMIHKINLMGVHLQVEDLLFNIDRKKQRKRYYFACGEKGHFRDNCPNMVKPIKRRSKGKALTSVKTWDDSSSEDDLPRTCSHRSSSRSSRSSHKCFMARETFANLNCELTTKTEQIEYKAPSSTTDDNLVKKNEKLKAKLASSQDTIENLLEKIEILSIHNNELITKL

SEQ ID NO: 56523 - protein, 121 aa, Zea mays
  Coding DNA Sequence Number=SeqID_14744
  Subcellular localization annotation: CTP_CleavageSite=63; ConfidenceScore=5.19e-01
MAYQMLPVWVHSYTLSALQFGGPHLLVTIAILPKGKVFFRTFSLRPSFMSQSEFVDYNKLILRGATVGAFVFRRYLRTQNKTVHDMKSMVETKVDAVPKLRAKELRLNGRKRNRLKGEKAI

SEQ ID NO: 56524 - protein, 78 aa, Zea mays
  Coding DNA Sequence Number=SeqID_14745
MAPEARLGCCQPHSVEWHSSRSDTGGAVFLSDCNLADREYVLIPEQGGAHEGVQEPAPEPATEDLPAPAFEGKPRFYA

SEQ ID NO: 56525 - protein, 105 aa, Zea mays
  Coding DNA Sequence Number=SeqID_14746
MEARRALRYRVHGRRSRRSRYQKPGVKKKTCKVKVDRVEKSCGSHSTVQPGGRVDGQVTPATMSSKQHGSSSLISCEKQTIQMEFLTMQVTALVPTISGMGDYVS

SEQ ID NO: 56526 - protein, 86 aa, Zea mays
  Coding DNA Sequence Number=SeqID_14747
MEELGEGAMGADPCCRRWNKRGDVVGKGLCLLPSAGRSSGGEGLLLKAVLAAAIGEHGWHAAELSFLRGTEKNTHWTAVYVVFCLE

SEQ ID NO: 56527 - protein, 86 aa, Zea mays
  Coding DNA Sequence Number=SeqID_14748
MAYFFSGFASQRERVFWFGSNGCRAVAPVAEAFFGGMTKTKVMKDIPSYIEGMMEKIETILDYIWYLRLDRQQRYERDAKANAKSA

SEQ ID NO: 56528 - protein, 136 aa, Zea mays
  Coding DNA Sequence Number=SeqID_14749
TLTTTSTTGAISQQRERFGPTTGFQEEMRYDDRYTPLLERAGLDVVSFQVCRGLPTFNPMALTAMVDRGSRPSLGEYFLMTYEAAPEAHNCLPLGQVQEPFARHQRAYMEYSNELDALTPSMVTWQPYHEPAFAHI

SEQ ID NO: 56529 - protein, 178 aa, Zea mays
  Coding DNA Sequence Number=SeqID_14750
MPQLFNLLPPRVGRCSSGHHSESFSKLQFHLPGPDRERFLVCRAVANHGQCVGASHRQEKTLASRDPSHSSFLNVTTFEDAVICSLADTDRDPIMSHVFSRITLMPRSCRAQCCGILTVCACAKLWPSKSTDSQRDPLTVKVRTQQALPQDKEAITCQNSMLVKAQFVTLNLYHHSQL

SEQ ID NO: 56530 - protein, 521 aa, Zea mays
  Coding DNA Sequence Number=SeqID_14751
  Gene Ontology: Mol. function=zinc ion binding; Cellular component =nucleus; Biological process=regulation of transcription from RNA polymerase II promoter
  Homolog annotation: Hit_ID=Q9C8E1; Match level="QueryCoverage=88%, HitCoverage=71%, E-value=1e-151, Identity=56%"; Hit description=RING zinc finger protein, putative
  Pfam annotation: Domain name=YDG_SRA; Domain location=81-239; Score =261.5; E_value=1.7e-75; Accession=PF02182.8; Description=YDGSRA domain
  Pfam annotation: Domain name=zf-C3HC4; Domain location=332-388; Score= 25.3; E_value=0.00022; Accession=PF00097.15; Description=Zinc finger, C3HC4 type (RING finger)
  Pfam module annotation: Pfam domain module=YDG_SRA::zf-C3HC4; Domain location=81-239::332-388
MVQQPRINSAIVSAIRAARMSKNTNPAAAGSSAGSHHYIQNVDRPDRAYTTERAKRGGKANASSGQIFVTTAPDHFGPILAEHDPRRNTGVRVGETWEDRLECRQWGAHLPHIAGIAGQSRFGAQSVALSGGYEDDEDHGEWFLYTGSGGRDLSGNKRTNKEQGFDQTFVKMNEALRQSCLRGYPVRVVRSHKEKRSSYAPELGVRYDGIYRIEKCWRKIGVQGTFKVCRYLFVRCDNEPAPWTSDDHGDRPRPLPNIPELKDATDINERDERPSWGYDEKEGRWKWMYEPPTSRKPVRTGLRPKTGKQARKRARSDEMPNDPEKLLNEFSCCICFQVMAEPLTAPCGDSFCKACLLGAYDNQSSVRERSHGGRTLRAQKIVKRCPSCATDISDFLADPQINRDIMDVIESLQRKGDTTTKDDAASYGYGADKAEEFRGGDLQEEADPEMDAEDNSESDTDADASCGRTVVGIKDQEGQQLQPQKRKGGVAIIGTDDGPSKRITASADVEQKGWNTSTVVV

SEQ ID NO: 56531 - protein, 116 aa, Zea mays
  Coding DNA Sequence Number=SeqID_14752
MEALLTDDQQHFDDLIRRKEEETDHVRVSPDRLAIAWTIRRISLDRLTLCESTRRPPRSRCTWLDYSGTTLDNLALSRTIWPLTLDRSGMEQPKQCHIRLDSLDMASDRSTRLWTI

SEQ ID NO: 56532 - protein, 146 aa, Zea mays
  Coding DNA Sequence Number=SeqID_14753
MAVMCSTLEKMYLYQGKRWQAPEETCTRRHSDMAQLMATGAREARGHGDELGASEQRGATLERERVASLEEQGAWQPWKGSTTAMRSRGARLRRKRKEPSAMGTKAGSRLASWRWPATRAGKEQRDVHAGELQGARLGKELGAKLG

SEQ ID NO: 56533 - protein, 61 aa, Zea mays
  Coding DNA Sequence Number=SeqID_14754
MAVLSVEARTVHVLGRTNHKTRLMVDPIEEKSSKGCSRVGRPPGASVIGVESKRDGCGRLN

SEQ ID NO: 56534 - protein, 89 aa, Zea mays
  Coding DNA Sequence Number=SeqID_14755
MNSGDAKAKDLCAQERTFSGEYQMWESSSASAEKATIFGPIARRRQGSTAEHHNVMAKDCSCITPALGRGDSCAECSTRQRRILCRVQH

SEQ ID NO: 56535 - protein, 73 aa, Zea mays
  Coding DNA Sequence Number=SeqID_14756
MAPAETKVQDVPKKTTDTSPSSSIGVSEILKTKEKGIEQSLGGKETALATGGNARGQKKWRMMNIMKAIQKTP

SEQ ID NO: 56536 - protein, 79 aa, Zea mays
  Coding DNA Sequence Number=SeqID_14757
MDGMFSKIKLGGGSIRAMMGSTSEKMYLCQTNTRKANTQWEWRDGESSVYPPWQEDGRWCIYALGWREPGLVLRTSVAS

SEQ ID NO: 56537 - protein, 64 aa, Zea mays
  Coding DNA Sequence Number=SeqID_14758
MDGMFSKIKLGGGSIRAMMDSASEKMYLCQVKRSWARKRIHIPNLSSNYVHLQGCLRSIGQGQL

SEQ ID NO: 56538 - protein, 187 aa, Zea mays
  Coding DNA Sequence Number=SeqID_14759
MCHVGHLLLITSWYQKHGNPKLEDGVLLPLVTSSSRGNLKGEEATSSQVEATIVNPFEGLGEDNDDIDTEEDNTMIRPTKPSHVDFRKSRLKEDTLRLQPKLWCFLPSKRPLAIVASEIKEITASEHLLSSEEEEDEEHIAPVMSSFFSDDDEDHYAQARATTVAVMTRMDMIQHATTAMVPESLKV

SEQ ID NO: 56539 - protein, 479 aa, Zea mays
  Coding DNA Sequence Number=SeqID_14760
  Homolog annotation: Hit_ID=Q6YU97; Match level="QueryCoverage=67%, HitCoverage=67%, E-value=6e-72, Identity=60%"; Hit description =Putative amino acid transport protein
  Pfam annotation: Domain name=Aa_trans; Domain location=276-479; Score= -96.1; E_value=0.00046; Accession=PF01490.8; Description =Transmembrane amino acid transporter protein
MKLLVVIVSSSEVGANVGHFLLITSWGVIVFFSFLLAAQVFNAFPFHWFTCEAFPDAEGGGFGAHLRQAVPSPAPNRAMLWRSSALPLPRVPAVPWDMRNSVSERSFLIESDDDDDAAVEDGKRRGLGGGGGGDDDDDGSDSSSPCDSPRVVAARCSQPSSYTQQWPQSYRQSIDMYSSVHSPNLSFLGTPSLSRLSNSFLTNSFRGKPPEIISSLIKPLLPTSIASASDDQQQQQHEDVRKSSHYLPPSRKASSLQRIPEDQRPMVGGHEVGPYRQCSYTQGVMNGVNVLCGVGILSTPYAVKQGGWLGLVILAVLGALAWYTGILLRRCLDSKDGLETYPDIGHAAFGTAGRIIISATGGVIASIVIVSCLFWVGLVDHVGTVESEGTALNLPGIPIAIGLYGYCYSGHGVFPNIYSSLKKSNQFPAVLFTCIALSTVLFAAAAIMGYIMFGESTESQFTLNLPPNLVASKIAVWTT

SEQ ID NO: 56540 - protein, 63 aa, Zea mays
  Coding DNA Sequence Number=SeqID_14761
MEQSGLGYLERQEIGISSRDSETTDQAKDEGKKSFEVASAWEKVKKAEEPKAKGEEEGLQSQG

SEQ ID NO: 56541 - protein, 150 aa, Zea mays
  Coding DNA Sequence Number=SeqID_14762
MCECGTASIAPRVHDEGKQEGCTAAVTMNRHESQAQLPSEHATGFHAGRRRRCYAASRPGSRAPTPPHPSKQARARGHSPAATSGRAAASRRNHRSSLRAIRMQKKEKEIVVRTGRPSRATTVSRSCRHHISQALPPRRPASSAIGTYKK

SEQ ID NO: 56542 - protein, 58 aa, Zea mays
  Coding DNA Sequence Number=SeqID_14763
MTPSAVDSTPARVTRGNLCVGRGYADELAVWDYSGAAALSTRWGRQGMALDFEICGQD

SEQ ID NO: 56543 - protein, 168 aa, Zea mays
  Coding DNA Sequence Number=SeqID_14764
  Gene Ontology: Mol. function=transcription factor activity; Cellular component=nucleus; Biological process=regulation of transcription, DNA-dependent
  Homolog annotation: Hit_ID=Q10EE7; Match level="QueryCoverage=93%, HitCoverage=23%, E-value=3e-17, Identity=46%"; Hit description=AP2 domain containing protein, expressed
  Subcellular localization annotation: CTP_CleavageSite=81; ConfidenceScore=5.00e-01
MDTPGLAADDGETQDPSGSGQASLGATAGLAKSMARLALTPPRSGLCSRELLLTLGASDDAFDTCALALPPVPAVSTDTVSCSRDRQQVLVLLPLPSAPLDSGRQRRLDLAAGVRHAAAGLHQRHGGATAFLPAPYLVAREQRAAVHDLVHVVARGVEVGDRVQAPGT

SEQ ID NO: 56544 - protein, 479 aa, Zea mays
  Coding DNA Sequence Number=SeqID_14765
  Gene Ontology: Mol. function=transcription factor activity; Cellular component=nucleus; Biological process=regulation of transcription, DNA-dependent
  Homolog annotation: Hit_ID=Q10EE7; Match level="QueryCoverage=69%, HitCoverage=50%, E-value=5e-79, Identity=47%"; Hit description=AP2 domain containing protein, expressed
  Pfam annotation: Domain name=AP2; Domain location=315-368; Score =24.0; E_value=1.1e-06; Accession=PF00847.10; Description=AP2 domain
MDGAADGSSGVPVQQQHHGGLFYPPVISSSLAPFCYALGGGQGGLATSAADGGEEFYAGLSSMPLKSDGSLCIMEALRRSEQERHGVAVSSVSPKLEDFLGASASTAMALSLDSPSFYYGGAHGHGGYLQPLQCSMVPVSLGDDVYGGCHAQMVDEQSAAAMAASWFSARGGGGCYDVNGAGAIEPSQGHPHALDLSMSSGTAHVAVPRRHQVSLVFSPFPDRPYAAAVAVPHESLTGRVRGFHRAKSRHRWTGRYEAHLWDNSCRKEGQTRKGRQGHMVQVEDYREQLEEMKNMTRQEYVAHLRRKSSGFSRGASIYRGVTRHHQHGRWQARIGRVSGNKDLYLGTFRAPLSPAKGVSMCLPSHLLSIPSRYRFIRLEKKPPTAKLNSYLSRIMMASASAPLPGYPLPSPRPRVTFKGAGCPVPMIENRASPMDALAGWPSPKECFALRAFGALAHCIATAAPVVVSLLSRMQPACFS

SEQ ID NO: 56545 - protein, 85 aa, Zea mays
  Coding DNA Sequence Number=SeqID_14766
MDRSVGHQAAVAVQDKEAKELASRGSGAKDDDGLRLAGTPAGVTAPGVVVVLAATCVCPAPVSAGSPLVGTKVLLASQRSGTEVG

SEQ ID NO: 56546 - protein, 258 aa, Zea mays
  Coding DNA Sequence Number=SeqID_14767
  Gene Ontology: Mol. function=ATP binding; Cellular component =phycobilisome; Biological process=photosynthesis
  Homolog annotation: Hit_ID=Q75KB2; Match level="QueryCoverage=89%, HitCoverage=62%, E-value=1e-56, Identity=54%"; Hit description =Expressed protein
MDRLVVFSRRRRRWILLAAAGAAAAVGAYKIYHHPAVAERRRRLVRLAAAIAAFADAAASSADAVALVTSDLADFVHSDADEVPRSVKQLAKLAASPEVSATVSTLSEAVTSGILRGSGSSSSGPASGGTVALSDRLVDRLFSDSGERLASAVAGSFARHLVLAFYSAPSPQGEASSSPTMWVNVVATGKCRKAISNWVEVFVGTAVREFIDKTIHINTYEQLFEGLTNPRHDAKDGARKGGGSVVDSGLRVVRNPNS

SEQ ID NO: 56547 - protein, 71 aa, Zea mays
  Coding DNA Sequence Number=SeqID_14768
MKMIKVVTQEDLHLLMSHHLILHFLRPPLVLLLALVQWTMAVEEEVRDEEYGVSFITEEDEEEDYDDSSYF

SEQ ID NO: 56548 - protein, 121 aa, Zea mays
  Coding DNA Sequence Number=SeqID_14769
MAHGAASRAPTGRLLQRDPGGNQWLVHRSQARGRRAVAEHLGQASGFTAGLYAGARDLAMRIWRSDPRGGRGVCLRRAILAGKKKTGWREGPLTAEVAVVDARGEKMTSDSTDPRVRERDN

SEQ ID NO: 56549 - protein, 45 aa, Zea mays
  Coding DNA Sequence Number=SeqID_14770
MTNSTVTTALDLCCDRGKGRVSTRLRRSLVGWAQAPSHNSAWVEE

SEQ ID NO: 56550 - protein, 210 aa, Zea mays
  Coding DNA Sequence Number=SeqID_14771
  Gene Ontology: Mol. function=transferase activity; Cellular component= cytosol; Biological process=Mo-molybdopterin cofactor biosynthetic process
  Homolog annotation: Hit_ID=O74841; Match level="QueryCoverage=61%, HitCoverage=56%, E-value=6e-21, Identity=41%"; Hit description =Probable FAD synthetase
  Pfam annotation: Domain name=PAPS_reduct; Domain location=31-159; Score=-37.0; E_value=0.00038; Accession=PF01507.9; Description =Phosphoadenosine phosphosulfate reductase family
MEIEQAMRGSSDVRLRAKYDAAVYIVRRAYALYPASSGGDVDDDSTVLQTVKNCPMRTIYFEDPDAFPEIDCFTYETASTYGLPLESIRTGYKSGLEALLKEKPTKAILLGTRNGDPNAVGQQEFSPSSPDWPPFMRVNPILDWSYRYTSIGSVHNTVPNQLLRDGPGGSYRPAYTLSDGSLERAGRAKKTGKRDGSANGTKNNGNETKQ

SEQ ID NO: 56551 - protein, 65 aa, Zea mays
  Coding DNA Sequence Number=SeqID_14772
MEKRARAAYAEASPAWTGTRTFTCCCWLRPLWFYFDNKLKARACVYAASSVGLPSSGDACGVLDY

SEQ ID NO: 56552 - protein, 125 aa, Zea mays
  Coding DNA Sequence Number=SeqID_14773
FGVGHARMRRLDCWKARREPGGVRLRLGRRTVGGGAGVTRRAGEGRSSRARPRGVGRRRGRDTVGGEGTPAPRVWRVLAGGGSRFRAWRRLTVGLGGSGDRRKQASSVSVRERLPDWWAYWAAGL

SEQ ID NO: 56553 - protein, 180 aa, Zea mays
  Coding DNA Sequence Number=SeqID_14774
MPNCQKTKQKLEPVKTEKDARAYRMENGSAAAGFGILPSSHPGRRCAPPARDGDGGLSLWRGGEQLEARAGKGEDGGGEKEKQKASPEERCVGQTGRGAVGPGARRIGRQGSPSRLLSITALPREARVFFFGGAGRDRASCTLRAVVPRRAVGRTGRAGGLALRVSRVRVTRFQSFSRLP

SEQ ID NO: 56554 - protein, 127 aa, Zea mays
  Coding DNA Sequence Number=SeqID_14775
MTKHSEKQWRFQQALAWMVSVDSGDDYAAKQGERCGGWHRRSARGSESRRGGDAESKSDVNCVEKMATRRKEPLTSPILSDLFVSRLEDSGSGYRGKEHAEGRVEEINLALDGWIWNPVGHRTAKKF

SEQ ID NO: 56555 - protein, 41 aa, Zea mays
  Coding DNA Sequence Number=SeqID_14776
MEETRGGDCTTERMEVREPKIRPIYVIRLRSQSSTQLEVFA

SEQ ID NO: 56556 - protein, 57 aa, Zea mays
  Coding DNA Sequence Number=SeqID_14777
  Gene Ontology: Cellular component=integral to membrane
  Homolog annotation: Hit_ID=Q5JM42; Match level="QueryCoverage=98%, HitCoverage=42%, E-value=4e-22, Identity=78%"; Hit description =Abscisic acid-induced protein-like
  Pfam annotation: Domain name=TB2_DP1_HVA22; Domain location=4-57; Score=-6.6; E_value=0.00015; Accession=PF03134.9; Description=TB2DP1, HVA22 family
MGVLGTLARNLDALVGYASMRAIESPSSLDDQQWLTYWVLYSLIALFELSCWKVLQW

SEQ ID NO: 56557 - protein, 68 aa, Zea mays
  Coding DNA Sequence Number=SeqID_14778
  Gene Ontology: Mol. function=amino acid transporter activity; Cellular component=integral to membrane; Biological process=auxin mediated signaling pathway
  Homolog annotation: Hit_ID=Q5N892; Match level="QueryCoverage=94%, HitCoverage=13%, E-value=2e-14, Identity=61%"; Hit description=Auxin transporter-like protein 1
MTTYAAWYLAIAALLNGQAEGVAHSGPTKLVLYFTGATNILYTFGGHAVTVTFQHESSKRAIREYRTQ

SEQ ID NO: 56558 - protein, 259 aa, Zea mays
  Coding DNA Sequence Number=SeqID_14779
  Homolog annotation: Hit_ID=Q0WP47; Match level="QueryCoverage=31%, HitCoverage=26%, E-value=2e-12, Identity=44%"; Hit description =Putative proline-rich protein
  Pfam annotation: Domain name=Pollen_Ole_e_I; Domain location=132-259; Score=26.5; E_value=4.3e-07; Accession=PF01190.8; Description=Pollen proteins Ole e I family
MAAGKTSSHRNDSLPVPACINIMAACSHRKASLAVAALVAAALLVAASHATPADDKARAPTSAITNKPAEHSAYGSAMPRGSPSPASPAPVNKGVPSPGGTAAPPPGYNSNNATPPSLPLVPPPRPLPFVIVEGVIYCKSCKGKGYNTGIDASPLQGATAMMVCYGRKVVNATGTVTDANGYFLIMFYDMASFSSKTCKMYLVSSPTPQCSKPFYPPNQWIGLSLVRETRTVPPAGLQGIYTPTSVLFYAPAAKGQCPY

SEQ ID NO: 56559 - protein, 262 aa, Zea mays
  Coding DNA Sequence Number=SeqID_14780
  Gene Ontology: Mol. function=sequence-specific DNA binding; Cellular component=nucleus; Biological process=regulation of transcription, DNA-dependent
  Homolog annotation: Hit_ID=Q8S151; Match level="QueryCoverage=63%, HitCoverage=85%, E-value=1e-64, Identity=73%"; Hit description=MADS -box transcription factor 32
  Pfam annotation: Domain name=K-box; Domain location=72-171; Score= -8.5; E_value=0.0023; Accession=PF01486.8; Description=K-box region
  Pfam annotation: Domain name=SRF-TF; Domain location=9-59; Score =82.2; E_value=1.6e-21; Accession=PF00319.9; Description=SRF-type transcription factor (DNA-binding and dimerisation domain)
  Pfam module annotation: Pfam domain module=K-box::SRF-TF; Domain location=72-171::9-59
MGRGRSEIKRIENPTQRQSTFYKRRDGLFKKARELAVLCDVDLLLLLFSGSGKLYHYLSPTVPTVKDLVERYEAATHSKVWADVRQERRAELEKAERMCELMEKELRFMTVDDGEQYTVPSLELLEHSLEAAVHRVRSEKDRKIGGEIDCLQNIIRGRHEERYGLCDKFFLHLESKIRAELLANLAAACSFSGLEQRRGRWRVDPTKRRRRPGTQTGCVPYATFHYRPTICSTKPTNLKLSAKLQVSTDAGWLGSSRMDRRL

SEQ ID NO: 56560 - protein, 88 aa, Zea mays
  Coding DNA Sequence Number=SeqID_14781
MAYGQSTLNAFFKAETSCIHVQAHGSEHGLAQFGAAIKPITVQANTQVAAGDTGCLVVEVLYQRYEGQMEPRQLHPVTDYTSFGLKIQ

SEQ ID NO: 56561 - protein, 130 aa, Zea mays
  Coding DNA Sequence Number=SeqID_14782
MAPPRAWPVDHIYGRAIDRPAREKETRCYPSRREIESKLGVPGRSSPGFSTPVATAALPVPWAASSAASGLGAGTRLERTPSRSHSLGAASKRWSLPVIGDVAVRAYRVNSQREVDDDVGIVGSCLDDRD

SEQ ID NO: 56562 - protein, 310 aa, Zea mays
  Coding DNA Sequence Number=SeqID_14783
  Gene Ontology: Mol. function=RNA binding; Biological process=RNA processing
  Homolog annotation: Hit_ID=Q9FLQ1; Match level="QueryCoverage=56%, HitCoverage=19%, E-value=2e-12, Identity=31%"; Hit description =Arabidopsis thaliana genomic DNA, chromosome 5, P1 clone:MCO15
MANLFFLFCDLKSPSHMVEVLTTRTKEILVTGGTEEILRVTTEALLSALTTVLDQDALSERISNGEADASLTVASKEADSSEASMTKEQKLKAERLRRAKMFAAIIKSGDKKMNDLAVFAAIIKSGDKKMNDLAASSDPTSEAAKAIPDMNVSGLDQQSVAKEREGSSDPFEHEGPNLTNHNKDSDDEPNRVRKYRKKHRESHEEKDESEDIYKHSRKRHHPEHSRGPSKDVHKHKHKSLKVAQKCPRLDQAAASYFYGIFLADFCTDGIINVVFMWRTASLFCGVEDSSINSLLTVVGQQAAAVFLTVL

SEQ ID NO: 56563 - protein, 124 aa, Zea mays
  Coding DNA Sequence Number=SeqID_14784
MAMQAVVLCKRASKPFDPLDYDSTTDTTMILNRWLETWSRDEVPTSDAHCFPAMYLDALAITETFFCSHVLNLQPPSEKAHQIIARTTLFVSEHGGRAGRNTCGSLARSVHARLGSARLNFFMS

SEQ ID NO: 56564 - protein, 109 aa, Zea mays
  Coding DNA Sequence Number=SeqID_14785
MTKHRTKQRRQNDTQNVEWNKLNWSSNISTKGKAEARHTQKRNEEADSYRYERIEETAQRKIHLYLRGLHLQNPRIHRRQPGRPDSARDRARSQTLRDAVGGGRGEEGH

SEQ ID NO: 56565 - protein, 566 aa, Zea mays
  Coding DNA Sequence Number=SeqID_14786
  Gene Ontology: Mol. function=protein kinase activity; Biological process=protein amino acid phosphorylation
  Homolog annotation: Hit_ID=Q8L594; Match level="QueryCoverage=74%, HitCoverage=81%, E-value=2e-89, Identity=46%"; Hit description =Putative NPK1-related protein kinase
  Pfam annotation: Domain name=APH; Domain location=9-190; Score=-13.0; E_value=0.048; Accession=PF01636.13; Description=Phosphotransferase enzyme family
  Pfam annotation: Domain name=Kdo; Domain location=2-190; Score=-84.1; E_value=0.053; Accession=PF06293.4; Description=Lipopolysaccharide kinase (Kdo)
  Pfam annotation: Domain name=Pkinase; Domain location=7-258; Score =232.2; E_value=1.2e-66; Accession=PF00069.15; Description=Protein kinase domain
  Pfam annotation: Domain name=Pkinase_Tyr; Domain location=7-258; Score=61.8; E_value=2.9e-16; Accession=PF07714.7; Description =Protein tyrosine kinase
  Pfam module annotation: Pfam domain module=APH::Kdo::Pkinase::Pkinase_ Tyr; Domain location=9-190::2-190::7-258::7-258
MAASGRWRRLRTLGRGASGAVVSLASDAASGELFAVKSAGASGAATLRREHAVLRGLRSPHVVRCVGGGEGADGSYQVFLEYAPGGSVADAVARGGGALEERAIRALAADVLRGLAYLHGRSVVHGDVKARNVLLGADGRARLADFGCARTPGFSARRPLGGTPAFMAPEVARGEAQGPAADVWALGCTVVEMATGRAPWGGADADVLAAVHRIGYTDAVPDAPSWMSAEARDFLARCFARDAAERWTAAQLLEHPFVAAPCHGHGDHEAPRVSPKSTLDAAFWEAEDDDDDADEAVSASASERIKSLACSACALPDWDGEDGWIEVLGDQQRVEVCGAVQVARSAPGKVSSVLAVPAGEMDVGGGGGGGGDELEAEDVSFGGEVPGSADASAERQKKRYLILRSHYCHVLSCLDRETGGGFSSLRGTAGGQASADAKNEKKQALRSRKGRQAAASAPFDGERAKRDYPQPTPQRHAAGLVGGGRVGARLMGGRRGGTPADATPASWVPSRRNMPMLCGCLTVPYAVKAQAGTMIYSLLRGVLRKAWVRFGEVNGFGMFEGARRRV

SEQ ID NO: 56566 - protein, 76 aa, Zea mays
  Coding DNA Sequence Number=SeqID_14787
MVEGPIWPEGARGGRSTVRWRALAASQEGEALGAEEGFIYVLELQLGEGGSRVAEAGAFAELGHMKHIVDIRHGFW

SEQ ID NO: 56567 - protein, 281 aa, Zea mays
  Coding DNA Sequence Number=SeqID_14788
  Homolog annotation: Hit_ID=Q5JKJ3; Match level="QueryCoverage=62%, HitCoverage=36%, E-value=5e-07, Identity=28%"; Hit description =Myosin heavy chain-like protein
MGFLPSKDVSGWRLEVEGEVPRPKDDEVIMPTSFYKREFGLPLHPFVHRILHYYQATAINRLSDRPSFNFAPLEARVLQDPIPSSIRYEGEWFYVRHVATSTPSFTGREPVSSSEWQHAGEASLKIEVGNLLRAVKTLKQRGLSSAWLVRTFMHHRIQPLMAGHRPMHQYSGVDDPNHQSPMPLALSEIEARIKFVMTLSSGSFMGKDLPPSLSKDVASTLVSPFSLGIETFVACLPPLPKVAVIERKRTRDTDGEILAEHSRRVRSKKEKGKALNPSTWS

SEQ ID NO: 56568 - protein, 115 aa, Zea mays
  Coding DNA Sequence Number=SeqID_14789
MRGLVLALELLGCSGWLLGQEGEVPSCSDAGTDFLPTGCFDGTVVAAEGTTSGIAASADADAVLQVHGNDEIIPEFLPGDGFKPIFGIHGINRMGKDMGWPLMNSVRLSQGTCGI

SEQ ID NO: 56569 - protein, 55 aa, Zea mays
  Coding DNA Sequence Number=SeqID_14790
MESHDLRAEWESRLVGKVCDLCRVLETGCPQCIQCSAGDAGNMEDFEEFQDYDKF

SEQ ID NO: 56570 - protein, 202 aa, Zea mays
  Coding DNA Sequence Number=SeqID_14791
  Gene Ontology: Mol. function=protein kinase activity; Cellular component=plastoglobule; Biological process=protein amino acid phosphorylation
  Homolog annotation: Hit_ID=UPI000038D61F; Match level="QueryCoverage =88%, HitCoverage=37%, E-value=3e-45, Identity=51%"; Hit description =COG0661: Predicted unusual protein kinase
  Pfam annotation: Domain name=APH; Domain location=7-166; Score=-5.2; E_value=0.013; Accession=PF01636.13; Description=Phosphotransferase enzyme family
  Pfam annotation: Domain name=DUF739; Domain location=7-49; Score= -1.1; E_value=0.082; Accession=PF05339.2; Description=Protein of unknown function (DUF739)
  Pfam module annotation: Pfam domain module=APH::DUF739; Domain location=7-166::7-49
VRHMFDEIDYILEGKNAERFATLYSHGSSGVNSEASTSIKVPKVYWNYTCKTILTLEWIDGIKLTDAERISKANLNRKRMIDEGLYCSLRQLLEEGFFHADPHPGNLVATEGGSLAYFDFGMMGDIPRHYRVGLIQMLVHYVNRDSLGLANDFHSLGFVPEGTDLLAVADALRFSFGDVRRQSNDFQALGEAVSAKLDMENQ

SEQ ID NO: 56571 - protein, 298 aa, Zea mays
  Coding DNA Sequence Number=SeqID_14792
  Gene Ontology: Mol. function=protein kinase activity; Biological process=protein amino acid phosphorylation
  Homolog annotation: Hit_ID=Q4C3T1; Match level="QueryCoverage=74%, HitCoverage=30%, E-value=6e-23, Identity=31%"; Hit description=ABC-1
MRTREIQITMKKINDLSNPGRGSGKRKTRVTVELTSMKEGVMNHLYDVMYEFSFSLPPDYALVIRALGSLEGTAKALDPEFKVIESAYPFVIGRLLADPSPDMRKILRELLICDDGSIRWNRLERLIAAISEQSSESSSASGADSSENANGSPEWRSFDMHSVIAATEDLFDFILSRKGWRVRVFLVQDIVNASDVFLQEATFPYVYAKVGKIGDLNPERSKMIRRLVNTVQSFRQAINLAPDAWSAMLIRTLLKPESQKFVLDVFLALANHSSYKIPETFWLFMSRFLNYLDKQDIL

SEQ ID NO: 56572 - protein, 401 aa, Zea mays
  Coding DNA Sequence Number=SeqID_14793
  Homolog annotation: Hit_ID=Q8S8J6; Match level="QueryCoverage=57%, HitCoverage=30%, E-value=1e-11, Identity=24%"; Hit description =Putative myosin heavy chain
  Pfam annotation: Domain name=Filament; Domain location=91-372; Score=- 178.3; E_value=0.055; Accession=PF00038.11; Description=Intermediate filament protein
  Pfam annotation: Domain name=M; Domain location=222-242; Score=8.4; E_ value=9.6; Accession=PF02370.7; Description=M protein repeat
  Pfam annotation: Domain name=M; Domain location=247-267; Score=9.3; E_ value=7.4; Accession=PF02370.7; Description=M protein repeat
  Pfam annotation: Domain name=M; Domain location=301-324; Score=2.4; E_ value=61; Accession=PF02370.7; Description=M protein repeat
  Pfam module annotation: Pfam domain module=Filament::M::M::M; Domain location=91-372::222-242::247-267::301-324
MENGRIEVTDLTEKLALLEAENEKMTCLNEALKEVDAKLVMFDELQERFSSTLAEKEEAAEKLAVHERTISQLTEVHTRTLELHSVAESKNEEIGAQFLEALETISQKEEQATEAAAAEENRKVKFDEASQKIKILEEQLAETHSKVEHFLTEKESLVQETSSLNKEFEVHQNKLNDLQLALAAALAEKEAAFEEIHSLCKTLDGMIEHKAELEIQVSSTIQEHEELKSKYQNTMEEKQMLSDKYETAKKELEDAIAKLEEEMNVDKSEKESHISKLERQITLSEIKYMEEIKTMQVETTEKNEALTAKMQEHTDLQHEKHELEQQLLEVRKELDGAYHTIVNQEEQASLREIKWDTFRIYSEDRLEAEQQRAEELELQVAALKQQLQEAEVHYKQKVAFI

SEQ ID NO: 56573 - protein, 389 aa, Zea mays
  Coding DNA Sequence Number=SeqID_14794
  Gene Ontology: Mol. function=methyltransferase activity; Cellular component=membrane; Biological process=translation
  Homolog annotation: Hit_ID=Q9DUM3; Match level="QueryCoverage=75%, HitCoverage=43%, E-value=2e-13, Identity=19%"; Hit description =Latent nuclear antigen
MEAEVSAPADLKAPDKTTTILSTTNGHLGLVRFYPNTYGLKGFQSLVHGDDKENIPNGNANLQVKEADNDEDDGTRSDGFELIDVKQNFDSARVEEEMAAPRSTTVDTSPVTEESETQEDKTTAHEEQSVATNTRHLESSMLNQQTEQLEKLTMRIEELESENDKLVKDLTEAENKQSLHYSCLQEAQCSLAMKDKELAEVTESLKDLGSELGTSKKRIQEIEAELDSSADKLCKLEELKDERSLHAAQEAKRASELDKMLELAQSNMKEMEKHIGSLQEEVKGYQDKAADHQQIEESLRNTISELKVVQEALELSKSQVENLKQKLASQDTDFSKLTEELNLHCSSEESLKEKSLKLETELTTVLEELQAKVLSLREAEKWKQNLMSS

SEQ ID NO: 56574 - protein, 74 aa, Zea mays
  Coding DNA Sequence Number=SeqID_14795
MAVVEIDEKTRVRNEYVRVRIAYRDVSVVPCTVESSLGLFIYDFHFEREIQEEDPHDNRDSGIKIDDQDQNNAK

SEQ ID NO: 56575 - protein, 102 aa, Zea mays
  Coding DNA Sequence Number=SeqID_14796
MTSADAFITQGHYVLGHNFGPGSSHNLHDNLNQFDQASSAPTLQQQPFTGNGQLTQGYPGDMHALQFVEPTPQIDHQNGDEGIEQRLNGTNGNWTRILLDMK

SEQ ID NO: 56576 - protein, 148 aa, Zea mays
  Coding DNA Sequence Number=SeqID_14797
MEYERGDRAKRGRGGGGGGGGGGGRGGGGEYGRQHGGAYGGGGWHGHDEGGGYGGGRGGGGYYHQGPRGRGGWRGPGAGGSQAYGSGGGRAWAPGPGEGRGLGVGREYAPVRRAAPAPAPAPREVATAPMVKGSAEFVGIRWFRSVLL

SEQ ID NO: 56577 - protein, 80 aa, Zea mays
  Coding DNA Sequence Number=SeqID_14798
  Subcellular localization annotation: CTP_CleavageSite=53; ConfidenceScore=5.24e-01
MSYQAPPPGTAAYPPPGTAYPPPGQQAYPPPATVRRHPWPPAGTRPPPPPQPQDSKRSNDGFLKGCLAALCCCCMLDMCF

SEQ ID NO: 56578 - protein, 243 aa, Zea mays
  Coding DNA Sequence Number=SeqID_14799
  Subcellular localization annotation: CTP_CleavageSite=73; ConfidenceScore=5.26e-01
MAHVLPRPHPAPHPTRNRRLRRRSPSFAAALPEISIPKPPCRPRYSSPQPSADAMIQNFPRTPARPCRPCAMRSMEGRRRSENLRAHPCGRAVPVLCYLWKACGTPKPPRTPAQPRHPRALLSMEGRRRHPTPDLLSMEGRPRDLLSMESTTAGLPKSPPHPRDRAIHSPMPDLLSNIHHPRDPWTSDSPRAFPIGVAHTIHAPLCPVRQCLSGDGAGSVVAAAAMDKSMLGDLDDLPEEDKM

SEQ ID NO: 56579 - protein, 210 aa, Zea mays
  Coding DNA Sequence Number=SeqID_14800
  Gene Ontology: Mol. function=zinc ion binding
  Subcellular localization annotation: CTP_CleavageSite=30; ConfidenceScore=5.32e-01
MATPSTAGDPAPAGEPVPTPLQGPAQRRISTSRISHIVRTYLDLSSSRKRRSAPKNQPKAGDKERDAAAAETDGSKAGPSSSHPSRLLRELGIRVSRYTHEERRDIILRYMQKRSGRQIVNRAASKVPSRQALAVRRRRGAGGKFLGKDDAQVLDASVSVCTRSHHRLQSHQCLFANLAAQPHQRRSASSCPLPKPDPVHCPSPTSQPKN

SEQ ID NO: 56580 - protein, 191 aa, Zea mays
  Coding DNA Sequence Number=SeqID_14801
  Gene Ontology: Mol. function=sequence-specific DNA binding; Cellular component=nucleus; Biological process=regulation of transcription
  Homolog annotation: Hit_ID=Q6IEM8; Match level="QueryCoverage=55%, HitCoverage=19%, E-value=3e-25, Identity=68%"; Hit description=WRKY transcription factor 53
  Subcellular localization annotation: CTP_CleavageSite=15; ConfidenceScore=5.11e-01
MSPSSYFSIPPGLSPAELLDSPVPLHSSSNFFASPTTGAIPAQRFDWKQAADLIASQSQQDDSKTTAELRSAAPSTTSPSTRPPCPRRPRCSLPSRSSSNSKSKQRPWVGATGRGAQIGGDLGAVVEGRRGRGGGMGGRNGEGRGEDYRRWGGRIGSGGGRGGGCGRGGELTRRRRRSGGRDEGCRGSGAD

SEQ ID NO: 56581 - protein, 275 aa, Zea mays
  Coding DNA Sequence Number=SeqID_14802
  Gene Ontology: Mol. function=transcription factor activity; Cellular component=nucleus; Biological process=regulation of transcription, DNA-dependent
  Homolog annotation: Hit_ID=Q10RX2; Match level="QueryCoverage=32%, HitCoverage=17%, E-value=2e-49, Identity=95%"; Hit description =Cysteinyl-tRNA synthetase, putative, expressed
  Pfam annotation: Domain name=CBFB_NFYA; Domain location=147-202; Score=51.9; E_value=2.2e-12; Accession=PF02045.6; Description=CCAAT -binding transcription factor (CBF-BNF-YA) subunit B
  Pfam annotation: Domain name=tRNA-synt_1e; Domain location=66-271; Score=-37.4; E_value=7.7e-13; Accession=PF01406.10; Description=tRNA synthetases class I (C)
  Pfam module annotation: Pfam domain module=CBFB_NFYA::tRNA-synt_1e; Domain location=147-202::66-271
MWESIRNSANSMRATCHKGNGYEMKHSGHKVCDWDSSSKSDRSHQEASAASESSPNEHTSTQSDNDEDHGKDNQDTMKPVLSLGKEGSAFLAPKLHYSPSFACIPYTVDAYYSGVGVLTGYAPHAIVHPQQNDTTNTPGMLPVEPAEEPIYVNAKQYHAILRRRQTRAKLEAQNKMVKNRKAAKEGEPFWDSPWGRGRPGWHIECSAMSAHYLGHVFDIHGGGKDLIFPHHENELAQSQAAYPESEVKCWMHNGFVNKDDKKMAKSDNNFSRLEM

SEQ ID NO: 56582 - protein, 142 aa, Zea mays
  Coding DNA Sequence Number=SeqID_14803
  Homolog annotation: Hit_ID=Q75GP1; Match level="QueryCoverage=35%, HitCoverage=15%, E-value=4e-09, Identity=58%"; Hit description =Expressed protein
MAIASRVSRLEADAARLRRDLADRDRAEADLRACLADSDARLATALDENAKLAKERDSLAATVKKLTRNLAKLEAFKKQLMKSLSEDNLLMKFRAVTLLQMPPADLQLLNPSMTEWFSPSLFNWPTLSQVLIWSDFTCKSSI

SEQ ID NO: 56583 - protein, 926 aa, Zea mays
  Coding DNA Sequence Number=SeqID_14804
  Gene Ontology: Mol. function=protein serine/threonine kinase activity; Cellular component=integral to membrane; Biological process=protein amino acid phosphorylation
  Homolog annotation: Hit_ID=Q6ZKW6; Match level="QueryCoverage=90%, HitCoverage=88%, E-value=0.0, Identity=54%"; Hit description =Putative Receptor-like serine/threonine kinase
  Pfam annotation: Domain name=LRR_1; Domain location=114-136; Score =10.0; E_value=3.8; Accession=PF00560.23; Description=Leucine Rich Repeat
  Pfam annotation: Domain name=LRR_1; Domain location=138-160; Score =7.6; E_value=11; Accession=PF00560.23; Description=Leucine Rich Repeat
  Pfam annotation: Domain name=LRR_1; Domain location=162-184; Score =13.3; E_value=0.88; Accession=PF00560.23; Description=Leucine Rich Repeat
  Pfam annotation: Domain name=LRR_1; Domain location=18-40; Score=4.3; E_value=45; Accession=PF00560.23; Description=Leucine Rich Repeat
  Pfam annotation: Domain name=LRR_1; Domain location=186-209; Score =10.3; E_value=3.4; Accession=PF00560.23; Description=Leucine Rich Repeat
  Pfam annotation: Domain name=LRR_1; Domain location=211-233; Score =13.1; E_value=0.99; Accession=PF00560.23; Description=Leucine Rich Repeat
  Pfam annotation: Domain name=LRR_1; Domain location=235-258; Score =14.7; E_value=0.35; Accession=PF00560.23; Description=Leucine Rich Repeat
  Pfam annotation: Domain name=LRR_1; Domain location=42-64; Score =14.6; E_value=0.37; Accession=PF00560.23; Description=Leucine Rich Repeat
  Pfam annotation: Domain name=LRR_1; Domain location=66-88; Score =13.2; E_value=0.93; Accession=PF00560.23; Description=Leucine Rich Repeat
  Pfam annotation: Domain name=LRR_1; Domain location=90-112; Score =14.4; E_value=0.4; Accession=PF00560.23; Description=Leucine Rich Repeat
  Pfam annotation: Domain name=Pkinase; Domain location=550-818; Score =164.2; E_value=3.4e-46; Accession=PF00069.15; Description=Protein kinase domain
  Pfam annotation: Domain name=Pkinase_Tyr; Domain location=550-818; Score=147.2; E_value=4.5e-41; Accession=PF07714.7; Description =Protein tyrosine kinase
  Pfam module annotation: Pfam domain module=LRR_1::LRR_1::LRR_1::LRR _1::LRR_1::LRR_1::LRR_1::LRR_1::LRR_1::LRR_1::Pkinase::Pkinase_Ty ; Domain location=114-136::138-160::162-184::18-40::186-209::211
  Pfam module annotation: Domain location=66-88::90-112::550-818::550 -818
MNPGIKCDCSDHNNTICHITELKMNKLDVVGPIPEELRNLSHLTTLNLQQNYLTGPLPSFLGELTALQQMSLSGNALSGTIPKELGNLVNLIILSLGTNNLTGSLPSELGNLVKLEHMYIDSAGLSGPIPSSFSKLTRLKTLCASDNDFTGKIPDYIGSWSNLTDLRFQGNSFQGPLPSTLANLVQLTSLILRNCRIFGTLALVNFSKFTGLTLLDLSFNNIIGEVPQALLNMNSLTLLDFSYNYLSGNLPSWASHNLQFVLPAGLECLQRNTSCFLGSPQSSSFTVDCGSSRSVFASDNSMYQPDDANLGVASYYISSPPRWGVSNVGRFMDTSNGSYIVNSSRRFQNTLDSKLFQTARMSASTLRYYGFGLENGDYTVTLQFGEFDFEDLQTWKSVGRRVFDIYLQGERKEQNFNIKKAAKEAGEASTSYTAVKKQYTVPVTKNILEIHLFWAGKGTCCIPNQGDYGPTISALSATLNTKKKGNKIGVIIGVVIGATVLGLAILATLCVWRHKRRKVSLEQQELYNIVRIPNVFCYTYGELRTATENFSSANLLGEGGYGSVYKGKLVDGSVVAIKQLSETSRQGKKEFVAEIETISRVQHRNLVKLFGFCLEGNKPLLVYEYMESGSLDKALFGNGRLNLNWSTRYKICLGIARGLAYLHEESSIRIVHRDIKASNVLLDATLNPKISDFGLAKLYDDKKTHVSTKVAGTFGYLSPEYAMRGHMTEKVDIFAFGVVMLEIIAGRPNYDGKLDQDMAYLLEWVWQLYEEDHPLDIADPKLTEFDSVELLRAIRIALLCIQSSPRQRPSMSRVVSMLTGDSEAPEAVSKPSYVAEWQSNTEGTSSSVSTAEAVSVAPFLNPVVDDGRFRITRARGVCFTLYRKPDDTPLQETKCAFIKLDLALALSLQQQQQQQSLFCPKHVGVG

SEQ ID NO: 56584 - protein, 369 aa, Zea mays
  Coding DNA Sequence Number=SeqID_14805
  Gene Ontology: Mol. function=sequence-specific DNA binding; Cellular component=nucleus; Biological process=regulation of transcription
  Homolog annotation: Hit_ID=Q2QMN5; Match level="QueryCoverage=91%, HitCoverage=91%, E-value=6e-85, Identity=54%"; Hit description=WRKY DNA binding domain containing protein, expressed
  Pfam annotation: Domain name=WRKY; Domain location=297-357; Score =137.4; E_value=3.8e-38; Accession=PF03106.6; Description=WRKY DNA -binding domain
MEEVEEANREAVESCRRVLALLSHPHDPAQVRSIALGTDEACTKFRKVVSLLSNGEVGTGEAGPSGTSASASHPRAKLVSRRQNPGFLTQKGFLDSNTPVVVLNSAAHPSPTSAQVHPRAGALDTEGVHPLGVGGPPKLVQPLSAHFQFGNVSSRYQQLPSHHHRHQQQEKLQAAEMFKRSNSGINLKFESASGTGTMSSARSFLSSLSMDGSVVASLDGKLPSSSSSFRLIGAPAMSDPANAAQQAPRRRCTGRGKDGTGKCALAGRCHCSKRSKKLRVKRSIKVPAVSNKIADIPPDEYSWRKYGQKPIKGSPHPRGYYKCSSVRGCPARKHVERCVDDSAMLIVTYEGEHNHTGMPAQSAAAAAQV

SEQ ID NO: 56585 - protein, 245 aa, Zea mays
  Coding DNA Sequence Number=SeqID_14806
  Gene Ontology: Mol. function=unfolded protein binding; Cellular component=prefoldin complex; Biological process=protein folding
  Homolog annotation: Hit_ID=Q9AR47; Match level="QueryCoverage=99%, HitCoverage=100%, E-value=4e-31, Identity=72%"; Hit description=VIP3 protein
  Pfam annotation: Domain name=Prefoldin_2; Domain location=143-239; Score=61.7; E_value=2.4e-15; Accession=PF01920.10; Description =Prefoldin subunit
MQQGDSTEAQVTWEDQQNINRFGRLNNRLHELQDEIKLAKVDSLTYYVFSCTISWNTHSNTLPQRSYNGSTANDQIGEESKVEADELKSPRSRSVVKMIAPGCRGSRSRGGRSSSINGRWGDTKMDNNRLVDLLDSFRVRSSRSLAKEAGAAHASALVKETNENLDDAGNELILSDEDVVRFQIGEVFAHMPRDDVETRLEQMKEDAAKKLERLEEEKESVLAQMAELKKILYGKFKDAINLEED

SEQ ID NO: 56586 - protein, 538 aa, Zea mays
  Coding DNA Sequence Number=SeqID_14807
  Gene Ontology: Mol. function=RNA binding
  Homolog annotation: Hit_ID=Q10GH7; Match level="QueryCoverage=59%, HitCoverage=98%, E-value=2e-72, Identity=61%"; Hit description=KH domain containing protein, expressed
  Pfam annotation: Domain name=KH_1; Domain location=208-258; Score =48.9; E_value=1.7e-11; Accession=PF00013.19; Description=KH domain
  Pfam annotation: Domain name=KH_1; Domain location=286-342; Score =46.7; E_value=8e-11; Accession=PF00013.19; Description=KH domain
  Pfam annotation: Domain name=KH_1; Domain location=407-469; Score =48.7; E_value=1.9e-11; Accession=PF00013.19; Description=KH domain
  Pfam annotation: Domain name=KH_2; Domain location=286-339; Score =5.1; E_value=0.03; Accession=PF07650.7; Description=KH domain
  Pfam module annotation: Pfam domain module=KH_1::KH_1::KH_1::KH_2; Domain location=208-258::286-342::407-469::286-339
  Subcellular localization annotation: CTP_CleavageSite=44; ConfidenceScore=5.14e-01
NTLLDIGSRCKSTYLFESGVRCGLHERSSSTPRTRISRSDPQARLSLRRQFLAGVLPASPFIPSSGFRRAAICDWSVCLDFGLWELMDGQVETFVGDEEGGSPQVPYDGEQPTLYDSVAKQYSEELGDQYNEQPRAQYDEGSGNPYNDYEEQANLYSEETGNRYNEDPADSYQEEQENAFSGGINQQDNLQVNNVDDNKWPGWPGESVFRILVPAQKVGAIIGRKGEFIKKMCEETKARIKILDGPPGVPERAILLTINLFGEFVTFTFEDGESSQPQRSAGNIGPTRLLVPSSQAGSLIGKQGATIKSIQDSSKSIVRIVENVPPVALNDDRVVEIQGEPLGGPGFGGNPQFMHPRPQDSYYPSPDVPHMEKQPHYGISAYGREAPPSGASATGNQPPSHAGSQVAHDMHIPLAYADAVIGAAGASISYIRRHSGATVTIQESRGAPGEMTVEITGTAAQVQTAQQLIQNFMAEAAPPPPGPAPASNPPAPPVDPSYGFYPPPYGAAPFYGFFAAAGPPQYNGGNYGGPTYPPSYGY

SEQ ID NO: 56587 - protein, 183 aa, Zea mays
  Coding DNA Sequence Number=SeqID_14808
  Gene Ontology: Mol. function=ATP binding; Cellular component =extracellular space; Biological process=cobalamin biosynthetic process
  Homolog annotation: Hit_ID=Q8LEZ2; Match level="QueryCoverage=94%, HitCoverage=48%, E-value=1e-43, Identity=57%"; Hit description=ATP binding protein-like
MTRGVAWGDLDILVVDMPPGTGDAQLSMSQRLRLSGICTSAYEAANVGALIVSTPQDIALIDARRGANMFRKVQVPILGLVENMSCFKCSKCGEKSYIFGEGSKRERKFLAPAETHNLISSLNPSSKVPLEISIRTGSDEGNPIVVSSPNSASAQAYVNVAEKVTQRLKELAEERRMGPEILL

SEQ ID NO: 56588 - protein, 75 aa, Zea mays
  Coding DNA Sequence Number=SeqID_14809
MENGGRGAPGAVGDSVDGGAGALALLLRAADAGDWARLPLDLGTRDGNGDPIPDSPRGIPLLGDGDGEVSFPTGM

SEQ ID NO: 56589 - protein, 55 aa, Zea mays
  Coding DNA Sequence Number=SeqID_14810
MEWKGKLRFPLTSAGRAVVEFERAFINVFSIMIKIASRLFLGDIRHCPSFPRLTR

SEQ ID NO: 56590 - protein, 459 aa, Zea mays
  Coding DNA Sequence Number=SeqID_14811
  Gene Ontology: Mol. function=metal ion binding; Cellular component =ribonucleoprotein complex; Biological process=ubiquitin cycle
  Homolog annotation: Hit_ID=Q75LV6; Match level="QueryCoverage=81%, HitCoverage=69%, E-value=1e-139, Identity=62%"; Hit description =Putative ubiquitin-conjugating enzyme binding protein
  Pfam annotation: Domain name=IBR; Domain location=120-183; Score =69.5; E_value=1.1e-17; Accession=PF01485.11; Description=IBR domain
MTSDDEEACDYFYDDDDDAEEDAAAGLEEDSSLPTPEGRADYWAITQDTVFAAQEVNSIAAAGSMTPWRTVTCKVGRSISTLRVESGKKQIRCMEVKCSAFCDEDLVRFLLVQKYPDMAKNFNRFLLGSYLEDNASVKWCPSTPNCGHAIRVGTDERCCEVECPCGLSFCFNCMGHAHSPCPCTIWEKWNASRSEGENIKWILANTKSCPKCFKAIEKNGGCNLVRCKCGQCMCWLCGGGTGQDHTWNSITGHSCNRYEEEICVETVHTGRQQMQRYKHYHDRFKIHGDSSYGVEKQKLGAAIEERVRLLESDRERPLAIRDGDWLTRAHRRLLVSRQVLSRSYVFAYYMFGGHELRTRPAERANLGVARNLFEHQQEQLERHVEHLSRSLAESADLAGAPDAEIVKQKQTAITLTKTVERLCGEMYKCIQDELLTLLVEPMSIAAYRPDGPDRAKPAI

SEQ ID NO: 56591 - protein, 215 aa, Zea mays
  Coding DNA Sequence Number=SeqID_14812
  Homolog annotation: Hit_ID=Q75IY9; Match level="QueryCoverage=49%, HitCoverage=31%, E-value=3e-17, Identity=50%"; Hit description =Expressed protein
MAILIANLSAVVTGALEAARAIATETLPAAVTRDAVVEASRASVAWLTSYLWAWLAVAVDNLPAGAAAVSSAADASGPCLQTAAKLLRGLYAWLAAAVVQKLPDVAAEKLLGDAAAWLVRGRGGAVYATLALALLAVAFLGGAVCALTCRRSMMRPGPGTGLGGARSVLEANPKRYCYATVRTVRRRAGGAAGCKMLPAGLLVAFVAYLAAKTLY

SEQ ID NO: 56592 - protein, 410 aa, Zea mays
  Coding DNA Sequence Number=SeqID_14813
  Gene Ontology: Mol. function=nucleic acid binding; Biological process= DNA integration
  Homolog annotation: Hit_ID=Q8W0X4; Match level="QueryCoverage=99%, HitCoverage=49%, E-value=1e-91, Identity=85%"; Hit description =Putative pol protein
  Pfam annotation: Domain name=rve; Domain location=194-345; Score =109.9; E_value=7.6e-30; Accession=PF00665.16; Description=Integrase core domain
  Pfam annotation: Domain name=zf-CCHC; Domain location=92-109; Score =30.5; E_value=5.8e-06; Accession=PF00098.13; Description=Zinc knuckle
  Pfam module annotation: Pfam domain module=rve::zf-CCHC; Domain location=194-345::92-109
MSPEEVLGKFVSGRMMIKEARYVDDALNGPIHEPQPIALKATRSKEALPSKVAQVEAAGLNNEEMALIIKRFKTALKGRKGQPSKTKTKEKRSCFKCGKIGHFIANCPDNESDQEKGNKREKKKHYKKAKGEAHIGKEWDSDCSSSDSDNEGLAATAFNKSSLFPNERHTCLMAREKKVCASGGSSWIIDSGCTNHMTGEKKMFTSYVKNKDSQDSIIFGDGNQGKDKSETQGTLKRFLRRAQNEFELKVKKIRSDNGSEFKNLQVEEFLEEEGIKHEFSAPYTPQQNGVVERKNRTLLDMARTMLGEFKTPEHFWSEAVNTACHAINRVYLHRLLKKTLYELLTGNKPNMKKMFRRPLYEPWRLEKCGHRNKMNEINLLPQQRCIPQLKTMNRFIKRRRVIMGEHKMIT

SEQ ID NO: 56593 - protein, 90 aa, Zea mays
  Coding DNA Sequence Number=SeqID_14814
MWAWAGRTVKRVQKQPGRWAHRKDPQVMENRNQKGQAANKTGPPSPGPGGYEIDGSGYDYGAGCQHCNHCSGEDEAVEGDFQEFQDYDEF

SEQ ID NO: 56594 - protein, 61 aa, Zea mays
  Coding DNA Sequence Number=SeqID_14815
  Subcellular localization annotation: CTP_CleavageSite=14; ConfidenceScore=5.44e-01
MAAPPGSLPARTLSCSTPVPTTISHGAGAPHSPLARAPSLGSPSLSLSLLQQQPSQDDGSV

SEQ ID NO: 56595 - protein, 992 aa, Zea mays
  Coding DNA Sequence Number=SeqID_14816
  Gene Ontology: Mol. function=exonuclease activity; Cellular component= intracellular; Biological process=regulation of transcription, DNA -dependent
  Homolog annotation: Hit_ID=Q5N739; Match level="QueryCoverage=99%, HitCoverage=80%, E-value=0.0, Identity=80%"; Hit description =Putative 5'-3' exoribonuclease
  Pfam annotation: Domain name=XRN_N; Domain location=1-187; Score =365.2; E_value=1e-106; Accession=PF03159.8; Description=XRN 5'-3' exonuclease N-terminus
  Pfam annotation: Domain name=zf-CCHC; Domain location=194-211; Score =23.9; E_value=0.00011; Accession=PF00098.13; Description=Zinc knuckle
  Pfam module annotation: Pfam domain module=XRN_N::zf-CCHC; Domain location=1-187::194-211
PSPTTFAEVFQCMFDYIDRLFIMVRPRKLMYMAIDGVAPRAKMNQQRSRRFRAAKDAADAAAEEERLREEFEREGRRLPAKQQSQTCDSNVITPGTEFMAVLSVALQYYIHQRLNYDPGWKKIKVILSDANVPGEGEHKIMSYIRGQRNLPGFNPNTRHCLYGLDADLIMLALATHEVHFSILREVVFTPGQQDKCFLCGQVGHLAANCEGKAKRKAGEYDEKGEAIVPKKPYQLDMKSAFLHGDLEETVYAHQPVVASSTCQPLARFARCRNHYIASSRLLVHGITGLPPKSGILNIDLHLSIGNVSSITTYSGIDWAGCLDSRRSTLGYSVFLGDNLVFWSSKQQTTVSRFSAEAEYRAVGGSQCLGSMRRQSTELLLMQLFLNIWTLREYLEYEFRMPNPPFQIDFERIVDDFIFMCFFVGNDFLPHMPTLEIREGAINLLMAVYKKEFPSMGGYLTDSCTPDLNRVEHFIQAVGSYEDKIFQKRARLHQRQAERIKREKAQAKRGDDLDPHVRDDLIVPVSNFRGSRLASGAVPSPYEQNGSQRERYNQTRKAPRVSSSGSSIAAAIVEAEQDLEAQERENKEELKSMLKDALREKSDVFNSENSEEDKVKLGEPGWRDRYYEEKFGARTPERMEEIRRDVALKYTEGLCWVMHYYYEGVCSWQWFYPYHYAPFASDLTSLSQLNITFELGSPFKPFDQLMGVFPAASAHALPLKYRQLMTDPNSPIIDFYPTDFEVDMNGKRFSWQPEEARRNSTMCNMLFVNGAHSLSPYIYSLNSKFGHLPDKDRGAIKEKLDPSASGGMNGYIALCGGDPSPPVFRSPVDGLEDIMDNQVICSIYKLPDPHKHIARPPAGVIIPKKSVEAGDLKPPPVLWHEDSGRRPHDNNHRRPYDNSNRQNPSGALSGRQLGEAAHRLVVNSLNVRGGGQNNSPSMPYQTMMSGMNYPNGRHHVGNHGVPPRMEQPAGRSGWHVSDDNMTNGQAAYGSVSA

SEQ ID NO: 56596 - protein, 121 aa, Zea mays
  Coding DNA Sequence Number=SeqID_14817
MSCRQRGSGTVLALPRLGAECLRVCTTRDKKRSRLVDKVCNLFRGLETDISAVLAVMSGLGAPLVRDIMVTDDDDGSDYEFWYFLYEEPYLNNKHQVIHIASAAQEKMEAMQRTLRSSRLD

SEQ ID NO: 56597 - protein, 107 aa, Zea mays
  Coding DNA Sequence Number=SeqID_14818
MEAEYLTTVLDNNADLMPFWRKPAPGEPPAAPADSEAQFLSGDDGDEHGQADDEDGCGGERLPTVGPQQPPRSTHFGHFLVQRIYALATCLEVSDFQVLTDISPRAQ

SEQ ID NO: 56598 - protein, 95 aa, Zea mays
  Coding DNA Sequence Number=SeqID_14819
MDRSEVVFVKGRPRHAGSEEIVVFGCCREQSLPPLLQGVGRLTLQTLAPSLDVKRLPPQALTPPIVPCAVTTAATIAPWGDARRRRLGSSLANVA

SEQ ID NO: 56599 - protein, 178 aa, Zea mays
  Coding DNA Sequence Number=SeqID_14820
  Homolog annotation: Hit_ID=Q8W513; Match level="QueryCoverage=26%, HitCoverage=10%, E-value=8e-12, Identity=72%"; Hit description =Histone aceytl-transferase HAC108
MGDGVDEDSSVVATVTCRTCFRGRDRRQVEDMWLVLEKSQFPNITHEFIIAFSLHIWRNNFTESKQGQGHEELDGASLREHEEFTKVKNITKVELGRYEIDTSYMVRTYLICVLRQRRRPARAACAPQASLFSQPTTAWGMKLYRRNYLLLSVQQFHARTSSARPNLDEQKRNQCLFI

SEQ ID NO: 56600 - protein, 168 aa, Zea mays
  Coding DNA Sequence Number=SeqID_14821
  Subcellular localization annotation: CTP_CleavageSite=58; ConfidenceScore=5.27e-01
MALGPSSDRAPAFDLPLPWSSSLGHRLHLWTRAPPTTGPPPQHTWFRSSAQTRQRLLVVTAARSLLVHRASACSHLPSSRRTPSSPARLSSRLPDPRPARRRFPTPVAAALAPRILIAGLQFSSIADVQHASVSCSPSLDRELFALASSLQLSPLQAHYSAPSGQCLP

SEQ ID NO: 56601 - protein, 63 aa, Zea mays
  Coding DNA Sequence Number=SeqID_14822
MAPSRPSSLSLISLMLGSHPLGMEIDELTLGSTGADPALISLISTTGRSSEKKVLEIGWRRRL

SEQ ID NO: 56602 - protein, 168 aa, Zea mays
  Coding DNA Sequence Number=SeqID_14823
MASWGCIYSPQHKSSHWRKAVAFCGHNGESGGAPDSALFLVRETFTPGSRITFGSLDFLATATDELRLVDSDTLVKASMGGPTRFTTATSKVEKRCLKSHVAALKRCLHKLAATIKHKVEGASPSTFMAIIDHQPTSILDLLKDDSSHGSMEEPNIDAVRKMYPDPFG

SEQ ID NO: 56603 - protein, 252 aa, Zea mays
  Coding DNA Sequence Number=SeqID_14824
  Gene Ontology: Mol. function=protein binding; Cellular component =spliceosome; Biological process=mRNA processing
  Homolog annotation: Hit_ID=Q6QP51; Match level="QueryCoverage=73%, HitCoverage=90%, E-value=5e-16, Identity=43%"; Hit description =Putative growth-regulating factor 1
MQATCNCTKGAHPFGFDASSMEAQAHTSWTGKGDTPKGILLREGSGPRALLLIRGSKAGPSEGFDSRLRALGLHAHYWSENAPEGFDSRLRARRARNDSGYVRYMAEARATLPRARPPSRPQTTDFASPDPRARTQPRRRKTVSASPDPRARTQPRRRETVSASPDPRARTQPRRRKMVSASPDPRARTQPRRRKTVSASPDPMARTQPRTTVSASPDPRARTQPRPRRSHHLAQPRARTDHVTGGPSLPYP

SEQ ID NO: 56604 - protein, 58 aa, Zea mays
  Coding DNA Sequence Number=SeqID_14825
MGRWLSKSNRLKIWLLLLIGALSQSTCLFWLEVKILNSNLETDMGNGSTGPPTPNKGI

SEQ ID NO: 56605 - protein, 515 aa, Zea mays
  Coding DNA Sequence Number=SeqID_14826
  Gene Ontology: Mol. function=transferase activity, transferring groups other than amino-acyl groups; Cellular component=cellular _component; Biological process=biosynthetic process
  Homolog annotation: Hit_ID=Q8LIL0; Match level="QueryCoverage=67%, HitCoverage=87%, E-value=1e-105, Identity=55%"; Hit description =Putative chalcone synthase
  Pfam annotation: Domain name=ACP_syn_III; Domain location=174-259; Score=13.0; E_value=5.7e-05; Accession=PF08545.1; Description=3 -Oxoacyl-[acyl-carrier-protein (ACP)
  Pfam annotation: Domain name=Chal_sti_synt_C; Domain location=249 -386; Score=158.1; E_value=2.2e-44; Accession=PF02797.6; Description =Chalcone and stilbene synthases, C-te
  Pfam annotation: Domain name=Chal_sti_synt_N; Domain location=14-240; Score=429.9; E_value=3.5e-126; Accession=PF00195.10; Description =Chalcone and stilbene synthases, N-te
  Pfam module annotation: Pfam domain module=ACP_syn_III::Chal_sti_synt_ C::Chal_sti_synt_N; Domain location=174-259::249-386::14-240
MTSLLLVSQIAAVGLCSDRRRELRADGPATVLAIGTANPPNCVRQEEYADYYFRVTKSEHLTSLKDKLKRICHKSAIKKRYFHHTEELLRGHPAFIDRSMPSLHERQDIMASAVPELAAAAAVDAIAEWGRPATEITHLVVTTYSGAHMPGVDWLVASLLGLRPTVRRTMLYMNGCSSGCAALRLAKDMAENNRGARVLVACAEVTLAIFRAPHEAHVDTLILQSLLGDGAGAVIVGADPVSVEEPDFEMLSASQTTIPETKHVAAGQLCEDGLHFNPSREIPSLVRENIEQCMVDALSLLGIGGSWNDLFWAVHPGGRAVLDSVEEGLMLEPHKLEASRRVLSEYGNMSGPSVIFVLDELRRQQERKGMGRKHCPRRAIQVRSSDSYVASKGTDSDRQIPTSLTSRMVSCPKFKKGAGSSHEVVLVVLFGNVYQIWPVYLSGPCKKKLKLHAVCTIVVPLSPDEWAGWDPLKWIYIYSVDGLYQPVTFFREPSLSAIGIICMAPRRIASLSSLT

SEQ ID NO: 56606 - protein, 98 aa, Zea mays
  Coding DNA Sequence Number=SeqID_14827
  Subcellular localization annotation: CTP_CleavageSite=26; ConfidenceScore=5.05e-01
MRSPSLRYWTTKSHSVTVVGICYGVVGGVVSPRDILSMSPPDTQVFVVSSGNEQVLETKTLSESGNDECQSYSRRATASAQGGNEDRTSCRVKEEKTS

SEQ ID NO: 56607 - protein, 161 aa, Zea mays
  Coding DNA Sequence Number=SeqID_14828
  Gene Ontology: Mol. function=protein serine/threonine kinase activity; Biological process=protein amino acid phosphorylation
  Subcellular localization annotation: CTP_CleavageSite=20; ConfidenceScore=5.04e-01
MVIHPAQRDRLQWQRRRRSCCSTARRPCRTRWGALSAWSRSTSYCIWPHVACATSTAANTTVSVSISLQGLGLSGELAASSLYRVRGLVALSFASNGFNQTTPLELSCCALLASLNLSNGAFWGPLPEQQAMLTSLMSLDHSYNSFEGQVPAGLAALGGLL

SEQ ID NO: 56608 - protein, 111 aa, Zea mays
  Coding DNA Sequence Number=SeqID_14829
MSQAFERTKHMPRNMVLLDLVDDDSQGIAAEVWTYIRTVERAGLEGSDESEYSSDEENSSDSSEEGGGGDDDGGDGDGGGDSGKGEDGNGKGGNGDGGSKGSSKGNNKASD

SEQ ID NO: 56609 - protein, 177 aa, Zea mays
  Coding DNA Sequence Number=SeqID_14830
  Subcellular localization annotation: CTP_CleavageSite=57; ConfidenceScore=5.05e-01
MNTKAAGLPPLTLGSGHLASPPFALAHALDPSGLGHAAHSLVGLGTPLSRNADSLVTKSIVTCPINTHIHGHRQARNHRSRFTIGGAEVDALAAVEDKIPGPRAHRTASALGKSLWQLGSIDQPGEEENVYSGSTRPRTNPMAPSPRSGVVELDRVAGEPKGNHSSGSIARPETNPP

SEQ ID NO: 56610 - protein, 63 aa, Zea mays
  Coding DNA Sequence Number=SeqID_14831
MTGVDWPHKADMLRQGSYMLKYLHVDGDSSVPLWVAPRGVGQPLDLIGLLDGDLVGHSASQGC

SEQ ID NO: 56611 - protein, 126 aa, Zea mays
  Coding DNA Sequence Number=SeqID_14832
MAKYNDLAPQRPKPNEPSPMRCPTEGETTHGSLTGDGETVEAVHCVARSTVARPHRQGIADDITMVSPVRGRHHTSHSQMTLQHAPKGQNAGEDADPRCTSLRPGFGPSSRIRVQTTVTVGKRGNR

SEQ ID NO: 56612 - protein, 137 aa, Zea mays
  Coding DNA Sequence Number=SeqID_14833
MPSTTAAPDRSPPIACPGHQSRIPKDPMRSPIDYEPNDGLSSPDSKHKAPPALQQGESSTKAHQSLNQTVLLVAEMKANKGKGSIPRIVRVGVQSMTKRGPQPRCNDAEEFTSNRGAFMEEDVPPMTARLSLTPSRL

SEQ ID NO: 56613 - protein, 124 aa, Zea mays
  Coding DNA Sequence Number=SeqID_14834
  Pfam annotation: Domain name=GRP; Domain location=1-109; Score=-1.8; E_value=0.0001; Accession=PF07172.2; Description=Glycine rich protein family
MDTTAFELALLGAIAGCFFVARTVGAKCWNLPSKTGRSNEKVGREFAKLNTEVGWWNGWSGNGSGRRNSGCGSGGGGGYGGSGGWLRSDWSWRSGRWSGSCGGCRGSKGARPRRESTYFVCNLI

SEQ ID NO: 56614 - protein, 133 aa, Zea mays
  Coding DNA Sequence Number=SeqID_14835
MPVLGLSSPPPERLHRACLRGTVGDWEVGWCPRQLLVVTVNPSRAVGNHSCDPIAGLRSPVLWWSSAVLSAPAPLFGRGRRTISLGRWILANGEDVSDLIPVRSIDRNRCEMIVRLGLKMKNSLGQCDRSPRF

SEQ ID NO: 56615 - protein, 206 aa, Zea mays
  Coding DNA Sequence Number=SeqID_14836
  Gene Ontology: Mol. function=inorganic diphosphatase activity; Cellular component=cytoplasm; Biological process=phosphate metabolic process
  Homolog annotation: Hit_ID=Q75L10; Match level="QueryCoverage=99%, HitCoverage=100%, E-value=1e-105, Identity=90%"; Hit description =Putative inorganic pyrophosphatase
  Pfam annotation: Domain name=Pyrophosphatase; Domain location=44-198; Score=323.4; E_value=4e-94; Accession=PF00719.9; Description =Inorganic pyrophosphatase
MAPAVEAVKETGTFQKVPALNERILSSMSRRSVAAHPWHDLEIGIVIEIPRGSKVKYELDKKTGLIKVDRVLYSSVVYPHNYGFIPRTLCEDSDPLDVLVIMQEPVIPGCFLRAKAIGLMPMIDQGEADDKIIAVCADDPEYRHYNDIKELPPHRLAEIRRFFEDYKKNENKEVAVNDFLPASAAYEAIQHSMDLYATYIVEGLRR

SEQ ID NO: 56616 - protein, 150 aa, Zea mays
  Coding DNA Sequence Number=SeqID_14837
MAENDDGELLRGKARNRGSVRRGKRLEVGGRPDQWAQWLQYACTQWPPPVLGARGRWAEAWGACKGKSVAGPRWATGGVEWAAGKGVARWVAKGEARWPGGSRGAGRARWAEAGELGRGRGGRRWAAGGEGEAEGWWAGPHEERGGKKAS

SEQ ID NO: 56617 - protein, 97 aa, Zea mays
  Coding DNA Sequence Number=SeqID_14838
MSGGSEFGRGKLAAEERGESPARNTVAFTGAMSQAMDRLPTMVFCDVVTLLSTWHPGGKRQTLARVILTGRRASGYGDQLTASSPVNIFSPLAVIHT

SEQ ID NO: 56618 - protein, 105 aa, Zea mays
  Coding DNA Sequence Number=SeqID_14839
  Gene Ontology: Mol. function=RNA binding; Cellular component =ribonucleoprotein complex; Biological process=translation
  Homolog annotation: Hit_ID=Q10MB3; Match level="QueryCoverage=88%, HitCoverage=24%, E-value=1e-28, Identity=70%"; Hit description=30S ribosomal protein S1, chloroplast, putative, expressed
  Subcellular localization annotation: CTP_CleavageSite=25; ConfidenceScore=5.39e-01
MASLAQHVAGLPCPPLSGASRRRPAAQRRPPSALVCGTYALTKDERERERMRQVFDDASERCRTAPMEGVAFSPDDLDTAVESTDIDTEIGSLVIPRFLPLLYCH

SEQ ID NO: 56619 - protein, 448 aa, Zea mays
  Coding DNA Sequence Number=SeqID_14840
  Gene Ontology: Mol. function=protein dimerization activity; Cellular component=nucleus; Biological process=regulation of transcription, DNA-dependent
  Homolog annotation: Hit_ID=Q8W5R9; Match level="QueryCoverage=59%, HitCoverage=79%, E-value=1e-104, Identity=75%"; Hit description=BZIP transcription factor
  Pfam annotation: Domain name=bZIP_1; Domain location=112-169; Score =27.8; E_value=3.8e-05; Accession=PF00170.11; Description=bZIP transcription factor
  Pfam annotation: Domain name=bZIP_2; Domain location=112-162; Score =12.8; E_value=0.035; Accession=PF07716.5; Description=Basic region leucine zipper
  Pfam module annotation: Pfam domain module=bZIP_1::bZIP_2; Domain location=112-169::112-162
MPWEQPRPGCKGTDVAAHQSYGLSYREFQTSSGDSHPNRRILAVHMAMDQDGTMDNLLILVTCVRLFYEISTSLCGTSNGTGLGEMHLENGQSGAMVPASNSSDRSDRSDKPMDQKVLRRLAQNREAARKSRLRKKAYVQQLESSKLKLASLEQELQKARQQGIFISSSGDQTHTMSGNGAMTFDLEYSRWQEEQNKQINELRTAVNAHASDSDLRLIVDGIMAHYDEIFRLKGIAAKADVFHILSGMWKTSAERCFLWLGGFRSSELLKLLVNQLEPLTEQQLMGLSNLQQSSQQAEDALSQGMEALQQSLAETLAGSLGPSGSSGNVANYMGQMAMAMGKLGTLENFLRQYWSRRSDGGSSQVSKYRSTKQSNSAEDARARRVGVRSSGAVLVGDLALNPGCKTCSKFQNASLWIEVLDCCKAETPQGIEKASRMATSKKSRCSRE

SEQ ID NO: 56620 - protein, 141 aa, Zea mays
  Coding DNA Sequence Number=SeqID_14841
  Gene Ontology: Mol. function=glucose-6-phosphate 1-dehydrogenase activity; Cellular component=chloroplast; Biological process=glucose metabolic process
  Homolog annotation: Hit_ID=Q10M94; Match level="QueryCoverage=89%, HitCoverage=20%, E-value=4e-56, Identity=83%"; Hit description =Glucose-6-phosphate 1-dehydrogenase 4, chloroplast, putative, expressed
  Pfam annotation: Domain name=G6PD_N; Domain location=8-138; Score =35.3; E_value=6.3e-16; Accession=PF00479.12; Description=Glucose-6 -phosphate dehydrogenase, NAD bindi
MKPSLCIAVIGATGELARTKVFPALFALYYSGFLPRNVGIFGYSRKKLTDEGLRSIIEANLTCRVDHHENCDDKLIEFLKKKYYVDAGHDNQEGMVRFNSRMSQIEGIGAANRIFYLAVPQEALLDVAFPLFVLPKLSKAE

SEQ ID NO: 56621 - protein, 385 aa, Zea mays
  Coding DNA Sequence Number=SeqID_14842
  Gene Ontology: Mol. function=peptidase activity; Cellular component =cellulose and pectin-containing cell wall; Biological process =proteolysis
  Homolog annotation: Hit_ID=Q10MA3; Match level="QueryCoverage=94%, HitCoverage=84%, E-value=1e-126, Identity=63%"; Hit description =Eukaryotic aspartyl protease family protein, expressed
  Pfam annotation: Domain name=Asp; Domain location=34-380; Score= -111.1; E_value=4.8e-07; Accession=PF00026.14; Description=Eukaryotic aspartyl protease
MAARSKARAARLLSASGSARVDPGPYANGVPDTEYLVHLAIGTPPQPAQLILDTGSDLVWTQCRPCPRHHLLQPGAPIPGPVQLLHVRRAPLQPAHHSWGNQTCVYVYSYGDSSITTGHLNADTFTFAAADGSGGQVSVPDLAFGCGLFNNGIFESNETGIAGFGRGALSLPSQLKVDNFSYCFTDITRPEPSSILLGLPANLYGDAGGVVQSTPLVQNFSSLELYYLSLKGITVGSTRLPIPESTFALKQDGTGGTIIDSGTGMTMLPQDVYKLVHDAFTAQVRLPVDNATSSSLSQLCFSVPRRAKPDVPQLVLHFEGATLALPRENYMFEFEDAGGSFTCLAINAGDGLTTIIGNYQQQNLHVLYDLVGNMLSFVPARCNRL

SEQ ID NO: 56622 - protein, 300 aa, Zea mays
  Coding DNA Sequence Number=SeqID_14843
  Gene Ontology: Mol. function=glucose-6-phosphate 1-dehydrogenase activity; Cellular component=chloroplast; Biological process=glucose metabolic process
  Homolog annotation: Hit_ID=Q10M94; Match level="QueryCoverage=88%, HitCoverage=42%, E-value=1e-139, Identity=90%"; Hit description =Glucose-6-phosphate 1-dehydrogenase 4, chloroplast, putative, expressed
  Pfam annotation: Domain name=G6PD_C; Domain location=2-266; Score =274.9; E_value=1.5e-79; Accession=PF02781.6; Description=Glucose-6 -phosphate dehydrogenase, C-terminal domain
VIFSEETSNEIQGRYFGNYGIIRDIVHSHILQTIALFAMEPPVSLDGEDIRDEKVKVLRSIRKVNLDDVVLGQLKDMSGKVDRYTKSMIPTYFAAAMYIDNARWDGVPFFIRTGMGLMTNRAEIRIQFRHVPGNIYRERFGHDIDLDTNELVLRDQPEEAILLKVNNKVPGLGLQLDASELNLLYRDRYNTEVPDSYEHLLLDVLDGDSHLFMRSDELAAAWNVLTPIIHEIDQNRVVPELYEAGDRGPINAYHLAAKHGVRWDDDCQMYNMPSVIGLIKDFQGDMPFKEICKHGFFPVL

SEQ ID NO: 56623 - protein, 442 aa, Zea mays
  Coding DNA Sequence Number=SeqID_14844
  Gene Ontology: Mol. function=hydrolase activity, hydrolyzing O -glycosyl compounds; Cellular component=anchored to membrane; Biological process=carbohydrate metabolic process
  Homolog annotation: Hit_ID=Q6H4Z1; Match level="QueryCoverage=86%, HitCoverage=78%, E-value=0.0, Identity=89%"; Hit description =Putative elicitor inducible beta-1,3-glucanase
  Pfam annotation: Domain name=Glyco_hydro_17; Domain location=1-300; Score=252.8; E_value=7.1e-73; Accession=PF00332.9; Description =Glycosyl hydrolases family 17
  Pfam annotation: Domain name=X8; Domain location=319-380; Score=31.0; E_value=2.9e-08; Accession=PF07983.3; Description=X8 domain
  Pfam module annotation: Pfam domain module=Glyco_hydro_17::X8; Domain location=1-300::319-380
MRANRISKVKLFNADPGVLRALAGSGIQVMVGVTNDELASIAGSQAAADDWVAQNVSRYVGRSGVGIRYIAVGNEPFLTSYQGQFQSYIIPAMTNIQQSLVKANLASYVKLVVPCNADAYQSASVPSQGVFRTELTQLMTQLAAFLSSSGAPFVVNIYPFLSLYQNSDFPQDYAFFEGSTHPVVDGPNVYYDAFDGNFDTLVSALSKIGYGNLPIAIGEIGWPTEGAPSANLTAARAFNQGLINRITSNKGTPLRPGVPPADVYLFSLLDEEGKSILPGNFERHWGIFSFDGQAKYPLNLGLGNSVLKNAKEVPYLPSRWCVANPARDLDSVSDHMKLACSMADCTTLYYGGSCYGIGEKGNVSYASTATISSRSRTQRVVILFKNDLVVDKYSRTEIIYYIKAMRVDGGGVGGQQLSPQQAWPHVTFGCCTSQQHWHAEMK

SEQ ID NO: 56624 - protein, 486 aa, Zea mays
  Coding DNA Sequence Number=SeqID_14845
  Gene Ontology: Mol. function=RNA-directed DNA polymerase activity; Cellular component=mitochondrion; Biological process=RNA-dependent DNA replication
  Homolog annotation: Hit_ID=Q8S463; Match level="QueryCoverage=99%, HitCoverage=27%, E-value=0.0, Identity=87%"; Hit description =Putative prpol
  Pfam annotation: Domain name=RnaseH; Domain location=1-123; Score= -12.4; E_value=0.00082; Accession=PF00075.14; Description=RNase H
  Pfam annotation: Domain name=rve; Domain location=278-437; Score =105.9; E_value=1.2e-28; Accession=PF00665.16; Description=Integrase core domain
  Pfam module annotation: Pfam domain module=RnaseH::rve; Domain location=1-123::278-437
MFFDGSLMKTGAGAGLLFTSPLEKHLRYVLRLHFPASNNVAEYEALVNGLRIAIELGVRRLDAHGDSQLVIDQVMKNSHCRDPNMEAYCDEVRRLEDKFYGLELNHIARRYNETTDELAKIASGRTTPEVPSAPEGEALRVEEERSGVTPDRNWQTPYLQYLHRGELPLDQAEARRLARRAKSFVLLGDGKELYHRSPSGILQQCISIAEGQELLQEIHSGACGHHAAPRALVGNAFRQGFYWPTAVADATRIVHTCEGCQFYARQIHLPAQALQTIPITWPFAVWGLDLVGPLQKAPGGYTHLLVAIDKFSKWIEVRPLNSIRSEQAVAFFTNIIHRFGVLNSIITDNGTKFTGRKFLDFCEDHHIRVDWAAVAHPMTNGQVERANDMILQGLKPRIYNDLNKFGKRWMKELPSVVWSLRTTLSRATGFTPFFLVYGAEAILPTDLEYGSPRTRAYTDQSNQASREDSLDQLEEAQDMALLHSAR

SEQ ID NO: 56625 - protein, 537 aa, Zea mays
  Coding DNA Sequence Number=SeqID_14846
  Homolog annotation: Hit_ID=Q5DJU1; Match level="QueryCoverage=98%, HitCoverage=98%, E-value=4e-53, Identity=52%"; Hit description=Fas -associated factor 1-like protein
  Pfam annotation: Domain name=UBX; Domain location=454-535; Score =92.9; E_value=9.7e-25; Accession=PF00789.11; Description=UBX domain
  Pfam annotation: Domain name=Vicilin_N; Domain location=328-421; Score=-69.0; E_value=0.038; Accession=PF04702.3; Description=Vicilin N terminal region
  Pfam module annotation: Pfam domain module=UBX::Vicilin_N; Domain location=454-535::328-421
MAETVDDKISYFQAVTGISDTDLCTEILAAHNWDLQLAVSSITANPSSPSAPVSTSSRDPAPSAPLADAEFVAPPPPIPPPPQQQPGIAWKLVTLPFYVVSGGASLVAGSFRLGAWVAGGVLSRSLSLLGLAGQAGSGDRLLELPPSAAEAADFVAEFERECGAGRGPRFVAEGFADALQRAQREFKLLFVYLHSPDHPDTPAFCGGCLCAEPVAAFIDENFVAWGGSIRRTEGFKMSNSLNASRFPFCAVVMASTNQRIVLLQQLVLVIIRKENAVASGKIANVRLSYKVINANVYIAKLELFCIGYIQCLAFKNVRIANKLYIHVPKVEGPKSPEEMITILQRVVEECATSLVAARIEAEERLNNQRLREEQDAAYRAALEADQLRKLYLQARERERIEEQERREREAVEAEKKRKEEEEAVARAAQEAAEKEAALARRRQEKAMALGAEPEKGPGVTRVLIRFPTGERKERRFHSSATVTSLYDYVDSLDCMKAENYSLVSNFPRVTYGPEKHSLTLEEAGLHPQASLFIEIEQ

SEQ ID NO: 56626 - protein, 226 aa, Zea mays
  Coding DNA Sequence Number=SeqID_14847
MNERATGQVQPGRGLRRAWRGMGDADGKRSVKDLGRDHAVEDDARVLGCAVEPREGGGSQGIPGQARASSRRYVEAGEGGGRTSGTAEARGTAAACMPLGIHCRPAVAAPTSDVLSVMRQICRSSGFAAAPTVAVPPDQGFVIAALPDQGFVAASPLDRELLPPPRLQIGSCHSPACLGCTVACLPRGHCRSPWDYAARTLSLECFYRRPDLVRLNWMAPSGLGFL

SEQ ID NO: 56627 - protein, 130 aa, Zea mays
  Coding DNA Sequence Number=SeqID_14848
MEIIEYVEATPLASKIILVVTAEATVAPAEEAEVKSSKSEEYPKLQSPPSMMGLTKLASAPAATPRKGRRMASVLDVVLKSSKVPTPASTKTSEDEIEEFGGTIAASASPACTKAGPSKIKPAELVKEDF

SEQ ID NO: 56628 - protein, 73 aa, Zea mays
  Coding DNA Sequence Number=SeqID_14849
MTKVMLAEGVQNSKNGREFTGAELLPRPEPYDPKADPALKGALDVIRIASEAINEDVSRLLNEAADKILKEND

SEQ ID NO: 56629 - protein, 236 aa, Zea mays
  Coding DNA Sequence Number=SeqID_14850
  Gene Ontology: Mol. function=calcium ion binding; Cellular component =membrane; Biological process=homophilic cell adhesion
  Homolog annotation: Hit_ID=Q6QP54; Match level="QueryCoverage=45%, HitCoverage=44%, E-value=2e-16, Identity=58%"; Hit description =Putative kinase
MGFLRAPSAHPVVSIHGRCVPLHYIFLGHAEVCTAWGLHTLSSVPRQTYSSIYVTLTYRHRARRTPFFPARHRRTPNPGRWANGSDSGSAPEDDELRIARPQGSDSGSAPEDDELRFARPQGSDSGSAPEDDELRFARPQGSDSGSAPEDDELRFARPQGSDSALASADGLRLAQPRGSDSTSALEDRLDLDLGGASTSPNPGLGPTTSQEAPSLPYPKLTQATGNKTGVPSGSLL

SEQ ID NO: 56630 - protein, 140 aa, Zea mays
  Coding DNA Sequence Number=SeqID_14851
MEKMLGEVAQSRAKISRRAQGQASPGEVDVSRPRARAQPGLIVPGEKKCSKDELLRVAAHLECDDLSGGPKWRDKFDCYLAWGLDHGMAPLENNIILSYRRHHLLLRFAWALHPASIIEVVEFKTFGPNIQRGLAASRFP

SEQ ID NO: 56631 - protein, 315 aa, Zea mays
  Coding DNA Sequence Number=SeqID_14852
MSLSWTFLVSVVTCPLVCWARLSSSFHCIDVNRRTTSVHKPLDRLLSVSHQRQETGPHILLPEEEHTAGGGRRDRQALVGETRSSTSFFDGVVSFDVGVTIEAASSKEVAAGINGVGTPTLTTGGAVDYRFLLKYLKQLYAEVVFYKDPSKCSSTIFVREQENNAITPCLMWLSCDSSSLVTCHLVRYHLKKEKDRFLEAKSRVDDAFRRKEYLALVDSYMKEIDLHSDNMYLRSTRYICRCNSLFLTNSSLYYADCGSTVFCSGQALKNIAPTLFMKACQALTNNRWMHFCSPYTHEEEIKEFISLRQGINSTQ

SEQ ID NO: 56632 - protein, 73 aa, Zea mays
  Coding DNA Sequence Number=SeqID_14853
MAHFFSGFVDILLKRESVSWFVSSGCSAAPDAAVLFGNMTKVVKVSTPEVGANVGHLFSNVIDQEQGNTIVNE

SEQ ID NO: 56633 - protein, 302 aa, Zea mays
  Coding DNA Sequence Number=SeqID_14854
  Gene Ontology: Mol. function=electron carrier activity; Biological process=electron transport
  Pfam annotation: Domain name=HlyIII; Domain location=85-298; Score= -70.2; E_value=0.078; Accession=PF03006.10; Description=Haemolysin -III related
MGAENGSNNPSSTVLDGLYGVQLGRPSDPAQTDGGASSSPAACEHHHKRGRGGTAQAQQRLQIRRLWQHRPSCFKPIHCTITCDKHAGETVANVVTSLPFIVLGLQAPRQHICFVCLRAHSARSLLSNARCCRKNLNAAIYANSLVGMGVASSLYHSSRGGIRRLLRWADYTMIATTTLCLSRAVGNENPRLLMAASALLLPFQPLVVSAVHTGLMEATRLTEDNTTLIINYPNGRRQQVSFARRASMEPELRMAHNLHKVSSLLGGALFIADDCFPETPYIHAAWHLAAAIGVGTCNKLLE

SEQ ID NO: 56634 - protein, 203 aa, Zea mays
  Coding DNA Sequence Number=SeqID_14855
  Subcellular localization annotation: CTP_CleavageSite=31; ConfidenceScore=5.10e-01
MDTVASWRLLSPPPCPQQLPKRQATFAASPRQHSASSSSAKFRLLCHLHLHDKIDTHIATNNLALVSLPLPATSPISISPTIPAAPRCLIVHALCSVSRLLLGRDDERAASGVGAAELAAAEAGNGATPLIMNWMRLRWYKREFVETYLQFMFTYLFYPAMMFWAPFVNFRKFPRDPTMRYPWSKPKEGTPLFKDRYPPIDSY

SEQ ID NO: 56635 - protein, 198 aa, Zea mays
  Coding DNA Sequence Number=SeqID_14856
MTLVVPTTAPGEETYRRDRTTPSTYSSMQDDGLAYTATYAATYTVAYTDVFTRYSQQGPRLRQPHLAEGILHALGDPWGPITHTGGFQGQRQELRSPLHRPELALLPPPFNDRGKSQYDFLYLLMSLRKDVINNNAISNLTMTKGDLPTVGAQGGLPHALVGFNATVGHYQALPMAIAKAEWAAAYPSNLMCNNTQMV

SEQ ID NO: 56636 - protein, 543 aa, Zea mays
  Coding DNA Sequence Number=SeqID_14857
  Gene Ontology: Mol. function=acyl-CoA binding; Cellular component =membrane; Biological process=lipid transport
  Homolog annotation: Hit_ID=Q94D04; Match level="QueryCoverage=99%, HitCoverage=98%, E-value=0.0, Identity=65%"; Hit description =Putative p40
  Pfam annotation: Domain name=Kelch_1; Domain location=120-165; Score =32.1; E_value=1.9e-06; Accession=PF01344.15; Description=Kelch motif
  Pfam annotation: Domain name=Kelch_1; Domain location=15-60; Score =30.7; E_value=5.1e-06; Accession=PF01344.15; Description=Kelch motif
  Pfam annotation: Domain name=Kelch_1; Domain location=170-215; Score =35.0; E_value=2.7e-07; Accession=PF01344.15; Description=Kelch motif
  Pfam annotation: Domain name=Kelch_1; Domain location=66-114; Score =12.2; E_value=0.16; Accession=PF01344.15; Description=Kelch motif
  Pfam annotation: Domain name=Kelch_2; Domain location=120-165; Score =20.5; E_value=0.0059; Accession=PF07646.5; Description=Kelch motif
  Pfam annotation: Domain name=Kelch_2; Domain location=15-60; Score =32.1; E_value=1.9e-06; Accession=PF07646.5; Description=Kelch motif
  Pfam annotation: Domain name=Kelch_2; Domain location=170-215; Score =31.3; E_value=3.5e-06; Accession=PF07646.5; Description=Kelch motif
  Pfam annotation: Domain name=Kelch_2; Domain location=220-271; Score =3.2; E_value=15; Accession=PF07646.5; Description=Kelch motif
  Pfam annotation: Domain name=Kelch_2; Domain location=66-114; Score =25.8; E_value=0.00016; Accession=PF07646.5; Description=Kelch motif
  Pfam module annotation: Pfam domain module=Kelch_1::Kelch_1::Kelch _1::Kelch_1::Kelch_2::Kelch_2::Kelch_2::Kelch_2::Kelch_2; Domain location=120-165::15-60::170-215::66-114::120-165::15-60::170
MAWSLVATTGQCPGTRDSHGAALVGHRMLVFGGTNGGRKVNDLHVLDLRTGEWTRPQCKGAPPPSPRESHTVTVVGGDRLVVFGGSGEGEGNYLCDVHVLDVPTMTWSSPEVRGGHAPAPRDSHSAVAVGRRLFVFGGDCGDRYHGDVDVLDVDTMAWSMFPVKGASPGVRAGHAAMSVGSKVYIIGGVGDKHYYSDVWVLDVTNRSWSQLEVCGQRPQGRFSHTAVAMNTDIAIYGGCGEDERPLNELLILQLGSEHPNGRYNISMCKVLSNHWSQEKRKFLRSEARDASVSNGEMAQKPREAETEQRNPFLRGLENGRVKRRRTGEARPKEAESEQEEHSLSLSQHSSPSQSDQEQTGAHKLPASANTSPSALQPFARLNGNGAQLRAAGPGGVSSRPLKADQLLRTIAPQHRREIGAEVHGTVDGAFDSGYLVTAVVNGQLFRGVLFAPGPGVTAPRPAVHHQILTSSAVPPQQRPLLAHAIPVHARPVPLPQATGFVLPDCAHHARQGFPAKAVKSEPERGSSDLHDVVLTLGGPGGGK

SEQ ID NO: 56637 - protein, 40 aa, Zea mays
  Coding DNA Sequence Number=SeqID_14858
MGYATCGYRVQPLQSVKLPYTSHELPPLDFRYVTSTLIIL

SEQ ID NO: 56638 - protein, 104 aa, Zea mays
  Coding DNA Sequence Number=SeqID_14859
MEAQAHMSRNRRASCVVRAAVPPLAPLPRLLDCGTSTTTRGNPAYDPIVPARRIDHGPVSHGRRRDGRCGQKWAGSNGSGRDRERGIPRKGSFPVKETDPEPPY

SEQ ID NO: 56639 - protein, 122 aa, Zea mays
  Coding DNA Sequence Number=SeqID_14860
MSSAADEDALSSDKGKKREEDGTDGRSQRQEGVEVADGKVDLGDLYGAAAGWVEARTSCPHIGTMPPAGADDLARVPSPDSPCSRFGATSLLLEFSVDSLEHSGHVYVYVNLYGHTLKGLEA

SEQ ID NO: 56640 - protein, 89 aa, Zea mays
  Coding DNA Sequence Number=SeqID_14861
MAAAVAAATTADEARLLRLEEHDGGGAWDYLCLARRLRTRHPAHVHRVGLALLNNVTVWLCRTVRACGPDGPRMRRAVQGSEFCAMFVG

SEQ ID NO: 56641 - protein, 146 aa, Zea mays
  Coding DNA Sequence Number=SeqID_14862
MSPPAGVPPLLQLAAALGELRQRLSLHDRHTQRWRGHDITNTTGGGGLGSPYIALVAASSIEGQYSAVRSDSSGCTELGGSGSGRGCGLDQGVAGSAAAAWVEAKPMRRSVPWSPTSASMLMSRATADAETLVISHTAAIGKGWIE

SEQ ID NO: 56642 - protein, 56 aa, Zea mays
  Coding DNA Sequence Number=SeqID_14863
  Homolog annotation: Hit_ID=Q7XD60; Match level="QueryCoverage=94%, HitCoverage=11%, E-value=1e-07, Identity=40%"; Hit description=HAT family dimerisation domain containing protein
MESYTFNPEVVRKELVAMITLHKKDIMDAYVQEKKRALDYMDASKSRVAITTNVDV

SEQ ID NO: 56643 - protein, 102 aa, Zea mays
  Coding DNA Sequence Number=SeqID_14864
  Gene Ontology: Cellular component=integral to membrane
  Homolog annotation: Hit_ID=Q2QQ39; Match level="QueryCoverage=98%, HitCoverage=37%, E-value=3e-43, Identity=78%"; Hit description =Peroxisomal membrane protein 22 kDa, putative, expressed
MATYVFLISGPTLHLWFNFISKLFPKKDVVNTLKKMALGQAVYGPIMKSVFFSYNAGLQGETLPEIIARLKRDLVPAITSGLLYWPTCDLITFKFVPVHLQM

SEQ ID NO: 56644 - protein, 128 aa, Zea mays
  Coding DNA Sequence Number=SeqID_14865
  Pfam annotation: Domain name=zf-CCHC; Domain location=43-60; Score =24.6; E_value=8.8e-05; Accession=PF00098.13; Description=Zinc knuckle
MVKKLEKGETVARVNLHKKRVPKAMREANNKNKEKEQKEERKKRCFKCKELGHFIASCPHMDTEDEGRRCSTYNKKNHVIMSYPLIKNQGRASPTIALTKTKNEQQASYQAKRRFYYKCGEQGRLHKI

SEQ ID NO: 56645 - protein, 122 aa, Zea mays
  Coding DNA Sequence Number=SeqID_14866
  Homolog annotation: Hit_ID=Q9LUU1; Match level="QueryCoverage=71%, HitCoverage=97%, E-value=2e-29, Identity=61%"; Hit description =Arabidopsis thaliana genomic DNA, chromosome 3, P1 clone: MGD8
  Pfam annotation: Domain name=Complex1_LYR; Domain location=44-110; Score=19.4; E_value=0.0086; Accession=PF05347.5; Description=Complex 1 protein (LYR family)
MDAEVRSKRMPQLLGAAYVHHAGVVVITTTLKEMPSLQKALPPELADNVLRLYRECLRRAKYISHQKHNTKLLVAMVRQQFKKNMHETDPEKIQKMKDDSARGLINHILYESEKITGHKFSG

SEQ ID NO: 56646 - protein, 119 aa, Zea mays
  Coding DNA Sequence Number=SeqID_14867
  Homolog annotation: Hit_ID=Q9LRE6; Match level="QueryCoverage=40%, HitCoverage=4%, E-value=7e-12, Identity=69%"; Hit description=DNA polymerase delta catalytic subunit
ANQEAEQSYAGEHAFIIFPQLIFFEISLVNPSPDTPHVPPPASVVAAVEKDMMDEDVFLDESILEEDEAALLMLQCDEALASHLARWKRTTIPTNLARQMFLRCRYDPISLLSQHCRQE

SEQ ID NO: 56647 - protein, 47 aa, Zea mays
  Coding DNA Sequence Number=SeqID_14868
MGAGTSGAAGVGHLFSDAMNQEQDNTNVNGYNDLQTKVMKDIPSSFP

SEQ ID NO: 56648 - protein, 45 aa, Zea mays
  Coding DNA Sequence Number=SeqID_14869
MVVVLGRQPTSILDLLEDDSSSASTEPSLDSDEAGHDSPIDPQTG

SEQ ID NO: 56649 - protein, 216 aa, Zea mays
  Coding DNA Sequence Number=SeqID_14870
MGEESRAGDHSEPCLAHAIALTSPYDAGPIQAPLGHACSHARAGPTAMAAPSEPPPTRGMGRRTPRRQCRGRAPAEAGWGSRLEDRRGRIRGTRARASLLGAVPAPAPPRPRPPGMPGPRAHGTAPSPAWPGLRATGPHPRQATRVEPWPRPHRRRALASRRAVRLYRAGAARWRVRDGGPTRARSWSCAPARAAPPGAAAPRGGTPGPEPPGTGS

SEQ ID NO: 56650 - protein, 153 aa, Zea mays
  Coding DNA Sequence Number=SeqID_14871
  Gene Ontology: Mol. function=catalytic activity; Cellular component =intracellular; Biological process=metabolic process
  Homolog annotation: Hit_ID=Q6K1V9; Match level="QueryCoverage=89%, HitCoverage=15%, E-value=1e-47, Identity=66%"; Hit description =Ribosomal protein-like
MYQDYLAENPTYGPNLFRRRFRMNRPLFLRILNDVEQHDDYFEQKRNAAHQHGLSCFQKVTAVFRMLTYGVAADAIDEYVRIGESTTLESLRRFVKAVIDVFGDEYLRSPNEKDIERLLALGNERGFPGSSRVAAPHWHVPEFGIGRGSTASF

SEQ ID NO: 56651 - protein, 106 aa, Zea mays
  Coding DNA Sequence Number=SeqID_14872
  Gene Ontology: Mol. function=DNA binding
  Homolog annotation: Hit_ID=Q9LGH0; Match level="QueryCoverage=76%, HitCoverage=21%, E-value=2e-12, Identity=47%"; Hit description=NAM -like protein-like
MKEVNDAAPNAIEIPEIEPSQRPLEKEMKREERHAKSFALDKEMLELEKERIALKKEKVANEANNNFLKRIAEEDRIMTIDLSAMNEMQQQYYLSIQAEIMARRMN

SEQ ID NO: 56652 - protein, 102 aa, Zea mays
  Coding DNA Sequence Number=SeqID_14873
MQQRIFRLAWMRCSYPLYRLAVASELVIERCLQKRYIQQIRQTVGGGGRGGGERGDLNPVPAAARKRSYDDRERRGGTPAKNMSGGEEAEPSADVKGANRVT

SEQ ID NO: 56653 - protein, 923 aa, Zea mays
  Coding DNA Sequence Number=SeqID_14874
  Gene Ontology: Mol. function=hydrolase activity, hydrolyzing O -glycosyl compounds; Cellular component=integral to membrane; Biological process=carbohydrate metabolic process
  Homolog annotation: Hit_ID=Q8W2Z8; Match level="QueryCoverage=54%, HitCoverage=95%, E-value=0.0, Identity=58%"; Hit description =Putative exoglucanase
  Pfam annotation: Domain name=Glyco_hydro_3; Domain location=386-594; Score=208.5; E_value=1.5e-59; Accession=PF00933.12; Description =Glycosyl hydrolase family 3 N terminal domain
  Pfam annotation: Domain name=Glyco_hydro_3_C; Domain location=633 -811; Score=119.5; E_value=9.4e-33; Accession=PF01915.12; Description= Glycosyl hydrolase family 3 C terminal domain
  Pfam module annotation: Pfam domain module=Glyco_hydro_3::Glyco_hydro_ 3_C; Domain location=386-594::633-811
  Subcellular localization annotation: CTP_CleavageSite=29; ConfidenceScore=5.03e-01
MNAAKSAFEHFKNINHDAGSSGSANPLPVAATKQSVDGNTLRAKLEVNKSHLAEPSTEVEAIYSSTEVDKLPLPGPSMDIEVMDSTLEVDKLPLPERSMDVKVVNSSLKVDKLHFAEPITEAEVIHSSLQVDEPLIPKPGMSSSLENTPAVNGHSAPISPTITPTLISVPTATMPVSNDRCGCYMSTNRIQVYPRHTDMVIPEGAAVLPISDNQWVAVSLPYSMEQSTLPQQDLCVECIERTELERSPIRRVPPNVPSESTALAYRSRHLAPPLPLPASPPRIRISREIGGCHYSVPLSANLAANAEYMKYKDPKQPINSRIRDLIGRMTLAEKIGQMTQIERQVASANVMKQYFIGSILSGGGSVPSPQASPAIWVNMVNEFQKGALSTRLGIPLIYGIDAVHGNNNVYNATLFPHNIGLGATRDPGLIKRIGEATALEVRATGIQYTFAPCIAVSTDPRWGRCYESYSEDHKVVQQMTDIILGLQGEIPVNHTKGVPYVAGKDKVAACAKHYVGDGGTHNGINENNTIIDEHGLLSIHMPPYYDSIIKGVATVMGFVISDWLGVDRITSPPGANYTYSVQAGINAGIDMVMVPYNYTDYINDLTSLVHKGVINISRIDDAVKRILRVKFTMGLFENPLADLSFAEQLGKKVGTTILDAIKSTVADSTSVVYSENPDDSFMKHNDFSFAIVVVGEPPYAETVGDSTDLTMLDPGPDTIRTVCAAVKCAVVIISGRPIVIEPYVPLVEALVAAWLPGTEGQGVADVLFGDYGFTGKLPHTWFKSVDQLPMNVGDLQYDPLYPFGFGLMINSSLPGFSGVDNLGYRKQRVLFAVLPKQRSMSTFWLMGASQPIKASLEGYGTPLEASLLLLIPRGGRACGSSHAHCDGHIGVCEADLTGGDGEEVNGTECDAAPRRKGLTAGER

SEQ ID NO: 56654 - protein, 476 aa, Zea mays
  Coding DNA Sequence Number=SeqID_14875
  Homolog annotation: Hit_ID=Q2HS71; Match level="QueryCoverage=40%, HitCoverage=20%, E-value=3e-63, Identity=64%"; Hit description =Methyltransferase small domain, putative
  Pfam annotation: Domain name=MTS; Domain location=222-411; Score= -80.0; E_value=0.0084; Accession=PF05175.4; Description =Methyltransferase small domain
MECSPPRHSWRLPRSPSPRPRRLAVLVGAGDGCGVLRGGGLRGVPAGGEPRRLRHHRRCRPHVRLRRREAGPIAGPHPHLCDYVTTIKRFLQVLWAIGALGSVGTYLVAARPLDEGLVQYVVDHPAVLWFVGPTFVVLTGLVFKEGPLQQSTIEDSGFFYFNTHEWYTIFGADSPAIQENKVATMQYISGTGSLRVESEFLASLFLKASSGRTLITAQIPLVASHPDVHEPCDDSFALVDALLSDKAQLLTLQPRLCMEVGFGSGYVITSLAIMLRQLGSGAQYLATDINQHAAETTQATLEAHGVHADVIVTDIMSGLDKRLAGMVDVAVVNPPYVPTHVEEVVCRGIAASWAVGLNGRQVIDRILPAVREMLSERGWLYMVALEDNDPSDICHLMSEMGNLREMFQIDAADYMMSICGDDSLKELSSPGKSGSIFYLSQDERFVIKTLRKTELKDYSERRKKGAESHHCCITLI

SEQ ID NO: 56655 - protein, 65 aa, Zea mays
  Coding DNA Sequence Number=SeqID_14876
MAGRTFQDLKEQQVVHGEVENTLGPGSINLALENPIPKDWRTIHMIGVESNLLDIVSNSVGTSIT

SEQ ID NO: 56656 - protein, 65 aa, Zea mays
  Coding DNA Sequence Number=SeqID_14877
MGQGGRVAMDVEIRAHQDFGLELPSECAVEIQWYALPRQHIHTHDINADSPCAVSSRQLHHRSGP

SEQ ID NO: 56657 - protein, 395 aa, Zea mays
  Coding DNA Sequence Number=SeqID_14878
  Homolog annotation: Hit_ID=Q5ZDB2; Match level="QueryCoverage=77%, HitCoverage=35%, E-value=2e-79, Identity=76%"; Hit description =Putative HASTY
MDLAKQHAGTVTAVLNAVNAYAEWVPVTDLAKYGLIHGCGSLLSYSDFRLHACEFFKVICQRKRPVDVAVAEYDAAMCNIFQMLEYYQHYKITLHFQSLLFWLRMLKNNGSATSGLLEIWSEELEGKSDFCNYRTKLLDLIKVIASQRSVIAAAIVVQRINVVFGDANQATKSPQDLDAMEGAQLGLEAVVNAIFDGSVDCGKTDLDTKSQLHKIFEEPNLAVIHGHYLDALGPFLKHHPDAVASVVNKLFELLTSLPITFQFSFLPFNVWLYLQDPSNNSRLARLQICSSFIRISRAADKALLPHMKRPARPAATCRPPQPVHSAATCAPRRRLLFPRRRAALPQPPLSLLRNSSLLCLAGWSRARLPQPQGVAPTKPRRRPEDFLRRNGRLTL

SEQ ID NO: 56658 - protein, 136 aa, Zea mays
  Coding DNA Sequence Number=SeqID_14879
MKRKNRKRNKKHAHSYSDDARRHKRRSRRSTDSSDESDSEYESRRHHQSSDDDSEKDKVKSRHGKPLRSSDEDAKSDSNRHQMVELLMNQRRLEMAKGRTRMATDTTIKDIIPWFFFPKVWAQLNIPAIIEPQFSR

SEQ ID NO: 56659 - protein, 660 aa, Zea mays
  Coding DNA Sequence Number=SeqID_14880
  Gene Ontology: Mol. function=transferase activity
  Homolog annotation: Hit_ID=Q6ZFR0; Match level="QueryCoverage=54%, HitCoverage=65%, E-value=4e-72, Identity=39%"; Hit description =Putative HGA6
  Pfam annotation: Domain name=DUF563; Domain location=287-514; Score =243.3; E_value=5.1e-70; Accession=PF04577.5; Description=Protein of unknown function (DUF563)
MGMDAGGGKLPYSYPAHQDGKLVKSFSRVEPRKFGLALVAGFLLVTCAYFSTAKFDAIHVAMTVSPVSGNAAGIGPLVGAANADTSDSKQRLDLGKQDPDDALSRSEEEEGSRADEVLEKDDGKASSSSGTDSGSNAPLEDTRRDETFVGDSGGASSAAGARSEAVPARHEHDDDAPAAALLPPVTSEGAANSTQGSGVLEDEELQVQDAVANPSKRSNDSAATRSSSSGRSPSVVHSDPAILPAPSQQIAPAAPQEADKALAVQHIPAIPEVKQSDSETPAREWKPLCDITSNRRIDWCELDGDVRVLGANASVTLVAPPGGADGRTFRAESWRIKPYPRKADPNAMRVVRVLTVRSVPGEAPACTDRHGVPALVFSDRGYTGNYFHAFTDVILPLFLTARQYAGEVRLLVTDLQAWWVGKFAPVFRSISNYELVDLDRDPRVHCFRHVQVGLTSHDDFSIDPRRAPNGYSMLDFTGFMRAAYGAPARRRRRRRWPVVEAAAEAAADRARADAAGTHEVAPFAELANSCDAIMGVHGAGLTNMVFVPTGGVVIQVVPLGGLEFVAGYFRGPSRDMGLRYLEYRITPEESTLINQYPRDHPIFTDPNGIKSKGWESLKDAYLDKQDVSLDMKRFRPTLKKAIAHIRKARAKANAGGGGNN

SEQ ID NO: 56660 - protein, 331 aa, Zea mays
  Coding DNA Sequence Number=SeqID_14881
  Gene Ontology: Mol. function=zinc ion binding
  Homolog annotation: Hit_ID=Q9ZU41; Match level="QueryCoverage=90%, HitCoverage=80%, E-value=1e-55, Identity=43%"; Hit description =Predicted by genscan and genefinder
  Pfam annotation: Domain name=DUF789; Domain location=19-322; Score =406.4; E_value=4.1e-119; Accession=PF05623.3; Description=Protein of unknown function (DUF789)
MAAGFGPRFAAGDAPARRCNLERFLEATTPVVASSSCSSKETANGWGQRQSDDADGSSPFFALGDLWDSFKECSAYGTAVPLALNGCSDGVVQYYVPYLSAIQLYGALRRHIGPSRTGAEESDSDAERETSSSTNTLSAREEASESSTSGSEASGDEGEPGPGSWCQERLLFEFLESEPPYQREPLADKACHICSLAQRFPELKTLRSCDLSPASWISVAWYPIYRIPTGPTLRDLDACFLTYHSLSTQFAAGASSNGPRPATAATATAMMWLPTFAMASYKLKAAAWTPGWRDRQVAASLAQAADAWLRLLRADHPDHRFFAARRPPRRW

SEQ ID NO: 56661 - protein, 118 aa, Zea mays
  Coding DNA Sequence Number=SeqID_14882
MSVDFEVLVMDLDPTVEVEEHRLQTFNRRTLILCSMSVPKVQHKPIKIQERVQIKRAKDNPKAALVWRTGLSGVPPDSVRCTREPNSELATFGNSGSHSAIIHWTVWCSTGLSGVSAE

SEQ ID NO: 56662 - protein, 242 aa, Zea mays
  Coding DNA Sequence Number=SeqID_14883
  Homolog annotation: Hit_ID=Q10QS4; Match level="QueryCoverage=28%, HitCoverage=10%, E-value=3e-17, Identity=67%"; Hit description =Mitochondrial import inner membrane translocase subunit Tim17 family protein, expressed
MAGERGEDGGVGGGGGVAEEGEDMEGGGEDVRLGVSGDEGVRGREGGGKRAELETGRVEGGDCVLGEEGCLAMEIPNCVSTKPHVQDSNAALYSRQKYAEAKLYETLMMPTMCSLKSAQVAKKYIYYVHRPDEEEGLKARCHYRSDKVDNVVYCLEDDVYVKVSGAADPFIHQLQSLGPIHIVRPSIAIASRTAGSAYNCMDNIPPDIISQLLAFSNKFCYEGLKPTYDNRVTTMVRGLDDA

SEQ ID NO: 56663 - protein, 54 aa, Zea mays
  Coding DNA Sequence Number=SeqID_14884
MGPWALKSEEIKASIKVIADPKAREVHKCHIIESNSTYSSNRVKGKNMDEVSYD

SEQ ID NO: 56664 - protein, 71 aa, Zea mays
  Coding DNA Sequence Number=SeqID_14885
MAKHRRGWNWPSIGHNEGNLAQGRVSHLGAELGEAWGGLWRAGWPGHGRESPTAAGGKGRARERVRVCEMR

SEQ ID NO: 56665 - protein, 386 aa, Zea mays
  Coding DNA Sequence Number=SeqID_14886
  Gene Ontology: Mol. function=catalytic activity; Biological process =cellular metabolic process
  Homolog annotation: Hit_ID=Q94KE6; Match level="QueryCoverage=61%, HitCoverage=71%, E-value=1e-118, Identity=90%"; Hit description =Dihydro-flavanoid reductase-like protein
  Pfam annotation: Domain name=Epimerase; Domain location=103-310; Score=-24.4; E_value=0.00014; Accession=PF01370.11; Description=NAD dependent epimerasedehydratase family
MAGRRGADAVEAGRRGAGRRPAQGTDRRQGRRQAGAELEEDRRWRRTAGSLGACLRGGSGGAQDQPEGRGAARWEEGGDRRREGRRGCPRWLQGQRWLQGWCGGGSRDGRRLGGSVGERERGRKPNLALVGQHIDLCQCLAENMVTSSKGKEETLVPAVNGTLNVLRSCKKNPFLKRVVLTSSSSAVRIRDDGQSSSNISLDETAWSSVPLCEKMHLWYALAKVFAEKAAWEFAKENGIDLVTVLPSFVIGPSLSHELCVTASDVLGLFQGDTARFSSYGRMGYVHIDDVASSHILVYEAPQAAGRYLCSSVVLDNDELVSSLAKRYPIFPIPRRLNSPYGKQSYQLNTSKLQGLGFKFRGVQEMFDDCVQSLKDQGHLLECPLAS

SEQ ID NO: 56666 - protein, 584 aa, Zea mays
  Coding DNA Sequence Number=SeqID_14887
  Gene Ontology: Mol. function=transcriptional elongation regulator activity; Cellular component=cytoplasm; Biological process =regulation of transcription, DNA-dependent
  Homolog annotation: Hit_ID=Q7EZ88; Match level="QueryCoverage=80%, HitCoverage=98%, E-value=1e-128, Identity=50%"; Hit description =Ternary complex factor-like
  Pfam annotation: Domain name=DUF547; Domain location=360-504; Score =244.7; E_value=2e-70; Accession=PF04784.5; Description=Protein of unknown function, DUF547
MGSEVEWTGCRLLEPHQCSRQAGSEATGCAGASAAAIAMQTQQGQAIHPAHATQQQPEPGAAVELPRRKLSHGAFVALRRTWTDSSLFPAVTAQGSRSRSAMERESRSRVLSETASCAGTPRSVQSTCSLQRRYSSRSILKPHDGALDMSPRFSYCKPAADREKMFNRRHSLNLPEQLPDLVGEIAALEQEVIRKELHLLALYRRAFDQYVSESCSFTSEEEQEEAPPEAKAGARHSSLVNFLSASISEYVPKISCKLSEDILGCIAAVYCKLSGAEGECCVASPSPSVSSWSTFSPRRRNDSWSPRSRCNNFDSWSPRPCGVEKESGEQSPGVMMVVVPRIRVDADTFEYASKMLETTRSLIQRLEKVDPVKMTHEEQLCFWINIHNALVMHAFLAYGLHDKRMKSTDMILKAAYNVGGQSVNAQTIQNSILGCRQSHRPSLWVRALFTPAKRSAARHPYALQHPEPVAHFALSTGAFSDPPVRLYTAKKIQQQLEAARTEFIRGSVAVRKQALLLPKVLHCYARDAALELRHLVELVCETLSDAQQKQLQLGLRRRAVDKCVEWMPYKSSFRYVVHRDLADD

SEQ ID NO: 56667 - protein, 188 aa, Zea mays
  Coding DNA Sequence Number=SeqID_14888
MARLAVAGTVVTARERGSGRPRHRTLPPPPLFLCSADELGFDAPPRALAADEALQPGQLYLVLPDSALRRPLTAKDMAALAVKAATALRGRGGSRRRPVAGARQPRRDAGGQEAAAAVGSASGSSSSRREQGEQPASRLAMVLLGRTTCTVGTQRVLRVKTVDAQRGRRGRELATEPAVLAIVPSCRG

SEQ ID NO: 56668 - protein, 415 aa, Zea mays
  Coding DNA Sequence Number=SeqID_14889
  Gene Ontology: Mol. function=cation transporter activity; Cellular component=integral to membrane; Biological process=cation transport
  Homolog annotation: Hit_ID=Q94IH5; Match level="QueryCoverage=90%, HitCoverage=91%, E-value=0.0, Identity=91%"; Hit description=Ca2+/H+ antiporter
  Pfam annotation: Domain name=Na_Ca_ex; Domain location=273-395; Score= 100.9; E_value=3.7e-27; Accession=PF01699.14; Description =Sodiumcalcium exchanger protein
  Pfam annotation: Domain name=Na_Ca_ex; Domain location=82-229; Score =108.6; E_value=1.8e-29; Accession=PF01699.14; Description =Sodiumcalcium exchanger protein
  Pfam module annotation: Pfam domain module=Na_Ca_ex::Na_Ca_ex; Domain location=273-395::82-229
  Subcellular localization annotation: CTP_CleavageSite=37; ConfidenceScore=5.31e-01
METPQVEMGGFKVNSPQVPNGGLRPTVSSSWNSQGTVERALRSIRIVIFTSKLNLLMPFGPASIILHFTTRRHGLVFLFSMLGIMPLAERLGYATEQLAVYTGPTVGGLLNATFGNATEMIIAIYALKNGMIRVVQQSLLGSILSNMLLVMGCAFFAGGIVHRNKDQVFSKATAAVNSGLLLMAVMGLMFPAVLHFTHSEVRQGASEVALSRFSSCIMLVAYASYLYFQLSGRSNIYSPIGSEEAPSEDNPEEDEEAEIGMWEAVTWLAVLTFWVSFLSEYLVNAIEGASDSLNLPVAFISVILLPIVGNAAEHASAIMFAMKDKLDITLGVAIGSSTQISMFVIPFCVVIGWTMGQKMDLNFQLFETATLFITVLVVAFMLQVYIDPDFTAAIYNMDRENVSILSFGAVVKWPS

SEQ ID NO: 56669 - protein, 123 aa, Zea mays
  Coding DNA Sequence Number=SeqID_14890
AVIDVDSAENGPEEGVAKRNKRKSDVGALLRYIVLEGDSLLVVLYCSAQLASVVVAIRMNRKSRRFAMERKEANAGIPKEVNDKAQNIMHQIKSPYPERSFGPLPALYTPNPNPTPGTGNVPA

SEQ ID NO: 56670 - protein, 155 aa, Zea mays
  Coding DNA Sequence Number=SeqID_14891
MPKLQRFRGEDEDLAGHVRDGGGRGAGVRRGGAADERALGAHQLPPEPERRRRHPLPDAAREAGRNAARRWRKSRSTARTCRGRVGGRDDDSSSRGAPRPDAGAVKVDPDADGEDQYIEEMIRELTYYGPVEIQHHPSASSGAAAAAACSSSAIS

SEQ ID NO: 56671 - protein, 122 aa, Zea mays
  Coding DNA Sequence Number=SeqID_14892
MISIHHQEQNCNLADGEYVLVPEQGVAQEVAPDPALEPAPEDLPAPALEGKPPQIALLTLPETWSPIPVMVGTSAVTARRQSGSVRHCSLEDMVAGVTWPSILPPGWTIEWDPASAKEEHEE

SEQ ID NO: 56672 - protein, 190 aa, Zea mays
  Coding DNA Sequence Number=SeqID_14893
MSSSSSSSSTTTSCSNALSSEKTISDPVEVVELQHGHTVEFGTSRIYSGHVLEKQCLGYFGNGVGRAPGAEDVPEPERELVVFEVFFVAGLRLPAHRFLIEVLRKFEIQIQQLTSNAMVALAKPRLMPSLGDQMVWSPAFAIDLRGRDATSFVWEVESEAIKIVGKYVPKTEMLRSWDIRGSNVRLNRVF

SEQ ID NO: 56673 - protein, 273 aa, Zea mays
  Coding DNA Sequence Number=SeqID_14894
MGLKGSRLFVEELTGTCAGPGEGCSIYDNAPRVAPAAAAKLSLPSCVIETTVLETRQIGHELSVDDYLVGGVTMFDAQTGLLPAGAEAGQLVVVPAKVPAGLGDLAKGDTRTLLDPCLNFCAAADGGSEVALAAAIDGVATSVTRQLQYVTVLEKEKEDLDRRLKDEKEAAAEAKTDAKNARAKAQATRKHATDLELEVEDDVLKHSIGALYDRMWGPHGRGVVREKADRALAQAMRDEEVEDLTGLESSVTRKDVEVEMGAEEQSSNKEGGA

SEQ ID NO: 56674 - protein, 280 aa, Zea mays
  Coding DNA Sequence Number=SeqID_14895
MAHQSTVFSIQEAQYDERRLLFPHGGHGGWNLLFSAHGNELDHGAPIRAGEKGGKKHGSIYTPAAKSERRKRHRTVEGRSSALLLWLDAEQPHHEGKGAQSTESHGSESVTAQGGGSSSRATTRIWGRRAGETWPARTTDQRPRSCTWRERLTPKSKAATRDSGEACVDEVVRNRPVGCRLSRGFRRARREVEDETGDAGPPASENQIARTDGRGPRGGGTAFARSAGWGEDATDQAGPGRKWRVRMTPRLTAGPTGQRQGARWLSRGDGSRVMGQASGK

SEQ ID NO: 56675 - protein, 99 aa, Zea mays
  Coding DNA Sequence Number=SeqID_14896
  Subcellular localization annotation: CTP_CleavageSite=77; ConfidenceScore=5.30e-01
MTTKRITPKVVGGIYSPEPPNNRWGRLLSMGAPDSPMRQPRHPTVRVRAQSTVGALSSSGTRQSGAAPDSFCSRPLREGAVAPLVHRKVRWHTGQSGEL

SEQ ID NO: 56676 - protein, 104 aa, Zea mays
  Coding DNA Sequence Number=SeqID_14897
MATTDSVFQENNGEEGERNKVNVHIARNGTTVSSIGQRSSRQTGAAGGLQRARARAVLAREIVAVGPGAAFSAARPLRRLRRAGVRAAEGRRAGVGERRGWAGR

SEQ ID NO: 56677 - protein, 59 aa, Zea mays
  Coding DNA Sequence Number=SeqID_14898
MALFRRLFYRKPPDRLLEIADRVYGTVTPAPPVRLPPPNPNYRFGGYFGVPHYVDLPLR

SEQ ID NO: 56678 - protein, 262 aa, Zea mays
  Coding DNA Sequence Number=SeqID_14899
  Gene Ontology: Mol. function=actin binding; Biological process=actin cytoskeleton organization and biogenesis
  Homolog annotation: Hit_ID=Q1SZ88; Match level="QueryCoverage=72%, HitCoverage=10%, E-value=2e-53, Identity=54%"; Hit description=IMP dehydrogenase/GMP reductase
MDQYRYKNYLDNIILQLREQFADSSLMVLNFRDEGKSLISGIFSKYNITAKDYPCKKQYNGEQRTLDMVYKQAPKELLQMLTTLNPQPSHLRYLGYICRMDDGIGWPTQPIPFTLDCVILREIPNFDGVGGCRPIVRVYGQDIPTTDRSHSVISPPSKAKKHIRRYRQADNAPVKLNVGSCVQGDVVLECLHVDDGQGNERLMFRVMFNTFFIQSHILPLNFEDIDVPWDADHQFTKNFKAEIIFELQVPNVGKTLHFPTLI

SEQ ID NO: 56679 - protein, 268 aa, Zea mays
  Coding DNA Sequence Number=SeqID_14900
  Gene Ontology: Mol. function=catalytic activity; Cellular component =cytoplasm; Biological process=metabolic process
  Homolog annotation: Hit_ID=Q75LI3; Match level="QueryCoverage=99%, HitCoverage=100%, E-value=1e-114, Identity=75%"; Hit description =Expressed protein
  Pfam annotation: Domain name=Hydrolase; Domain location=10-221; Score= 14.6; E_value=0.003; Accession=PF00702.16; Description=haloacid dehalogenase-like hydrolase
MEAILERPKYECLLFDLDDTLYPFSAGINLACRKNIQDYMRHHLHIEERQVADMCLDLYKEYGTTMAGLKALGYEFDNDEFHATVHGTLPYHNLRPDPVLRTLLLSIPQRKIVFTNSDKAHAEEALCRLGLQGCFDGVICFETLNPCNGPSAFRDGNGMLFPDETFPDSADLNESDGFRPISPILCKPSIEAMEAIFFDDSTRNIASGKAAGFHTVIVGRPTLVPGADHALESIHNMKEALPEIWDGQDRSESDALLSPTAVETPVAA

SEQ ID NO: 56680 - protein, 156 aa, Zea mays
  Coding DNA Sequence Number=SeqID_14901
MTPYTAVGAAAAYGKQRPVKIEWTINPAHPPQHDTAPGGSYVERPSEAQAKTPPPIPPYECRPLPCRLNATPCHCHLSVPLVLRVPPVVALARPLDTWTQATVEWSSVKKKLDLVARGKLENGHLLHMFKSYCIMLWRLTLTQDMCAVVPQRDHGL

SEQ ID NO: 56681 - protein, 124 aa, Zea mays
  Coding DNA Sequence Number=SeqID_14902
  Homolog annotation: Hit_ID=Q7EYV6; Match level="QueryCoverage=48%, HitCoverage=12%, E-value=2e-15, Identity=68%"; Hit description =Anthocyanin 5-aromatic acyltransferase-like protein
MGRKEEGEEGRGRKKGEESQTTKPVIQSKTPLQPVIPPVQRLFFYNRADLLDVSDFTLGELPRFRDSLAAALHHFYPLAGKLTCELVDEEGAAPPEGPRDQERREEEGSREQGAPGGWSSRAGS

SEQ ID NO: 56682 - protein, 115 aa, Zea mays
  Coding DNA Sequence Number=SeqID_14903
MSVRVASVPYLEQMARWERQVERRQLFLRSYHFSRDADAAAALPPRARARRVVWAGMRRLRRAAATGLRRLRARLRLCFGWAARRRSSSRYGRLSGAGRPRAAAAAGAAESACFW

SEQ ID NO: 56683 - protein, 198 aa, Zea mays
  Coding DNA Sequence Number=SeqID_14904
VGACREVAGDTDCAGGLAPVAMSMDDDSMDDEFVKAIEAEERRLEAQNEQDDARCFLLGSSSAAAIEVDGTGAGTGTETGPSMADTLTGSTSPMAIADASRSVAASGAFNAKGESDRQSGLAKGATANSAPPDPRARTRAKTRKTANSAPPDPRARTRAKDPEDGELRSARPPGLGLGLKTRKDGELRSARPQGSDSG

SEQ ID NO: 56684 - protein, 84 aa, Zea mays
  Coding DNA Sequence Number=SeqID_14905
  Subcellular localization annotation: CTP_CleavageSite=46; ConfidenceScore=5.13e-01
MALHKLCDDGGPQLSYGSRATSARTRPLQQLSLRQAPSHLRQPRHHASKESKGTSEMPMPDQREQYMTTVHLFIGTGRSPLLEK

SEQ ID NO: 56685 - protein, 167 aa, Zea mays
  Coding DNA Sequence Number=SeqID_14906
  Gene Ontology: Mol. function=DNA binding; Cellular component =mitochondrion; Biological process=DNA integration
  Homolog annotation: Hit_ID=UPI00004C1733; Match level="QueryCoverage =73%, HitCoverage=9%, E-value=2e-61, Identity=90%"; Hit description =UPI00004C1733 related cluster
  Pfam annotation: Domain name=rve; Domain location=32-160; Score=53.6; E_value=6.5e-13; Accession=PF00665.16; Description=Integrase core domain
MGSRLIETGRPRTCNISTRKAPPRQRPKLGDWRSAPSRSSYWAMKKAPEGFSHLLVAIDKFSKWIEARPLTSIRFEQAVAFFTNIIHRFGVPNSIITDNGTQFTGKKFLDFCEDHHIRVDWAAVAHPMTNGQVERANDMILQGLKLRIYNDLNKFGRRWMKELPSVV

SEQ ID NO: 56686 - protein, 586 aa, Zea mays
  Coding DNA Sequence Number=SeqID_14907
  Homolog annotation: Hit_ID=Q10B16; Match level="QueryCoverage=63%, HitCoverage=66%, E-value=6e-94, Identity=51%"; Hit description =Expressed protein
  Pfam annotation: Domain name=X8; Domain location=410-494; Score =175.0; E_value=1.8e-49; Accession=PF07983.3; Description=X8 domain
  Subcellular localization annotation: CTP_CleavageSite=45; ConfidenceScore=5.12e-01
MTKTGSGYMCRFPLSHWKHTSSRLARPGHELRRRQPFGSGGFVLPAHTAPVAQLVQKLAQCPSPISEKSFLCYKDFFYLPVHTFTDQQNAVQLMQLAHMLDEMYLICLPEIEMVFSSIPGVSVELSYDSAQVKALSSSAVTEYRVTVTDKRRAYYVFQKPFVCRDKPCRSSEPIAAAGSFVNEAIAGAKRHEPEANGELAVVAEIEGAGVVPHVKSRVAPSAVAMSSGREKRLLGVLVDVPSPRRELGEARATARDEFSPVSNPATTPVSNPVTVPATNPMPPGFVTVPSTNPGNGIATNPNLPPLYPEPTTPGTMPMPDPTTTPVTVPPAFTNPVAAPNTMPGTAVTNPATTPTQFPGSSPVTNPVTTYPYPQQGGMPATTPPAVYQPPATAMPGTVQPGAPTVAGQAAWCVAKSGLMDTALQDGIDYACGVGGADCSAIQPMGACYNPNTLQAHASYAFNSYFQRNPSAASCDFGGAGMLVNVNPSSGTCVYQTPAGFGAGYSPGTTGVGVPSGYTPGMSGAVGGGSGSTVLNANDPGGNSMYDDGYDNPTGLTAGSASLSCGGRVVVCLIWMVTFAFVREKML

SEQ ID NO: 56687 - protein, 71 aa, Zea mays
  Coding DNA Sequence Number=SeqID_14908
MAYLGVDVARAVDGAQGPRRWLLRLWGGGEEGKEQRRWARWLASWARWVGEGGQREEKQRNERVTPEFGGY

SEQ ID NO: 56688 - protein, 45 aa, Zea mays
  Coding DNA Sequence Number=SeqID_14909
MSSSSSSSASASPATPLSEKALNDSATFEVAEEDQDEEDLHYAAA

SEQ ID NO: 56689 - protein, 271 aa, Zea mays
  Coding DNA Sequence Number=SeqID_14910
  Gene Ontology: Mol. function=DNA binding; Cellular component =mitochondrion; Biological process=DNA integration
  Homolog annotation: Hit_ID=Q9ATW2; Match level="QueryCoverage=99%, HitCoverage=93%, E-value=1e-136, Identity=87%"; Hit description=RIRE gag/pol protein
  Pfam annotation: Domain name=rve; Domain location=1-142; Score=69.8; E_value=8.6e-18; Accession=PF00665.16; Description=Integrase core domain
KAPGGFTHLLVAIDKFSKWIEVRPLNSIRSEQAVAFFTNIIHRFGVSNSIITDNGTQFTSRKFLDFCEDHHIRVDWAAVAHPMTNGQVERANDMILQGLKPRIYNDLNKFGRRWMKELPSVVWSLRTTPSRATSFTPFFLAYGAEAIFPTDLEYGSLRARAYNDRSNQTSREDSLDQLEEARDMALLHSARYQQSLRRYRARGVRYRDLQVGDLVLRLRQDARGRHKITPPWEGPFIIAKILKPGTYKLANSQGEVYNNAWNIRQLRRFYP

SEQ ID NO: 56690 - protein, 99 aa, Zea mays
  Coding DNA Sequence Number=SeqID_14911
MEERAEGLTRGEIAPVRHPGRSGSSGGLADGGACSLRRSPMFSGLDESEGVRGDTAKAVGALIGEGEAQACGGARYRGQSALGWPDTVLSTWLFASTRV

SEQ ID NO: 56691 - protein, 42 aa, Zea mays
  Coding DNA Sequence Number=SeqID_14912
MSGNMVTGMLQDMVDGVTWPSTLPPSWTVEWDAASTGEEQEE

SEQ ID NO: 56692 - protein, 122 aa, Zea mays
  Coding DNA Sequence Number=SeqID_14913
  Gene Ontology: Cellular component=intracellular; Biological process =RNA processing
  Homolog annotation: Hit_ID=Q10Q44; Match level="QueryCoverage=62%, HitCoverage=10%, E-value=2e-16, Identity=50%"; Hit description=Pre -mRNA processing protein prp39, putative, expressed
MAPFTILDAKDGVVSDFLSLSTMLFPNFSADLNGTTGDMVDFQSTGDVGNSASITEMGNLVPEPSYVEAEEARLWSVATMNCLEFDAWTTVVEEMDKNAEVMTNNNNCYACYKITCVLTATM

SEQ ID NO: 56693 - protein, 110 aa, Zea mays
  Coding DNA Sequence Number=SeqID_14914
  Subcellular localization annotation: CTP_CleavageSite=42; ConfidenceScore=5.02e-01
MAALLRLAAESQVTSAPAAGVLLLIVVGIVVQLLIRPSSACRTRAVVPSRFLAAAHALDKNCAHPSCFFFPVHRNTAPFLPALLAELGFSLAGACPAEDYPVLPLWGSRD

SEQ ID NO: 56694 - protein, 177 aa, Zea mays
  Coding DNA Sequence Number=SeqID_14915
MSGLAPPLRCRCAAQRFLLSIPGRASGARRQPHSHQLSWFMEMDYSRGSMDNMGNEMLGKRGEVALHHHQALGAVEHQGVRPLHRGSTHVWTRLEEIGEHVSTKTIVQDGAKEHVYGASNNAARSTTNRKAAKRLFTKELGSGDIADEDRHQKEVEVRLLEEETTKRVEQAIRKKVE

SEQ ID NO: 56695 - protein, 143 aa, Zea mays
  Coding DNA Sequence Number=SeqID_14916
MKMIGLPSTLGSASTKSNPMPTHNMVGIENDKRRLDGRICNSTPEEVADKPNVEATSPAKLWTLVGSMVMHVAKVMWPRSVNPHLAKYEDVVEDEDEVSEIHPNLVIVEAEIKLGEVGVVELVEFVDHGDRERVLDRNGVRAQ

SEQ ID NO: 56696 - protein, 103 aa, Zea mays
  Coding DNA Sequence Number=SeqID_14917
  Homolog annotation: Hit_ID=Q2R224; Match level="QueryCoverage=41%, HitCoverage=5%, E-value=9e-09, Identity=67%"; Hit description=Root hair defective 3 GTP-binding protein containing protein, expressed
MSVHQISESKASMHQLTNIFCNIKVEATALLSYEAKEELFEEQMLFLLYVVYVMVAFVRCEEIANEKLKHFFSDKGCLELDAAVKSGLPPAFGMRLSAILDSI

SEQ ID NO: 56697 - protein, 950 aa, Zea mays
  Coding DNA Sequence Number=SeqID_14918
  Gene Ontology: Mol. function=ubiquitin-protein ligase activity; Cellular component=ubiquitin ligase complex; Biological process =protein ubiquitination
  Homolog annotation: Hit_ID=Q6Z335; Match level="QueryCoverage=99%, HitCoverage=97%, E-value=0.0, Identity=69%"; Hit description=MAP kinase-like
  Pfam annotation: Domain name=Arm; Domain location=259-299; Score =12.6; E_value=0.33; Accession=PF00514.13; Description=Armadillobeta -catenin-like repeat
  Pfam annotation: Domain name=Arm; Domain location=300-340; Score=8.6; E_value=1; Accession=PF00514.13; Description=Armadillobeta-catenin -like repeat
  Pfam annotation: Domain name=Arm; Domain location=385-429; Score =10.0; E_value=0.69; Accession=PF00514.13; Description=Armadillobeta -catenin-like repeat
  Pfam annotation: Domain name=Arm; Domain location=430-469; Score=2.2; E_value=6.6; Accession=PF00514.13; Description=Armadillobeta-catenin -like repeat
  Pfam annotation: Domain name=Arm; Domain location=470-515; Score=7.0; E_value=1.6; Accession=PF00514.13; Description=Armadillobeta-catenin -like repeat
  Pfam annotation: Domain name=Arm; Domain location=713-755; Score =15.7; E_value=0.13; Accession=PF00514.13; Description=Armadillobeta -catenin-like repeat
  Pfam annotation: Domain name=Arm; Domain location=807-847; Score =26.1; E_value=0.00013; Accession=PF00514.13; Description =Armadillobeta-catenin-like repeat
  Pfam annotation: Domain name=HEAT; Domain location=264-301; Score =0.3; E_value=39; Accession=PF02985.12; Description=HEAT repeat
  Pfam annotation: Domain name=HEAT; Domain location=439-471; Score =8.8; E_value=3.7; Accession=PF02985.12; Description=HEAT repeat
  Pfam annotation: Domain name=HEAT; Domain location=817-849; Score =11.7; E_value=1.6; Accession=PF02985.12; Description=HEAT repeat
  Pfam annotation: Domain name=U-box; Domain location=151-227; Score =43.6; E_value=6.8e-10; Accession=PF04564.6; Description=U-box domain
  Pfam module annotation: Pfam domain module=Arm::Arm::Arm::Arm::Arm::Ar m::Arm::HEAT::HEAT::HEAT::U-box; Domain location=259-299::300 -340::385-429::430-469::470-515::713-755::807-847::264-301::439
MERQTARRTQTNVTQMMESIFASVSLAKDLSARCKSRALQVTDDEIQSTAQDLENVLQNIYDDLCRIPASAFGSSAYMDVPIKSQPMRDCCKADIPINVMGNRPRTRSLRDNDTPRLVDFLKGMYHESHEFSGQMFNTLLEVTEYIEPLYDAFICALTNEIMTDPVMIESGVTCDRRAIEEYIERFADSSEPVYCPVTKMTMQSKTMVSNASLKCVIEEWTMRNEIMRVRIARTALSLSTTDTMVLEAIHELKLLAKLRVKNRELMHKIGVTKFLARLLDNHNDQIQFEALKLLCLLAQDEEGKDIIGKTKAIARTIKLLSSNSTDERHAAISFLLELSESQLLLDNIGSTPGSILILTTMKLNSSDDPIAAARAGAVLKNLEKCPKNIKYMAESGYLEPLQSHLVEGYKTGSEEIQMEMVGYLCELVQEQELTIDINRSTSEILVKMVRGCNPMVRKAALNVLAQLSLHRPNNKMLVDTGAVPVMIEELFIRKVDDEPVNSMANAATVLANIVESGIDPDTTVVNKEGHVLTSKYSIYNFVHMLKCFMPDDLNLSVLRILLALTALAKPLDTVVSVIRENYRGHSIIELMGSPTEVLSLAATRLLITLSPHIGHTIVERLCKTQGQPHKLVKSISHAGRITERQATLATLLAKLPYRNTSLNIALVKDGAVPAMLRAIKEVENGAGRSSRQAVPYMEGLVGTLVRLTATLFSPEVLKAAMDHNLASVLTELLDGAAGSDEVQRLAAVGLENLSYLSIKLSRPPPDELQFKKKNTLLKLLKDSKAHSNKKTSLHQVCVCPVHRGVCSPAATFCLLEAGALEGLLGCLENDNIRVVEAALRALCTLLDERVDVEKSVAALAELDVARRVLAALRQHRQNVLWQKCFCVVEKLLDHGDDRCVREVTGDRMLPTALVSAFHRGDESTKQTAESILRRLHKMPDYSATYVSMEF

SEQ ID NO: 56698 - protein, 532 aa, Zea mays
  Coding DNA Sequence Number=SeqID_14919
  Gene Ontology: Mol. function=amino acid-polyamine transporter activity; Cellular component=integral to membrane; Biological process=amino acid transport
  Homolog annotation: Hit_ID=Q6Z336; Match level="QueryCoverage=83%, HitCoverage=99%, E-value=1e-168, Identity=70%"; Hit description =Putative amino acid transporter
  Pfam annotation: Domain name=Aa_trans; Domain location=122-528; Score= 135.6; E_value=1.3e-37; Accession=PF01490.8; Description =Transmembrane amino acid transporter protein
  Pfam annotation: Domain name=Trp_Tyr_perm; Domain location=122-525; Score=-198.9; E_value=2e-05; Accession=PF03222.4; Description =Tryptophantyrosine permease family
  Pfam module annotation: Pfam domain module=Aa_trans::Trp_Tyr_perm; Domain location=122-528::122-525
  Subcellular localization annotation: CTP_CleavageSite=16; ConfidenceScore=5.08e-01
MGRHSNYKTSCLLRSKASPVSTLPLLPRRAPSKVITTEELSNPYMREDLHISVQRGTGGNWKLEFRPRRPHRPCNEPGFGGALARMVMPISSGGDHHGAEPLLPEKQRGGGAGADDAGDDFHGASFSGAVFNLSTTIVGAGIMALPATMKVLGLVPGLALIALSALLTDASIELLVRFNRAAGVRTYGKTMGDAFGVLGRGLLQLCVVVNNVGILVVYMIIIGDVLSGTSSSGVHHHGVLEGWFGENRWNGRFAILAIATLGVFTPLACVKRVDSLRYTSALSVALAVVFVVITAGIAMFKLARGQILMPRLFADVHDWPSIWRLFTAAPVLVTAYICHYNVLPIYKELKDSSQITPIVRTSLLLCSVVYVTTSFFGFLLFGDSTLDDVLANFDTDLGIPYSSIFNDAVRVSYVLHLMLVFPIVFQALRLNMDGLLFPSARPLPCDNRRFGGLTAALLVVIFLAANFIPNIWDAFQFTGATASVCVAYIFPAAITLRDPHGIAKKRDKVLAVFMIVLAVVANTVAVYSDACS

SEQ ID NO: 56699 - protein, 280 aa, Zea mays
  Coding DNA Sequence Number=SeqID_14920
  Subcellular localization annotation: CTP_CleavageSite=87; ConfidenceScore=5.11e-01
MARAIPQLSPLKELNIFFPAAKSISGSISYTSHQAYACQSPCSTIAATHRPPQPVVQLCARRCQPAASSMPGASQPANPAQSRTTLSSSTGAQPKVQIDEKQNDRTTVHQGQRARLWPSTAYAIPQLSPLKKLNIFFPAAKPISGSISYASHQAYTRQSPCSTVAATHRPPQPVVQLCVPRRQLAASSMLGAPQPANPAQSRTAHNSCHRPPELVRWTAPRCDFASRSCPELDRASTVATSLAWPPRASASGVWPMSNQLKASSNETVRPCVCMCTTQCT

SEQ ID NO: 56700 - protein, 300 aa, Zea mays
  Coding DNA Sequence Number=SeqID_14921
  Homolog annotation: Hit_ID=Q67YP2; Match level="QueryCoverage=86%, HitCoverage=87%, E-value=3e-38, Identity=36%"; Hit description=MRNA, complete cds, clone: RAFL24-17-M19
  Pfam annotation: Domain name=BSD; Domain location=134-201; Score =28.3; E_value=2.6e-05; Accession=PF03909.7; Description=BSD domain
MDLWERARAFAGEAAKRSQELSAEAAKRSSALVSETAKKSKEIFSETASKSREIAAEATKQADLLAGQIKHLASDLPVPSIPPIPAIPPIPAAASSVPDAAELECYGITDDLREFVKGMTINTFRDFPLQVCAPVDRLVNGDESKLSNEDEALMDILANGKCVREISKFRYELCPRYMKERKFWRVYFLLVNSYIAPFEKKYFEELKVKAEEEKKDSQKEASQASTTAEPKDTKVPSKTSSTNPEHDLDVFLLGDLGSDDEASVGGDDGLDDDFDKIDATSGLESDDDDKKAATGKAEGV

SEQ ID NO: 56701 - protein, 417 aa, Zea mays
  Coding DNA Sequence Number=SeqID_14922
  Gene Ontology: Mol. function=GPI anchor binding; Cellular component =membrane; Biological process=cell adhesion
  Homolog annotation: Hit_ID=Q6Z347; Match level="QueryCoverage=37%, HitCoverage=57%, E-value=1e-51, Identity=72%"; Hit description =Putative fasciclin-like arabinogalactan-protein
  Pfam annotation: Domain name=Fasciclin; Domain location=211-347; Score=48.9; E_value=1.7e-11; Accession=PF02469.12; Description =Fasciclin domain
MPVTAGARTTLLLFATAVVLACTSAPPACHAAHNITAILSGHRDLAEFGRELAATGLADDIDDRNTITVLAVDDAHMAPLKARGLPRETLRHVLSLHVLVDYYDDAKLHRLPGGSADVSTLFQASGDAPGSAGMVRVAERRGGRVAFAPEDDAGSAAAAVFYVGPVHEAPYNISVLWVSGVISSPAAEAPAAAADRPPSRRNVSDVMSENGCGRFAGLVAATGDAAATFERQADGGGGLTLFCPADRAVEAFQPTLNSLSADARLAVVLYHGAPGHHSMQALRAGDQDLRTAASLDGGRSHLALAVRNVRGRVTLLASATRDVARVTRTLADEEAVAVYMIDAVLVPGNLTAQGTAGGTEHGELTSGSGGEEDGGGGGVRQSSGSRALAPAPCWLPRGWFAAWALLLALLAAFAASG

SEQ ID NO: 56702 - protein, 45 aa, Zea mays
  Coding DNA Sequence Number=SeqID_14923
MACIGAAAGGSARVQPTSIGGDFGGPEFTKYMGRGFDLHFLEEDC

SEQ ID NO: 56703 - protein, 71 aa, Zea mays
  Coding DNA Sequence Number=SeqID_14924
  Gene Ontology: Cellular component=mitochondrion
  Homolog annotation: Hit_ID=Q2QMA7; Match level="QueryCoverage=87%, HitCoverage=36%, E-value=2e-23, Identity=85%"; Hit description =Expressed protein
MAGFRSLAPKTRNLVVAGGLSAFVLGVYYYTMRAVGGTDELQVAIDKFEEMKKKDAARNSSTGGSKGLNNG

SEQ ID NO: 56704 - protein, 364 aa, Zea mays
  Coding DNA Sequence Number=SeqID_14925
  Gene Ontology: Mol. function=pectinesterase activity; Cellular component=cell wall; Biological process=cell wall modification
  Homolog annotation: Hit_ID=Q53WM8; Match level="QueryCoverage=77%, HitCoverage=71%, E-value=1e-154, Identity=90%"; Hit description =Putative pectin methylesterase
  Pfam annotation: Domain name=Pectinesterase; Domain location=82-359; Score=253.1; E_value=5.7e-73; Accession=PF01095.10; Description =Pectinesterase
MALPSRARLLLLLCFVAAAALLVAPGEVSATAAAADAGGHGKRRGHSTHTRRLRPGKGAAAAKPYPANAARVEAIERQFARAAVDSLPLINLARVVIRVNAGTYTEKVSISPMRAFVTVEGAGADKTVVQWGDTADTAGAWGRPMGTFGSATFAVNSMFFVAKNITFKNTAPVPRPGALGKQGVALRISADSAAFVGCNFLGAQDTLYDHLGRHYYRDCYIEGSVDFIFGNALSLYEGCHVHAIARNYGALTAQSRQSLLEDTGFSFVSCRVTGSGALYLGRAWGTFSRVVFAYTYMDNIIIPRGWYNWGDPTREMTVFYGQYKCTGPGANYAGRVQWSRELTDDEAKPFISLDFIDGFEWLRL

SEQ ID NO: 56705 - protein, 169 aa, Zea mays
  Coding DNA Sequence Number=SeqID_14926
  Homolog annotation: Hit_ID=Q5JKU0; Match level="QueryCoverage=76%, HitCoverage=34%, E-value=5e-16, Identity=43%"; Hit description =Calmodulin-binding protein-like
  Pfam annotation: Domain name=IQ; Domain location=112-132; Score=20.2; E_value=0.0073; Accession=PF00612.17; Description=IQ calmodulin -binding motif
  Pfam annotation: Domain name=IQ; Domain location=90-110; Score=29.7; E_value=1e-05; Accession=PF00612.17; Description=IQ calmodulin -binding motif
  Pfam module annotation: Pfam domain module=IQ::IQ; Domain location =112-132::90-110
MGRAMRWLKKVLTGSSKKEASDGVRKARDAACAGAGGGGDHGLGPPASEKRRWSFAKPRSSVSGSARRPSVAAGELSQVRPCSCGLEREVEAAAVIQKAFRGYLARKALRALKSLVKLQALVRGYLVRKQTAMTLRRLQALMRLQANTAASRRSTEQVRTLMSTKPITF

SEQ ID NO: 56706 - protein, 965 aa, Zea mays
  Coding DNA Sequence Number=SeqID_14927
  Gene Ontology: Mol. function=microtubule motor activity; Cellular component=microtubule associated complex; Biological process =microtubule-based movement
  Homolog annotation: Hit_ID=Q5JKW1; Match level="QueryCoverage=76%, HitCoverage=96%, E-value=1e-159, Identity=60%"; Hit description =Putative kinesin heavy chain
  Pfam annotation: Domain name=CH; Domain location=132-235; Score=28.0; E_value=3.3e-05; Accession=PF00307.21; Description=Calponin homology (CH) domain
  Pfam annotation: Domain name=Kinesin; Domain location=487-697; Score=- 102.7; E_value=8.2e-08; Accession=PF00225.13; Description=Kinesin motor domain
  Pfam module annotation: Pfam domain module=CH::Kinesin; Domain location=132-235::487-697
MTNSASPDPRGSGSALASADGLRLARPRGSDSTSASEDRLDLDLGGASISPNLGHHGPTTSTGGAIITLPQADSGYGGTRPASHPARSARQVMMGAPHALVTTAALSPPLRKQEDVSKDSTAPTAVLPPGSSAPPTLIEWMNALLPEFSLPPDSSDEELRELLSDGVVLCRVANTLIPGGSWDGYAPSDQRLGNLNKFLSVIADMGLPGFSVKDLDEGSMSPVVECLLVLRDSVDPRLGDDIPPDVTRTPLRKQWGVPEMDKPQVHGAALGKRSPAEDKRNGVADPKAHQKTSVFSGQKFCDVFQLKHGSYSGPAAAKISEMMHSNSLDNAPTQSLISVVNGILDESIERKKGEIPHQNVIMKRREQKYCSKIKVLEMLVNGTNEENQMAINRLQIVKNEKSKIEERRKLSEQDVHRLMREKEHSENIIANLKKDIEAMNRLHEQQLEQTERKAKEMEEQLTTKVKEVEYLLLQSKKKVEEVETASRLKSQLWDKKEDNFQSHMDNQQLIIKDIRILSRSCENDMYALQMQWRNEISNLGSGLKCLVDAAENYHKVLAENQKLFNEVQELKGNIRVYCRVRPFLSGQDKKSTTIDYMGENDASLHSVKSTSDVLDLMEIGQANRAVGSTALNERSSRSHSGECYCTESPGLGFDAASPQCGGGQAKTLMFVQINPDVESYSETISTLKFAERVSGVELGAARSNKEGKDIKELLEQVASLKDTISRKDMEIEQLQVIKDKAKSPNLLLDRNGPGLTKITVNQPSQLLSGERMLKSSDRVLSDPPDNRDSNHNLTDTAPVSLDEAEYDGNASDDGLSGEAENYNSAAEMTAERLHGIPSRISRFTLTKNGQPSMSRSKSKDAKTPKGQRRLRHSDCSATRQSESDRQSGLAKGATANSAPPDPRARTRAKTRKTANSAPPDPRARTRAKTRKTANSAPPDPRARTRAKTWKTTKLRSARPQGSDSG

SEQ ID NO: 56707 - protein, 105 aa, Zea mays
  Coding DNA Sequence Number=SeqID_14928
MSVVRLGADLNRLSSVVHLTRRVSTVSFCLGDGQRQNPAKALGYYPERKELVLDVLGLGATGACGELPWALHGWLATSCMMRLSKAQPITGLLAGLHKVTRGAEP

SEQ ID NO: 56708 - protein, 128 aa, Zea mays
  Coding DNA Sequence Number=SeqID_14929
  Subcellular localization annotation: CTP_CleavageSite=62; ConfidenceScore=5.44e-01
MGAPQAFVLSFLSAAKVRATVEALCAGKHGISPNGPTTSARASVKSGVRYGGGRRALMCGTRCSVKWRVQVVGTAARRQSQGMGRARDIPPGGPESGLSGGPLISHPTGLTGPHLGRANFNEEDDTQS

SEQ ID NO: 56709 - protein, 220 aa, Zea mays
  Coding DNA Sequence Number=SeqID_14930
  Homolog annotation: Hit_ID=Q6QP51; Match level="QueryCoverage=38%, HitCoverage=35%, E-value=6e-17, Identity=63%"; Hit description =Putative growth-regulating factor 1
MQVVCNRTTGTHPFDFDASSMEAQAHTSCNRRAGYYVRETAPPLAPMSRLLDCGTSAATRGNPAHGPIVSIEHIGHGSVSRGRRRDGRYGQKWAGRTGKGDISKRDPSPRRKRTPSPPTDQGFEGWPPGRVRQPPQSTRASGSLLIRGSKAGPSEGFDSRLRALGLRAPLLIRGSKAGPSEGFDSRPRARRVRDDSGYVRYMDESRTTLPRYPRTFPRPT

SEQ ID NO: 56710 - protein, 146 aa, Zea mays
  Coding DNA Sequence Number=SeqID_14931
MGTDVVEACVAAIEDDTLASPVANAGTAGLGATSFPVLPLYLPSSVLLWCDGALPSAAVGHYPLDDVVAASVAAKFVVAIAWEHERATSLALEQECATTDVLAHQLAEADQKLEGVVVSDSFPEFNDIEVFYVSRGTLTLIKRMTL

SEQ ID NO: 56711 - protein, 81 aa, Zea mays
  Coding DNA Sequence Number=SeqID_14932
MTLGTSTAATQESPARATTAMGTTGRHSELGLKATLVRHWGAWVRVCCRGGVLGAAAGRLHGLAEASARRLDPWELRASAD

SEQ ID NO: 56712 - protein, 110 aa, Zea mays
  Coding DNA Sequence Number=SeqID_14933
MERLISFGAVAELISFKWSLNCAVAELAVSGEGRRDAASTSEFRSTVNGSSGERLWCRQHNSYRERLRSAVNGEDQATEEGVRWRCGWGARSGLGTDGDWLYGGTVEFCR

SEQ ID NO: 56713 - protein, 98 aa, Zea mays
  Coding DNA Sequence Number=SeqID_14934
MAPRIPESAKFSLESPGAPDTAGGTPDSPVVHRTLSGGTPDSPVLRYLFKYNYCLFLNTKISTCPLASATVGSERSRPSAVITVAGRGYFVKEALRNP

SEQ ID NO: 56714 - protein, 145 aa, Zea mays
  Coding DNA Sequence Number=SeqID_14935
  Gene Ontology: Mol. function=microtubule binding; Cellular component =nuclear outer membrane; Biological process=mitotic spindle assembly
  Homolog annotation: Hit_ID=Q8RYM1; Match level="QueryCoverage=73%, HitCoverage=30%, E-value=5e-47, Identity=83%"; Hit description=MRNA -associated protein mrnp41-like
  Pfam annotation: Domain name=WD40; Domain location=17-55; Score=27.5; E_value=4.8e-05; Accession=PF00400.22; Description=WD domain, G-beta repeat
  Pfam annotation: Domain name=WD40; Domain location=61-99; Score=10.8; E_value=2; Accession=PF00400.22; Description=WD domain, G-beta repeat
  Pfam module annotation: Pfam domain module=WD40::WD40; Domain location=17-55::61-99
  Subcellular localization annotation: CTP_CleavageSite=52; ConfidenceScore=5.49e-01
MASFNPAGASAANHNPNKSFEVTPAPGDSVSSLSFSPKANHLVATSWDNQVRCWEVMAGGACQAKASISHDQPVLCSAWKDDGLTVFSGACDKQGKKWPLLSGAQPIAAQHILLEWMSMHTPKALTRNPILSVVAFLASLPSLLH

SEQ ID NO: 56715 - protein, 150 aa, Zea mays
  Coding DNA Sequence Number=SeqID_14936
  Gene Ontology: Mol. function=RNA binding; Cellular component=nucleus; Biological process=rRNA processing
  Homolog annotation: Hit_ID=Q6AT27; Match level="QueryCoverage=76%, HitCoverage=31%, E-value=7e-14, Identity=41%"; Hit description =Putative fibrillarin protein
MAKKRTNVIPIIEDVRHPARYQMLVGMVDVIFSDVAQPNQTHENSEDIVFLQPLDNGIYILVKLVLTQYLIPRLQAQDSKRDYLDRSSGSGVGLYGCTECEADVVALIEEEVPRVGEAARRFEWIGGEVLLFLPLQSQQILNGNTSPCSR

SEQ ID NO: 56716 - protein, 155 aa, Zea mays
  Coding DNA Sequence Number=SeqID_14937
  Homolog annotation: Hit_ID=Q2QNQ6; Match level="QueryCoverage=92%, HitCoverage=69%, E-value=4e-63, Identity=79%"; Hit description =Expressed protein
MGWATRFLAAVCFFAAGVLFVPEALLGSPSGAGAVTAAKLAHVLSFATSWGAALWATFIGGIIMFKNLPRHMFGNLQSKMFPAYFTLISACAAISVATFSHLHPWKTASTVERYQLGFLLSALGCNLSNLLVFTPMTIEMLASHYHNVSHNKEIE

SEQ ID NO: 56717 - protein, 112 aa, Zea mays
  Coding DNA Sequence Number=SeqID_14938
MNVCELTLVVLTSPKSRTEPECDTKAPRGYPRDHLLRGGCRGNSAPHSNPTQEEILLGNAKGSYSESMSHAPASSATGHGPAQVWAQKSPEGRRLVNHDLPNPANSVVHLTY

SEQ ID NO: 56718 - protein, 69 aa, Zea mays
  Coding DNA Sequence Number=SeqID_14939
MRIHKVKSVTMRHMEEGIKDGSKEGSEDNFEEQNDGLNIDNDVVEDADFVLGMMSPHEKMMRELIKKFK

SEQ ID NO: 56719 - protein, 34 aa, Zea mays
  Coding DNA Sequence Number=SeqID_14940
MPLRARGSLDCSFPKPVLLSLLFYYLIELVSTYT

SEQ ID NO: 56720 - protein, 139 aa, Zea mays
  Coding DNA Sequence Number=SeqID_14941
MALALTTRVNTTHVPPPQQAPFYPVVVEEDPEELHHLVGGNGVILDDSYEEIMATPTSSPAPHVVATGASSSVTQAPAPRGDDPDDSGNDDDEEDNQDDNNGDANNNNEPDQEDDFVGMWPIAEHYTSMFEIGHFPNIL

SEQ ID NO: 56721 - protein, 64 aa, Zea mays
  Coding DNA Sequence Number=SeqID_14942
MTCSVAILEEFYPEVLQVVLYYLLVLKSNDDDAAEANDAHDTHHEDRYEIEEQQADIDNDANEE

SEQ ID NO: 56722 - protein, 214 aa, Zea mays
  Coding DNA Sequence Number=SeqID_14943
  Gene Ontology: Mol. function=sequence-specific DNA binding; Cellular component=nucleus; Biological process=regulation of transcription
  Homolog annotation: Hit_ID=Q10M65; Match level="QueryCoverage=99%, HitCoverage=100%, E-value=2e-80, Identity=68%"; Hit description=WRKY DNA binding domain containing protein, expressed
  Pfam annotation: Domain name=WRKY; Domain location=29-92; Score=78.2; E_value=2.6e-20; Accession=PF03106.6; Description=WRKY DNA -binding domain
MSPAPSSHHSQINSRKEKRMRKVDTFAPHNDGHQWRKYGEKKINNTNFPRYYYRCTYKDNMNCPATKQVQQKDHSDPPLYAVTYYNDHSCNSAFLPLSPSEFQLQTSSGKAVSICFDSSSGTAAAAAATTNASGGSPSSSAAAAAARRGTPPEVSNPPVLRRSETYPWGAGAVEQKPASCSTEYHDAFSAGAAAVPEEVVDAGRFGSIRFFHFL

SEQ ID NO: 56723 - protein, 81 aa, Zea mays
  Coding DNA Sequence Number=SeqID_14944
MVDSAKGTVRNSAATESEAQKLEGTGLSGVAQDCPVQLEDKGLQRSTAQNPNGCADVARTGQCTMAVRVNLSWLPYVIRYP

SEQ ID NO: 56724 - protein, 268 aa, Zea mays
  Coding DNA Sequence Number=SeqID_14945
  Homolog annotation: Hit_ID=Q6QP51; Match level="QueryCoverage=50%, HitCoverage=76%, E-value=3e-38, Identity=56%"; Hit description =Putative growth-regulating factor 1
MAAPRIARPVALTPRQGERYLWQAKRASFHLRHDDRVKKGTGKGDISKGILLSEGSGPRALLLIRGSKAGPSEGGSKAGPSEGFDSRPRASRVRDDFGYVCYMAEARATLLRPAEASRKALRPQRSQTTPPRPRGLHPAALGATGSSASPDLRPRPRKEVSASPDPRAQPRPREESRPHPTPASASGEVSASPELGLGPTAPQGIHHYPTLASSGYEGTRLASHLACPGLKHFSDGHVIAYTGLKHFSDSHVGMYTGLRHSSARHVSA

SEQ ID NO: 56725 - protein, 299 aa, Zea mays
  Coding DNA Sequence Number=SeqID_14946
  Gene Ontology: Mol. function=protein phosphatase type 2C activity; Cellular component=protein serine/threonine phosphatase complex; Biological process=protein amino acid dephosphorylation
  Homolog annotation: Hit_ID=O49449; Match level="QueryCoverage=83%, HitCoverage=98%, E-value=6e-87, Identity=60%"; Hit description =Protein phosphatase 2C-like protein
  Pfam annotation: Domain name=PP2C; Domain location=47-290; Score =224.3; E_value=2.8e-64; Accession=PF00481.12; Description=Protein phosphatase 2C
MARVGLVSLVLFKFGEAYGDCYKSAACLSSSSSDTGKGQSKFSSNKVTHGFHLVEGRSGHDMEDYHVAEYRYENDHELGLFAIYDGHLGDSVASYLKANLFDNILKEPLFWSDPQEAIKNAYSSTNKYILENTRQLGPGGSTAVTAIVVDGTDMWIANIGDSRAVLSETGTASQVTVDHEPHTTNERKRIEEKGGFVSTFPGDVPRVNGQLAVARAFGDQSLKAHLSSEPDVKHIKINSSTEFVILASDGLWKVMKNQEAVDLVKSTKDPQTAAKRLTSEALGRMSKDDISCIVIRFRC

SEQ ID NO: 56726 - protein, 399 aa, Zea mays
  Coding DNA Sequence Number=SeqID_14947
  Homolog annotation: Hit_ID=Q6IEM4; Match level="QueryCoverage=47%, HitCoverage=35%, E-value=3e-41, Identity=49%"; Hit description=WRKY transcription factor 57
  Pfam annotation: Domain name=AP2; Domain location=230-294; Score =121.1; E_value=3.1e-33; Accession=PF00847.10; Description=AP2 domain
  Pfam annotation: Domain name=FLYWCH; Domain location=110-177; Score =4.0; E_value=0.026; Accession=PF04500.7; Description=FLYWCH zinc finger domain
  Pfam annotation: Domain name=WRKY; Domain location=121-179; Score =134.7; E_value=2.6e-37; Accession=PF03106.6; Description=WRKY DNA -binding domain
  Pfam module annotation: Pfam domain module=AP2::FLYWCH::WRKY; Domain location=230-294::110-177::121-179
  Subcellular localization annotation: CTP_CleavageSite=24; ConfidenceScore=5.37e-01
MNCPLFSGSGKMQPHEKVAVLKPVASRPFSSFWPFPKFLHDFNATCSPTITFPQETELIRPKATRLASLPGDLPTQIAATTDAGSDTMSEEVEGYAKHHTYRDHATACQAARRNGERSRLSLDGYSWRKYGQKKVKGSEFPRSYYKCTHPSCPVKRKVETTPDGQVAEIVYSGEHNHLKPGKPCPPRKPLLSTSTDAVIGKASTPVSTGSSFHMAPKRSSEERAAAEQEQPRLRGVRKRPWGRYAAEIRDPVRKARVWLGTFDTPEQAARAYDAAARRLRGPRATTNYPGDVVREAPCTAPALAASASGSTESSSSSSSRDDGHPPPPLPTAPSSLGLGLGLFPATVATQPCLFLDPAPVEREEGERERSCCSRSPPSVLAGLGFDFDLNLPPPAEMVM

SEQ ID NO: 56727 - protein, 401 aa, Zea mays
  Coding DNA Sequence Number=SeqID_14948
MNPTPLSLELGVEKPDRRVGRSKGKPLKSISCLGFRTARPPVLENAMAREVRQLAAEEKKRKKDEAKKQAHKRMVARDSLEKSRRAQAREGLPLEASPSTEEEDDDDEGMEVRVSFNPEVEPSSTLALVGPSGGVVPFAQGPAASMSGARALAEPAPVSALVEEADVVEGEVTPFLRETAWRLLARRLGPLSGCSLRGTRWRGPSLPLTRGDHCPAYIGDRAARVRNPEPKAFCNVCLREPSQQDVEVAVPAPGAPVGPDTAAGEVAPARPVSPAEATVVSSEDEAEAEEVSSSVSPGRIVGRNLLGDETIIEPPIIWASMCPCSLRGRPLNMRRVALVWMSTEGNPYFVLDDIEEREIWAEFRALGQAKESLQAVTMERDSLSKSLEDEQSEGWALNTRI

SEQ ID NO: 56728 - protein, 165 aa, Zea mays
  Coding DNA Sequence Number=SeqID_14949
MTNGVVTVTGCCADGEAPAGNVDSEHELRRGTPRMANGVRTARVTAWRGFWRGEIGVGLLEHGVAASGASTGGRLRLAQLRGSATVGPPGVSRSARVSFKGAAARLACRGSVSRAGRMASRGTGARWQAVGRLGVGGWEIEQGGRGLGLGAAAFMGLMGHFGSVD

SEQ ID NO: 56729 - protein, 143 aa, Zea mays
  Coding DNA Sequence Number=SeqID_14950
MGLSTVARAYWRSIERAGLSGSDESGISSDEANSFDSSEEWSGGDGDDEGDDSGDASGEGDGGDDGGKGDSEGDGGSGSGDDGDGGDSCTKGDGGDGGNKGDGGDGGSGNNKPARPAGKITMAPKRKRQSTAAAIIPPIDPNS

SEQ ID NO: 56730 - protein, 159 aa, Zea mays
  Coding DNA Sequence Number=SeqID_14951
MQGSLEQNGCSETNKRIKLIRPPQFQATLEASRLQFGFYRPAPEDTVPMPAPVSDIRAEDEAIRQFETQGVTTDTSFDDDEDLGIPPPPPVPPRSHDHEAGSSSVAPATSPAIDPTLATILQSLTQQQAHLAEEQARQASIQQQMTEWMLLMFQTIQDR

SEQ ID NO: 56731 - protein, 331 aa, Zea mays
  Coding DNA Sequence Number=SeqID_14952
  Pfam annotation: Domain name=AT_hook; Domain location=233-245; Score =7.7; E_value=1.1; Accession=PF02178.9; Description=AT hook motif
  Pfam annotation: Domain name=AT_hook; Domain location=270-282; Score =13.9; E_value=0.09; Accession=PF02178.9; Description=AT hook motif
  Pfam annotation: Domain name=AT_hook; Domain location=33-45; Score =12.1; E_value=0.19; Accession=PF02178.9; Description=AT hook motif
  Pfam module annotation: Pfam domain module=AT_hook::AT_hook::AT_hook; Domain location=233-245::270-282::33-45
MADEAEWNEAEAGIAAPGAGVAPPAPGGGEETKRKRGRPKGSLDTYKRRRRRRRTGDLVSAVPAASLGDMGHSCGCIPAPPLPPPCTVYTVRDGGVAITPQSMEDEAEGVEAESGNAGAASAARDGEETKRKRGSPEGSLNERNKDRTPKPKAKGRRRRRTDDQTLSVSAVSLGDLGLGVAAGTRSIRERRPAPNAFFDVGSDSDTEHDDDDDEEQTTIDQANHESAKTGDSVKKGGRPRKMEAGQLHTRTQISNGKSNGHTNGNPAGKKRGRGRPKKLTVEQAITRCQFSNGETNKNQILNLTTSDKIFLYGVINCSLYQTPVRHLEWEL

SEQ ID NO: 56732 - protein, 888 aa, Zea mays
  Coding DNA Sequence Number=SeqID_14953
  Gene Ontology: Mol. function=metal ion binding
  Homolog annotation: Hit_ID=Q6K7P0; Match level="QueryCoverage=84%, HitCoverage=86%, E-value=0.0, Identity=53%"; Hit description =Putative DNA-binding protein PD3, chloroplast
  Pfam annotation: Domain name=JmjC; Domain location=693-798; Score =10.0; E_value=8.5e-05; Accession=PF02373.13; Description=JmjC domain
MDISKTSHSVLEAEKRSGMPSQADARNILSTRCSALMLLVYIEPRHQSYSLPYLLLQVIDAINVQRIQLFNKHRCMHLTWKLAFSIQHLMYNEFHQVSNFFLLQSGAEAARSKQSRNRRISQNAKKRKRDEGKESMTKKLNKRSKMLTGENALMCHQCQRKDKPRVVRCQSCKKKRFCLPCIEQWYPNLPEDEFAVKCPYCRKNCNCKACLRMRGVEEPPKKEISKENEIRYAFHIVTMLLPWMRELRQEQLEEKEVEANIQGMELRKGEIPGGEEVEYVPPEPKGRSYSFGKIHLLKDADRSKNSSNGESYNGMPAVGNSNNGLLLWKAKSNGSIPCPPKEVGGCGSTLLDLKCLFPEKMFAELEYRADKVLRSGTLAKAMVSRSDRCPCFNQSGKIRTESKSVREAASRKGSSDNFLYCPVAIGIQDDDIVHFQMHWAKGEPVVVSDVLQLTSGLSWEPMVEINIHRFFSGYTTGRTHARTHWPQMLKLKDWPPSSSFDKRLPRHGAEFISALPFREYTDPRYGPLNLAAKLPAGVLKPDLGPKSYIAYGFYKELGRGDSVTKLHCDMSDAVNILTHTAEVTCQTDIGLIEKIQKDMREQDLQELYGGLNSRSELKLSPAPTECRDESVDEGLKTSYSREGNCVNRDNYNGLDINALPPDDDGDIAKDKESSPGSEWQSELGQSSDHNNGVNTTDEMYNGAHYISHNQKSTGRKVGIKPQEEKSEKADCSGTCAYLKGSSEDNPEMPIVESSEEQSTGGIEPWTFEQKLGEAVFIPAGCPHQVRNLKSCIKVALDFVSPENVGECVKLTEEFRRLPSFHKAKEDKLEIKKMAVHALNEAVNFLDPRSSEELKIGVGENICEDESVDEKELPPRRGVEVSGVDEKPK

SEQ ID NO: 56733 - protein, 44 aa, Zea mays
  Coding DNA Sequence Number=SeqID_14954
MNGEGSRPACVRSSELFWLRTVKESSKSKTKGRALQLENYWSWE

SEQ ID NO: 56734 - protein, 1068 aa, Zea mays
  Coding DNA Sequence Number=SeqID_14955
  Gene Ontology: Mol. function=RNA-directed DNA polymerase activity; Cellular component=mitochondrion; Biological process=RNA-dependent DNA replication
  Homolog annotation: Hit_ID=UPI00005A975E; Match level="QueryCoverage =95%, HitCoverage=59%, E-value=0.0, Identity=88%"; Hit description =PREDICTED: similar to Retrovirus-related Pol polyprotein from transposon 297
  Pfam annotation: Domain name=RVT_1; Domain location=56-225; Score =130.9; E_value=3.6e-36; Accession=PF00078.17; Description=Reverse transcriptase (RNA-dependent
  Pfam annotation: Domain name=RnaseH; Domain location=455-582; Score =7.4; E_value=1.2e-05; Accession=PF00075.14; Description=RNase H
  Pfam annotation: Domain name=rve; Domain location=780-939; Score =119.2; E_value=1.1e-32; Accession=PF00665.16; Description=Integrase core domain
  Pfam module annotation: Pfam domain module=RVT_1::RnaseH::rve; Domain location=56-225::455-582::780-939
MPGIPRDVAEHSLDIRAGARPVRQPLCRFDEEKRRVIGEEIHKLMAAGFIKEVFHPEWLANPVLVRKKGGKWRMCVDYTGLNKACPKVPYPLPRIDQIIDSTAGCETLSFLDAYSGHHQIRMKESDQLATSFITPFGMYCYVTMPFGLRNAGATYQRCMNHVFGEHIGRTVEAYVDDIVVKTRKASDLLSDLEVTLRCLKAKGVKLNPEKCVFGVPQGMLLRFIVSERGIEANPEKIAAITSMGPIKDLKGVQRVMGCLAALSRFISRLGERGLPLYRLLRKTECFAWTPEAEEALGNLKALLTKAPILVPPADGEALLVYVAATTQVVSAAIVVERQEEGHALPVQRPVYFVSEVLSETKIRYPQVQKLLYAVILTRWKLRHYFESHPVTVVSSFPLGEIIQCREASGRIAKWAVEIMGETISFAPRKAIKSQVLADFVAEWVDTQLPTAPIQPELWTMFFDGSLMKTGAGAGLLFISPLGKHLRYVLRLHFPASNNVAEYEALVNGLRIAIELGVRRLDARGDSQLVIDQVMKNSHCRDPKMEAYCDEVRRLEDKLFGLELNHIARRYNETADELAKIASGRTTVPPDVFSRDLHQPSVKIDDAPEPEAPSAQPEAPSARPEAPSAQPEVPSAPEAEALNVEEEQSGATPDQDWHAPYLRYLRQGELPLDQAEARRVARRAKSFVLLGDEEELYHRSPSGILQRCISIAEGQELLQEIHSGACGHHAAPRALVGNAFRQGFYWPTAVADATRIVRTCEGCQFYAKQTHLPAQALQTIPITWPFAVWGLDLVGPLQKAPGGYTHLLVAIDKFSKWIEVRPLNSIRSEQAVAFFTNIIHRFGVPNSIITDNGTQFTGKKFLDFCEDHHIRVDWAAVAHPMSNGQVERANDMILQGLKPRIYNSLNKFGKRWMKELPSVVWSLRTTPSRATGLTPFFLVYGAEAILPTDLEYGSPRTRAYTDQSNQASREESLDQLEEARDKALLHSARYQQSLRRYHARGVRPRDLQVGDLVLRLRQDARGRHKLTPPWEGPFVIAKVLKPGTYKLANNQGEIYGNAWNIKQLRRFYP

SEQ ID NO: 56735 - protein, 249 aa, Zea mays
  Coding DNA Sequence Number=SeqID_14956
  Homolog annotation: Hit_ID=Q10S29; Match level="QueryCoverage=77%, HitCoverage=72%, E-value=2e-59, Identity=63%"; Hit description =Expressed protein
  Subcellular localization annotation: CTP_CleavageSite=44; ConfidenceScore=5.61e-01
MATATTLSFSGGGGGTTLLRGHVALTSGRCCTFPSSRWRPPRLSASRADDSSPAPFEMTVEDALKLLGVAEGASFDEILRAKNAVLASCKDDQDAVAQVEAAYDMLLMQSLSQRRAGKVANNRIRFADVKPVKSAGAGTVPQWMQATMKNAPITFETPSSSSLGIQSCVYGALMVFTYASGSSTSLPSAYSSPDVPGFILATGFGASLYFLAKKNMNLVLTVGEHVGFAGIEFQKPRTCFCAYHAIVCL

SEQ ID NO: 56736 - protein, 146 aa, Zea mays
  Coding DNA Sequence Number=SeqID_14957
MAAGLWCRARALVRVLRVLRLLPQARPPCSLRATLLFWVRAWVPAELGVYLYVALVFPQHAFLPARPWEPRRPPCLKSPRARLPFFAPCTSRDPLDQSQPNSLPVQPLLLARPSVRHFVYSRCPPSSLATHREVPAVSLRTCPKLS

SEQ ID NO: 56737 - protein, 80 aa, Zea mays
  Coding DNA Sequence Number=SeqID_14958
  Homolog annotation: Hit_ID=O24587; Match level="QueryCoverage=54%, HitCoverage=4%, E-value=6e-10, Identity=75%"; Hit description=Pol
MAQPPTQDEEHVPQDDGIDQGIAHEEEDNEEEDVPQGRRSFEGSRLGGGHAGRSQQLQEKSLELGATSKAKHCDNQVGVP

SEQ ID NO: 56738 - protein, 96 aa, Zea mays
  Coding DNA Sequence Number=SeqID_14959
  Homolog annotation: Hit_ID=Q8S5U9; Match level="QueryCoverage=97%, HitCoverage=5%, E-value=1e-32, Identity=80%"; Hit description =Putative glucan synthase
MLIIFPQHGSILESSHGGSYQKHDGTTTWDKEYQLFQPSGAIKFPLQVTTTDAWLEKIKRLELLLTVKESAMDVPSNLEARKASYIFYQLLIYGYA

SEQ ID NO: 56739 - protein, 66 aa, Zea mays
  Coding DNA Sequence Number=SeqID_14960
MRANGEIQRGEKAKAVQEGRLANTIIRARGGLSKLPVRRKLGDWHIGHLLIPMFKVVPHILSREPG

SEQ ID NO: 56740 - protein, 378 aa, Zea mays
  Coding DNA Sequence Number=SeqID_14961
  Subcellular localization annotation: CTP_CleavageSite=55; ConfidenceScore=5.31e-01
MLGVGLGVRLMVAVAPAPPVPAPPGKPPLPLCSSLRHRSSGWWFSNGDAHGRDSTAATTSSRATRRKWWSDPDGSQEDYGSSSLEEDEYGYGYDYDYEDEAAFPGFGGAGEMFDEPWFSKVFKTYGFMLPVMLASMFAVTGLKAFLMAMAIPLGQSAISFIIDAVWPRRKGNRDDRWRRPVQEEEEEEEDFPRDATDFATGGRGRYSSSYYEGRRGRQSYQSSVSNDFADAASAAVGADDSTKSSSSGDGGGNKSSGGYGGWDELLDNNNNTAAAREAKRSSNSFSAGNTYYSTKSRPSATGEADADYTAAGGGGRAEQGVGAPPERMRMRRRRVPRTMGLGSTRQSQKFDSIIGWSRMESEVKLWIGRKTSVVKKID

SEQ ID NO: 56741 - protein, 662 aa, Zea mays
  Coding DNA Sequence Number=SeqID_14962
  Homolog annotation: Hit_ID=Q2QRD1; Match level="QueryCoverage=33%, HitCoverage=21%, E-value=5e-68, Identity=58%"; Hit description=HAT family dimerisation domain containing protein
  Pfam annotation: Domain name=DUF1639; Domain location=133-165; Score=- 5.9; E_value=0.066; Accession=PF07797.4; Description=Protein of unknown function (DUF1639)
  Pfam annotation: Domain name=zf-BED; Domain location=446-496; Score =34.1; E_value=4.9e-07; Accession=PF02892.5; Description=BED zinc finger
  Pfam module annotation: Pfam domain module=DUF1639::zf-BED; Domain location=133-165::446-496
MDREPQQLTPEQRYNLSWEAATERFMEYSDLDKVLNNEAAQPKQGRKRKNKRTSQPNLFDIMDGGLALAHRCLTGNEVLRLATEAIPGTRDYDKSNVWIWVSCLLKYNTLYMAEGAPVPTTEAKKLASSIARSKQEITEDFSSIGRTWPPRRSKKRPVSLPGCRFPPVGCGRSPEPDLDPDPAAVSASKAPSANRSDRPSPTPTGEWRLTGVAASPAVTGVGEQPCASATGQAVTGVAASAARARAPRRRPEPRPLLRRCASATAEAPLRPASLRPSATADRSRGWLCALPPCVPAEPRPPLRPAPCPHELQHSGKAATVAPPPRPPGPPTAAGTARADPPAPPRPPGQGVSLPPRPPLRLCVPALATDGQLESATISMDGNSNRIDNNSSQSFAVADPLTLSSTGREIALDADTGTGTAATPSTATASTASTDTICHKRGRKSTSDVWNDFEQLFKDINGKKVRYAAKCLYCKSQLTASSTAGTGHLKRHHSTCASKAQRAAKTQSLIQFNADGSVRSWDYNPDIARTELCRLICTLDLPLGIGSTAAFERYIKHAHNPRFTAVCRQTTTRDFVKFYNQSCTSPIDVLKSSVSCVALTSDIWSGNAKEDYISVVAHYVNADWVLEKRVIGMRLIDVSHNGANIADRVKTVFADFGLTDKVD

SEQ ID NO: 56742 - protein, 161 aa, Zea mays
  Coding DNA Sequence Number=SeqID_14963
MPMCTRVNTIDIVCCKRHNRLPRYPAVHCSGLCTALTSNSPHWKRAERSFASAPPDKSLHMPCAWQGTPSTLALNVGSGLASRRRLLPRAYEPHGGTRPLLERRVGTKGAHWPENLGPTCWGPDVKRRETDALSHPLQLMTSLKTYATHKNNWYLKWYLRS

SEQ ID NO: 56743 - protein, 81 aa, Zea mays
  Coding DNA Sequence Number=SeqID_14964
MPRLAELKEARTKDRVGTRGEFTATDMLDNHKRSRITKTTATAKNRLGDDDRHAREELDAETRHAVASRELRAHNNVMEEN

SEQ ID NO: 56744 - protein, 158 aa, Zea mays
  Coding DNA Sequence Number=SeqID_14965
MSKLFVAHLVNTTLASFVFTRRLGFLDDAQNDDDTGGRRRWPPERHGQDWRLLRLEDGMLRAGDGRERKSSAEKSGAESRGPSREDAKMGAWPGNWAGRPGDQAPWGKASGGGDPGAVSSGEERGRAMEEREKNIGAQKQRTECGRERAADTPRGAEG

SEQ ID NO: 56745 - protein, 79 aa, Zea mays
  Coding DNA Sequence Number=SeqID_14966
MPMCMLHVLLLAMAATRSSRLDIPSASLASPDLGEKGNWEAMVDDQSYNSTIETLIIYVTPQVSISCYVGRFILISDAQ

SEQ ID NO: 56746 - protein, 105 aa, Zea mays
  Coding DNA Sequence Number=SeqID_14967
MGGSSRTWKKEMFVGEHRACAPWGSGAVGLGARSRCPDGVDGRRWKKGASWKEERWRLELLASRCSMQLLAGVAGGRALAARQSRPWCAGEKKTDAGKTFKEKKS

SEQ ID NO: 56747 - protein, 145 aa, Zea mays
  Coding DNA Sequence Number=SeqID_14968
MEQSIADLSKLLQAMQSQNESIKSALEANIVAVRDLSSWRPHIEADVGDLRVELSNLSTQVKELTTMQSEIAEARKMFEMGSQGQPSSTTAPWVSPEFMPIAANGESGVNTYHRGAGFRVIHTLTPPPVKGGSTLSTLPTSINWL

SEQ ID NO: 56748 - protein, 526 aa, Zea mays
  Coding DNA Sequence Number=SeqID_14969
  Gene Ontology: Mol. function=protein serine/threonine kinase activity; Biological process=protein amino acid phosphorylation
  Homolog annotation: Hit_ID=Q10NJ0; Match level="QueryCoverage=96%, HitCoverage=97%, E-value=1e-122, Identity=55%"; Hit description =Protein kinase domain containing protein, expressed
  Pfam annotation: Domain name=Pkinase; Domain location=21-216; Score =62.7; E_value=1.2e-15; Accession=PF00069.15; Description=Protein kinase domain
  Pfam annotation: Domain name=Pkinase_Tyr; Domain location=21-216; Score=-104.6; E_value=4.7e-06; Accession=PF07714.7; Description =Protein tyrosine kinase
  Pfam module annotation: Pfam domain module=Pkinase::Pkinase_Tyr; Domain location=21-216::21-216
MGDGASARGGRSGAGRRVGEYELLRPIGSGAYSQVWLGRHRVRGTEVAVKEIAMERLSKKLRESLLSEVDILRRIRHDNVIALHDSVKVSCPRLAAPFDVVRDPPCYRCGSARTFFLLKIMKNTLLKIADFGFAKFLQPFALAETLCGSPLYMAPEVMQGQKYDAKLLKNILRTHEIRLPSDCELSHDCIDLCRKLLRLNSVERLTVEEFVHHPFLSEHAPERTLSRTLSEIRDGFPINNISPTRPSSQSSQEDCMPFPLDDESSGQDEGPIPDSKSPMKSYGFPTDSPIIDSLEFVDQEYVFVSGPHPEGSSSSTNASQQLNLPAKYDNLSVSPPKLTFLSAPMPINGLPINRQQSAGTGSFDSHYSPASVISQGSADISDAMDQPPSDYLTRIRLLEQYASAIAGLVRDEIEKQFLSEVEYAEELASTVGQIADGTEMPDAIEMIFQSALLTGRRGGVDEMFGKAADAMTGYTRAVSMLRFLLIEAPSLALNPPLTLTRSDRHRLRTYIEALNTRLCQMQSQRH

SEQ ID NO: 56749 - protein, 92 aa, Zea mays
  Coding DNA Sequence Number=SeqID_14970
MAMMGSTSEKMYLCQSGCRGNAPVNGVSGAPPWRPPPLWYNACALSPADLKFDTMIDTDMVEVPMVTTPRDTRRGYDREHRSRLPPPLTKYL

SEQ ID NO: 56750 - protein, 163 aa, Zea mays
  Coding DNA Sequence Number=SeqID_14971
MVFSHPLLFSTACLLPLLAFPPWARKRKREPTPPSEDFGDSEYSEEEFSSESEGSPAPIPLRESSDDSDDSQGLAAEVWTYIWAVERSGLAGSDESEYSSDEEDSFEEDGGGDGEGDDDDDGGDGGGDDGDDGDGGSRGGNGSSRGGSGGGGRGGSGGNKASG

SEQ ID NO: 56751 - protein, 152 aa, Zea mays; identical to SEQ ID NO: 42425
  Coding DNA Sequence Number=SeqID_14972

SEQ ID NO: 56752 - protein, 105 aa, Zea mays
  Coding DNA Sequence Number=SeqID_14973
EPSNASPSLTGLDCDGLKKIQGYKKREIERQMAAAKLLVEEQLAEDLTLKRGISMEAGCFHEKNTGYGADRYTELDVVSYTNFHCLSLLADYQWLIARYMEPHVI

SEQ ID NO: 56753 - protein, 174 aa, Zea mays
  Coding DNA Sequence Number=SeqID_14974
  Pfam annotation: Domain name=Ribosomal_L35p; Domain location=2-41; Score=19.8; E_value=1.5e-05; Accession=PF01632.9; Description =Ribosomal protein L35
MASVKRFRVTRKDKIMRRCAGKQHLLAKKNTKRKKRLSKMLPLLFLKKLENSHDNFENKEMFADLWAKGFSLLGFEAAIVCSLTVLTGGRSSSFVFIEAYIYIKLECQFHTQITDGFLLVGICLGMEKCHRTQDEDDSKNPPMSGLEDAFTSRSRALSNNSATMFGLLFTYGSV

SEQ ID NO: 56754 - protein, 78 aa, Zea mays
  Coding DNA Sequence Number=SeqID_14975
MGSFLPPGLAKTTKSTGRARARDNAIGGAQWQETVGKERNNYLSQIANDLKLEHVHFSYWIGLQTLSENRTLKDPKWI

SEQ ID NO: 56755 - protein, 319 aa, Zea mays
  Coding DNA Sequence Number=SeqID_14976
MKKLRRTGYEVLTYGGGVTRSYHRERKNRRAQRSPMRNSLDSDDSTPDCLPEHDPRSQVKPPRALYRPPNDRRREEQLRKQHDELMVRVGDVRAWGVGAWLECWAARWDWAESQLIGPTGTTMPPPPSRPSDCRINPASIPTVRLPRSRTRTRRHACSRPRPCATAAAPAPAAATPAIRAPTPTPAAAAPTCLATAPHILSAGSGVAVNNHARSSLHRIRDCRSTTMCARIAERLLACVPVAGRAPVLVMYPNYASAETGEELDVDKDNKLRAGARENAAKIRSHGSTAMFVTVDYALLVAFIGFLAYLLGSWILPFVS

SEQ ID NO: 56756 - protein, 223 aa, Zea mays
  Coding DNA Sequence Number=SeqID_14977
  Gene Ontology: Mol. function=palmitoyl-(protein) hydrolase activity; Cellular component=extracellular space; Biological process=protein modification process
  Homolog annotation: Hit_ID=Q10T54; Match level="QueryCoverage=85%, HitCoverage=70%, E-value=3e-79, Identity=67%"; Hit description =Palmitoyl protein thioesterase containing protein, expressed
  Pfam annotation: Domain name=Palm_thioest; Domain location=1-190; Score=-56.5; E_value=0.0026; Accession=PF02089.6; Description =Palmitoyl protein thioesterase
MALDHRYEDNNSPVRRNVKEMKQLRGGYNIVGLSQGNLIGRAVVEYCDDGPPSGFFCIIVDALIKLEIYSDYVQDMADYLKSCRFLPKLNNEIPDKRNATYKERFSSLENLVLIMDDAVLIPRETAWFGYYPDGAFDPVLPPQKTKLYEEDWIGLKTLDEAGRVKFVSVPGGHLGISKGDMKKYIVPYLTNKKASVTVSDLLVAIWHAVLGLALAEGDDAVLI

SEQ ID NO: 56757 - protein, 141 aa, Zea mays
  Coding DNA Sequence Number=SeqID_14978
MGMSEFFPNGYGYGFVCPLGTLPTSIPMPSGGTTEPHDDKVAAIGQKGKRPPTEEATDHFEKLLKAPCPNHCYPVRHAYKDYKLLKRFLGGETPPEIGVEPRHGDERKKAGVAFRDETGCQMIFRGVRLLHAKKTSEVGTT

SEQ ID NO: 56758 - protein, 964 aa, Zea mays
  Coding DNA Sequence Number=SeqID_14979
  Gene Ontology: Mol. function=nucleoside-triphosphatase activity; Cellular component=membrane; Biological process=defense response
  Homolog annotation: Hit_ID=Q2L3S2; Match level="QueryCoverage=81%, HitCoverage=81%, E-value=1e-145, Identity=36%"; Hit description =Putative ATPase
  Pfam annotation: Domain name=NB-ARC; Domain location=439-708; Score= -101.2; E_value=0.00077; Accession=PF00931.13; Description=NB-ARC domain
  Subcellular localization annotation: CTP_CleavageSite=30; ConfidenceScore=5.41e-01
MKLQHETSDAEVLVSAASRNLSSSSSAFVSANQSPFFTPRSLSARVPEHTDPENNCSSNGIVLKISDILSGDSFTPQEELPSASVGVLPSDVSPPISLCTSSNFGTPAIVYNNPSFVSTFNGPCQGSSSATSNGGRSAPKEKHKRLGGIYRKSSSCQPTTSSASVSRLRSYDVYVGFHGRKASLLRFTNWLRAELEIHGISCFVSDRSRCRNSRSHDAVERIMNASTYGVVILTKKSFGNPYTIEELRNFFGKRNLIPIFFDLDAADCLARDIVEKRGDLWEKHGGELWMLYGGMEHEWMDSVDALSRVVDVQLEANDGNWRDCILQAIILLATKLGRRSVVDRVYRGKGRLEKEEFPFARNNDFVGRKKELSELELILFGDVMGDGEREYFELTTKQRRKGLAVRRSANNHEHMNTDDSKGKEPVIWKETEKDIEMQRLGSPLWHGRPLRVKNGVRCGRKKRSRKILYGKGIACISGEPGIGKTDLVLEYAYRFFQRYKMVLWVRGESRYIRQNYLALRTFLEVDLSVDSHLHEKGSDRCFEEQEEEAIAKIRQELMRDIPFLVIIDNLESEKDWWDKRVIMDLLPHFGGETHFIITTRLPRVMNLEPMKLSYLSGAEAMTLMKGGVKDHPLVETDALKIIEEKLGRLPLGLSIVGAILSELPITPTRLLDTLNHGPRSLATRMFQVCGWFAPSAVPIHMLARAAHKVPKKQWRGPRWRKWWRPLTCGLATCRMKKSEAEAAAMLMRFGIARCSAKPEHVQFHDLIRLYARKLGGTRTAPAMVQSVYLQGSIKHSSEHLWASCFMVFGFGSDPLLVELRPSELMFYVKQIVMPLAIQTFITYSRCNAALELLRLCTDALERAAESMLAHAGKWRETSFSCFRQAHSEAQYTYLWQELALLKASVLETRAKLMLRGGQYDIGDDLIRKAIFIRTSICGEHHPDTVSARETLSKLTRLLTTVQLS

SEQ ID NO: 56759 - protein, 487 aa, Zea mays
  Coding DNA Sequence Number=SeqID_14980
  Gene Ontology: Mol. function=transferase activity; Cellular component= endoplasmic reticulum; Biological process=biosynthetic process
  Homolog annotation: Hit_ID=Q10QW6; Match level="QueryCoverage=92%, HitCoverage=98%, E-value=0.0, Identity=71%"; Hit description =Glycosyl transferase, group 1 family protein, expressed
MATERRRASVVVLGDIGRSPRMQYHSLSLANQASMEVDIVANGGSDPHLSLRENPSIHIHEMKTVQLTGISKISGALSLLLKAAVQFILLVWFLCFKIPRPDVFFVQNPPSVPTLAAVKLASWLRGAKFIVDWHNFGYTLLGLSHGRSHIIVKIYFWFEKYFGQMADGAFCVTKAMQHELAQNWGIRATVLYDQSPDFFHPASLMEKHGVSIYFEFLFPPSCTTCDLKTQEVGEDMNTTAFTSKIDGQVFLKPNRPALVVSSTSWSALLNLAVIDIAFFMFIACDYRVDSSNMRKTPDEDFSILLEAALMYDRRVAAALGEDDSMDEGQLWIDIKNGKQFVYPRLLFIITGKGPDRKKYEDQIKRLKLRRVALRTMWLASEDYPLLLGSADLGVSLHTSSSGLDLPMKMLFKGFPEECNALKSLKEGAMKSASSSKWSTEWETNALPLVDQANDQTLLARIVVTLISLGLTFFYFMSKFAENQRSVY

SEQ ID NO: 56760 - protein, 159 aa, Zea mays
  Coding DNA Sequence Number=SeqID_14981
  Subcellular localization annotation: CTP_CleavageSite=81; ConfidenceScore=5.29e-01
MARVCGPDAGEALMTRVRSLPRRRDRSSAQIRRRRARGPSGHAVSGVRAQARPPSATAPVRSDATRRPGSTGATTPTRAPPAMAVQIRTLPAWAGASSPGDAALAATSDGTTRCGHNGLTLERGRGHLRLSVPTALGYTAPAHVCSHDAIPAHVCGHDA

SEQ ID NO: 56761 - protein, 155 aa, Zea mays
  Coding DNA Sequence Number=SeqID_14982
METLRGEETEAGSCAGGSQERHQQLSEETYMCSVAKAPVEESRLATARRNGVVPGAGERHGTAAEQEHALSVAAAAGREAPHRVMLKELGVSRIPSQSQALTSHRTGCLAPASDEMSTSTESDSLASLFSPRSQVGVTRAGHGSMEAKHDMIHSV

SEQ ID NO: 56762 - protein, 134 aa, Zea mays
  Coding DNA Sequence Number=SeqID_14983
MPKGSVCYPDPLLAPKRHQRRWRHLNPTSPTDWFFMMQAEVARGATVLLPDPAPPPAWSPFATAYTVGVSGLPKVKNVAEARASSTADRGQGSYAGLHRWRRPGARDHGAREGVPRLGLRESTGVREYFSLSYF

SEQ ID NO: 56763 - protein, 188 aa, Zea mays
  Coding DNA Sequence Number=SeqID_14984
MPKGSVCYPDPLLAPKRHQRRWRHLNPTSPTDWFFMMQAEVARGATVLLPDPAPPPAWSPFATAYTVGVSGLPKVKNVAEARASSTADRGQGSYAGLHRWRRPGARDHGAREGVPRLGLRESTGVREEVAGAILCVPGQGHGAADARDSGVGYGSRGYPLTRSRQVPGGRAMRRWLLGEEDRAAPRPT

SEQ ID NO: 56764 - protein, 42 aa, Zea mays
  Coding DNA Sequence Number=SeqID_14985
MESWRQLVYGRLKIVSIDVPIGRVTIGKPFIKRDPLIPDRTT

SEQ ID NO: 56765 - protein, 557 aa, Zea mays
  Coding DNA Sequence Number=SeqID_14986
  Gene Ontology: Mol. function=protein binding; Cellular component =cellulose and pectin-containing cell wall; Biological process =protein amino acid phosphorylation
  Homolog annotation: Hit_ID=Q41805; Match level="QueryCoverage=60%, HitCoverage=28%, E-value=0.0, Identity=96%"; Hit description =Extensin-like protein precursor
  Pfam annotation: Domain name=SPRY; Domain location=433-537; Score =34.7; E_value=3.1e-07; Accession=PF00622.18; Description=SPRY domain
MGAGAGTGEGSGSGSGDTSGVDGARKHGGALQRGLLRRAQRAEAVVPVVEVDERLVGRHAHGGLRVEEVEGEAEVDERRELADGLVHDAGENVPGHVELLQLGYVGELLGDGADEHVPADVDDGGVDQQAHLQRQAPVELVVEEDDLVQRLNHAADALGDASDEGVVGEDDDGRRGIAEVLGDGPYEAVGVDEDGVEVFVEERRRQLALEVVEPEVEVLERHHLEADVGEDAHEAVVADVELVQQRQPRHALGDDAAEAVGVDVEEGEVGEQAELRGEVPGDVGAVEVDPGHDRDLGVVQRLGADDAIVLAHVFADPVGGVALGVGVEGAVPGLERDVRAAEARVGEVGGADAVVELEVRRGSNPRPNAGGEEEFLLVPATRLSAERSDDAPGQPVLLSRIFKSERIELSEDRLTAASTKGFRMVRATRGVAAGAWYFEVKVVHLGPTGHTRLGWATNKADLQTPVGFDAYGFGYRDVDGAKVTKAWRDKYADEGYGEGDVLGFYISLPDGERYEPKQPDLIQYKGMPFHVQVPKEEQKTPDPVPGEYSFCLPLLHF

SEQ ID NO: 56766 - protein, 615 aa, Zea mays
  Coding DNA Sequence Number=SeqID_14987
MIGGRMMSLNDGGGWDSAGGGNDCSSFFGGAGVTTGGGELTGAGGGSDGGFTGAGGGELTGAGGGGDFIGGGGELTGAGGGGDFTGGGGELTGAGGGGDFTGGGGELIGAGGGGDFTGGGGELTGAGGGGDFTGGGGELTGAGGGGDLTGGGGELTGAGGGGDFTSGGGGELMGAGGGDDLGAGGGELTGVGGGEDFTSGGGKFTGAGGGDDLGVAGGELTGAGGGEDFTVGGGELTTTGGGDDLGVIGGELTIAGGGEDLTIGGGKLTGVGGGDDLGSDGGEMTVVGAGGVDGFTTSGGELTCAGGLAGLGVNGGELTGAGGGEDFTTGGGELTTTCGGDDLGANGGGGELSGAGGGEDFTDGGELTGASAGGELTGVGGGELTGAGGGFSGDEGGLDGVDGGVGFSCGGGDGISVGGGRDFSGGGDDFTEVGGVGYSSGGGVDFAGGGGGGDFSGGGGELTGVGGGGDFIGGGEDATGAGGGGDATGVGGGGDFTGGGGDATGAGGGGDFTGGGGDATSVGGGGDFTGGGGEATGAGGGGDFSGGGGDATGAGGGGDFTGGGGETTGAGGGGDGEAIGAGGEVVFTGGGGDATGACGGDNFTSDGGGVEAAGG

SEQ ID NO: 56767 - protein, 216 aa, Zea mays
  Coding DNA Sequence Number=SeqID_14988
  Homolog annotation: Hit_ID=Q8LKG6; Match level="QueryCoverage=27%, HitCoverage=12%, E-value=4e-19, Identity=77%"; Hit description =Cleavage stimulation factor 64
  Pfam annotation: Domain name=RRM_1; Domain location=77-142; Score =15.2; E_value=0.0056; Accession=PF00076.12; Description=RNA recognition motif. (a.k.a. RRM, RBD, or
MAIHMVLLHYFFRCNARVFNQDTSDWDWEEDLEEDEEMISCYQGQTPSPINGPSFFAWEACASGYSSPTDAMFHLLNVSEYLDQVQDARDAYCRHEAARLVIDKETGKPKGYGFCEYKDEETALSACWNLQGYEINGRRLCVDFAENRRNTDKNREKVDNPQNYYRRVFPTTLEFFVNMSSCIVFVPVNDNSCAFSDHPVSPVAISYKHVYVCTTA

SEQ ID NO: 56768 - protein, 87 aa, Zea mays
  Coding DNA Sequence Number=SeqID_14989
MAAVVRARGWTVAVVWRRGTAEGADAGREGMDWDGGRAEGIDGERMGRMRHATSPCAACGWGGLCERGEQGGCERERRGEAGASLWS

SEQ ID NO: 56769 - protein, 137 aa, Zea mays
  Coding DNA Sequence Number=SeqID_14990
MTYFWYPIPRYSSCSGPLSKVGAIEDDRGKLYKRGGTRSRHAEWSVKWDMEWKNRGRNRRGKPQQQRWPGAGPQSDSVGAEASTVTTNDPPIRAWWLHHLRCDSVPCSHRGTTVLAITITDSGSVWFVPKCVTLCLS

SEQ ID NO: 56770 - protein, 73 aa, Zea mays
  Coding DNA Sequence Number=SeqID_14991
MRVAAILACSDLGISQREGLSSLAIQVSKLIKDAIFLDGFALGYTEEELDKFEETDPPSRHLADQTGRRLFLK

SEQ ID NO: 56771 - protein, 360 aa, Zea mays
  Coding DNA Sequence Number=SeqID_14992
  Gene Ontology: Mol. function=ATP binding; Cellular component =membrane; Biological process=defense response
  Homolog annotation: Hit_ID=Q53JL2; Match level="QueryCoverage=89%, HitCoverage=34%, E-value=5e-38, Identity=36%"; Hit description=NB -ARC domain, putative
MDEFGVVKSCRIHDTVLDFIVSKAIEENFVTLIGVPGVNPTAVGDKDKVRRLSMQNEGKIPPELVLSSVRSLNVFGARVEIPSLSRFRRLRVLAFEGCGQLQDDHLKDVGDLLHLRYLRLNEASGVTELPEKTAGLKHLGALDVHGHNTVMEIPASICQAGRLECLVTLAVDRETIMPDEIADMKALQVLEGVNVYIQSVDFIEGLGELTNLRKLGIRFINSDADEEWDEKYEEIVSSVRKLADSNLDSLRVHTLNEPPELLNKLNDHGTVDLGELVVTGDIVSDLADWWGVLVNLHKLLFYTYGLSEKDVETLGSITGLEYLCIHLFDAPDDPHELKAPLERAMDAHPNRPRLVWVDED

SEQ ID NO: 56772 - protein, 122 aa, Zea mays
  Coding DNA Sequence Number=SeqID_14993
MSEVETEAVKIVGKYSTKTEMTKSLEFRDGNIRLNRVFEMNELEYGPYPKDAEEGEEEGSGVTMNEKKAKGSKSPNEEEVASKDFAMTLPWDRWVFGLGMLVGYCPYFVVLGCSLESFIGKD

SEQ ID NO: 56773 - protein, 185 aa, Zea mays
  Coding DNA Sequence Number=SeqID_14994
MTFEWDEAKGHDNQGGGPAVAHVRVPKAQTFSQAAKTKSPLGQGELNFAEPRKQHTGFAPTEDEDVLEEGKVLGIPTKDQLELLALRIKNNHLQKQREVLVAKRQQTNIQARVRHLILDEEQKARELEQEIPKMQHEDTHHQQSVDVAYQNIQHFHRSTFTPATFQGLNYIDGRSPFAPQLQASP

SEQ ID NO: 56774 - protein, 126 aa, Zea mays
  Coding DNA Sequence Number=SeqID_14995
MDLGLLGCLASWAMSRALGAELDKLCHRLGQLLDYIVVHDTPLVEHLDNAPCHIRDIIDFSVHRRAMAALLMAEICSGHRLQYIIGLPSSLSDEVASHVFFGFWLMTLRVTRANHDVSCLDAASLK

SEQ ID NO: 56775 - protein, 72 aa, Zea mays
  Coding DNA Sequence Number=SeqID_14996
MQVCNFVLLSPSLLKTPFQLIWFCYSIVLWSQVQNNLCTPKNGPNAYSGGGGVFVDDGIKQSSETKLALAEH

SEQ ID NO: 56776 - protein, 173 aa, Zea mays
  Coding DNA Sequence Number=SeqID_14997
  Homolog annotation: Hit_ID=Q41874; Match level="QueryCoverage=27%, HitCoverage=11%, E-value=6e-22, Identity=100%"; Hit description =Tubulin gamma-3 chain
MDKQCKQDSKDSIRRTIVEHDKVHELHRLYHVHKTLMAECDSHRYQPRAEGTHEVVQGSRSNLNCSPSTLRTNQSALLGNAQYPAPQQVHEDLSLHECKPVNCLSLFGEENSAAKERSLLIDLEPRVINGIQNSEYRNLYNHENIFVAEHGGGAGNNWASGYHQLQACRYYPE

SEQ ID NO: 56777 - protein, 147 aa, Zea mays
  Coding DNA Sequence Number=SeqID_14998
  Gene Ontology: Mol. function=transcriptional repressor activity; Biological process=regulation of nitrogen utilization
  Homolog annotation: Hit_ID=Q10L97; Match level="QueryCoverage=99%, HitCoverage=49%, E-value=9e-54, Identity=67%"; Hit description=NAD dependent epimerase/dehydratase family protein, expressed
MVVGGRKLKGTMLVKRAVEEFYIKSRLLLRDPEMASTLFGKQDESVLQGVTHVICCTGTTAFPSKRWDGENTPERVDWDGIRNLVSALPQTIKRLVLVSSIGVTKYNEIPWSIMNLFGVLKYKKMGEDFVRNSGIPFTIIMYSGLED

SEQ ID NO: 56778 - protein, 194 aa, Zea mays
  Coding DNA Sequence Number=SeqID_14999
  Gene Ontology: Cellular component=integral to membrane
  Homolog annotation: Hit_ID=Q5Z619; Match level="QueryCoverage=36%, HitCoverage=29%, E-value=3e-26, Identity=69%"; Hit description =Putative senescence-associated protein
MPVMVEEEQRLDMRSATHTTFAMRRGRDRDGIKGRGRTLAAILGGRARCGRPQLDGARFCQLRTRSSPPRLSRRESRPPHPPINTAAAVFSPPAWWTIVPFQPSSLTCPPASVPFFSPCGGSHPAADVDCVTWSNDPGLLCYACASCKADLLGGLREQWRRATVALIFVYVVGCSAFRNAQTEDLFRRYKWGNY

SEQ ID NO: 56779 - protein, 145 aa, Zea mays
  Coding DNA Sequence Number=SeqID_15000
  Gene Ontology: Mol. function=two-component response regulator activity; Cellular component=nucleus; Biological process=two -component signal transduction system (phosphorelay)
  Homolog annotation: Hit_ID=Q7Y0W4; Match level="QueryCoverage=95%, HitCoverage=39%, E-value=3e-35, Identity=59%"; Hit description=B -type response regulator
  Pfam annotation: Domain name=Myb_DNA-binding; Domain location=2-45; Score=18.1; E_value=0.033; Accession=PF00249.21; Description=Myb -like DNA-binding domain
MQLHRQFIAAVNSLGEKAVPKKILETMKVKHLTREQVASHLQKYRLHMRKVNQALHNDDDTPPSSSLPNESNILRTEFDGSLNPTYFDQDGCTEYSLPKDDLSSGSDCMLGERNNYSPQGFQDFRWDSDKQASETTYLWNFEADE

SEQ ID NO: 56780 - protein, 98 aa, Zea mays
  Coding DNA Sequence Number=SeqID_15001
MARRGGGGGDRRRQRWGAEWGGFRVSVHSFFVHPTVADAGPKFMGSQKNTLQLRKRRGQMMSPTESQGSLVRQARQLSGTDRIVETSEVGFAKSGMVS

SEQ ID NO: 56781 - protein, 73 aa, Zea mays
  Coding DNA Sequence Number=SeqID_15002
MAAHNSIHTTDEQRHSSNCSEQIDEDDISQESDLPTTIANPSGDHLAAVATPSPLRAPALPPPVATATAPPRH

SEQ ID NO: 56782 - protein, 118 aa, Zea mays
  Coding DNA Sequence Number=SeqID_15003
MGLRGVATRVRLLVRLLAALGHAGATVAGASRWGWVSGSRIENAWMGVNEEMVKPISLSAIYKTLPTKEKRVSNVRENIEAGIDAGTGHDAEVFLLMGPSATKQTPNSSPFTVLDRFS

SEQ ID NO: 56783 - protein, 154 aa, Zea mays
  Coding DNA Sequence Number=SeqID_15004
  Homolog annotation: Hit_ID=Q6QP51; Match level="QueryCoverage=50%, HitCoverage=45%, E-value=2e-18, Identity=62%"; Hit description =Putative growth-regulating factor 1
MAACAMELGAEIVQLHPRRNAGSARMKQLTGTPNPRLVERDETQHIPWDRERGYSERDPSLRRKRAPSPPTDHRFEGWPLRRVRQPPQSTRAPRPLLIRGLKASPSKGFDSRLRALGLRAHYWSEVRRLAPRRGSTAASDHSGSAPTTDQGFVG

SEQ ID NO: 56784 - protein, 222 aa, Zea mays
  Coding DNA Sequence Number=SeqID_15005
  Gene Ontology: Mol. function=calcium ion binding; Cellular component =membrane; Biological process=homophilic cell adhesion
  Homolog annotation: Hit_ID=Q6QP51; Match level="QueryCoverage=58%, HitCoverage=54%, E-value=3e-16, Identity=55%"; Hit description =Putative growth-regulating factor 1
MGRRETRHKGGKTSKPEIGQGGDSSEVEVESEPGGQARRRPSSEVEVESEPWGRARRSPSSEVEVESEPWGRARRSPSSEVEVESEPWGRARRSPSSEVEVESEPWGRARRSPSSEVEVESEPWGRARRSPSSEVEVESEPWGRARRSPSSEVEVESDPWGRARRSFLWHPRLDLAVVSLTVSSGTAVGAGQATLFSCQVDQWSGEVTVVTSALSSEERVSG

SEQ ID NO: 56785 - protein, 107 aa, Zea mays
  Coding DNA Sequence Number=SeqID_15006
MDALKFEYSDYPKVSEEDAAGVKRKRNVSIMKRQAIRGYRDTGGNGATLTFLYIESLQGKNVKGGMGKAPSDAVVEESTKTQANEAPQKKHQIKIVMRAIESSLEEG

SEQ ID NO: 56786 - protein, 593 aa, Zea mays
  Coding DNA Sequence Number=SeqID_15007
  Gene Ontology: Mol. function=transketolase activity; Cellular component=chloroplast thylakoid membrane; Biological process=pentose- phosphate shunt, oxidative branch
  Homolog annotation: Hit_ID=Q43848; Match level="QueryCoverage=99%, HitCoverage=85%, E-value=0.0, Identity=74%"; Hit description =Transketolase, chloroplast precursor
  Pfam annotation: Domain name=Transket_pyr; Domain location=282-456; Score=224.3; E_value=2.7e-64; Accession=PF02779.14; Description =Transketolase, pyrimidine binding dom
  Pfam annotation: Domain name=Transketolase_C; Domain location=469 -586; Score=29.0; E_value=1.6e-05; Accession=PF02780.10; Description =Transketolase, C-terminal domain
  Pfam annotation: Domain name=Transketolase_N; Domain location=1-267; Score=446.9; E_value=2.6e-131; Accession=PF00456.11; Description =Transketolase, thiamine diphosphate b
  Pfam module annotation: Pfam domain module=Transket_pyr::Transketolase _C::Transketolase_N; Domain location=282-456::469-586::1-267
MGCAPLGHVLFDEFLRFNPKNPAWFDRDRFVLSAGHGCMIQYALLHLAGYNGVKMDDLKTFRQWRSRTPGHPENFETPGVEVTTGPLGQGFANAVGLALAEKHLASRFNKTDMKVVDHYTYVILGDGCQMEGVSNEAASLAGHWGLGKLIAFYDDNHISIDGNTDIAFTEDVLARYEALGWHTIWVKNGNTGYDDIRTAINEAKGVKDKPTLIKPFHVPDEVKRHWSRHIDEGASLEAEWNARFVEYEKKYNQEAAELKSIISGELASGWENALRNYTPEMSPDATRNLSQQCLNALAKVIPGFLGGSSDLATSNMTLLKKFGDFQRDTPEERNIRFGVREHAMGAISNGIAVHSPGLIPYCATFFVFTDYMRASIRLSALSESGVIFVMTHDSVGLGEDGPTHQPVEHLFSLRAMPNILMLRPADGNETSGAYKIAVLNRKRPSVIALSRQKLPQLRGTSVDAVSKGGYIVSDDSSGNKPDFILIGTGSELEIAENAAGELRKKGRTVRVVSLVCWELFEEQPEEYKESVLPSEVTSRISIEAGVTFGWEKYIGQKGKAIGIDRFGASAPAGKIYKELGLTVEHVIAAAEAL

SEQ ID NO: 56787 - protein, 121 aa, Zea mays
  Coding DNA Sequence Number=SeqID_15008
MEVGLPPLEKSPGVVVNRSEFNEEVPPWADLVQQRTLGSLGHRCRFRSRAVALAVDSSRRGLGVLRFVALLLLRRWSSPGTAWTRTTAIALPRKPAFLTSMSQAYSVKGIAHECLESLALR

SEQ ID NO: 56788 - protein, 67 aa, Zea mays
  Coding DNA Sequence Number=SeqID_15009
MTREKKMFTSYVKNKDSHVTIIFGDGCNTPVNVVLNEWNVAKNQNLRIRQPVSTVLRSDDKPKFGGL

SEQ ID NO: 56789 - protein, 131 aa, Zea mays
  Coding DNA Sequence Number=SeqID_15010
MGKSNKRKREPTPPSKDFGDSEYSEEEFSSESEGSPAPVSPPTSSDDSDDSQGIATEGSDESEYFSDEEDSLDSSEEGSGGDGGDDDDDGGNGDDSDSSMGGDGGSKGGNGGSSRGSNGGGSSKGSNKASG

SEQ ID NO: 56790 - protein, 140 aa, Zea mays
  Coding DNA Sequence Number=SeqID_15011
MGKSKKGGGSSHHSSDKRKREPTPPSEDFGDSEYSEEEFSSESEGSPAPASPSASSDDSDDSQGIAVEVWTYIRAVERAGLEGLDESEYSSDEENSSDSSEEGGGGDDRGDGDGGGDGSSKGGSGNGSGGSSKGSNKASG

SEQ ID NO: 56791 - protein, 134 aa, Zea mays
  Coding DNA Sequence Number=SeqID_15012
MSMDDDSMDDEFVQAAEAEERLLEAHNDEANGKCFLLGSSSAATIDVDGSGEGTPGTTAETTNGSTNPTAVGSTFVSVPYDYGIIDKIFAIVLDKASSNKTTMDVLKPLFFGYIGNLIPMPSRNEYDLRSGDDS

SEQ ID NO: 56792 - protein, 418 aa, Zea mays
  Coding DNA Sequence Number=SeqID_15013
  Gene Ontology: Mol. function=protein serine/threonine kinase activity; Biological process=protein amino acid phosphorylation
  Homolog annotation: Hit_ID=Q40541; Match level="QueryCoverage=84%, HitCoverage=55%, E-value=8e-60, Identity=41%"; Hit description =Protein kinase
MATGKPPWSQQYQEVALLFHVGTTKSHPPIPEHLSQEAKDFLLKCLQKEPELRSTAPDLLKHPFVTGELDDLQPRNHAAHKDCFNEIHAHDMPNGLGLNHSSNWSTMNSNRSSKIKPLWEGSCDDVDMCEFADKDEYAPVGSSYNPMSEPFDNWENKFDTSPEQSSHEPMEFGELAKHAESSITENDFTCPVEGSCEDDVLTESKIKAFLEEKALDLKKLQTPLYEEFYNTVHGGSCQTSKGKFPISPKLPPRGKSPPSKTRGGACDTLNNTAPESCSKQFPRSSVVESSRILREIASPQLNEFADKLHLDAQDSPRPVHDLIGSIPVNSISFTERQRKWKEELDQELERERVFRKSNAGILRLTAIAAKSTREPPYTHTHLLPLPLSGVDCAHLEQIAQGLLRKKLMTQSALLRTAG

SEQ ID NO: 56793 - protein, 284 aa, Zea mays
  Coding DNA Sequence Number=SeqID_15014
  Gene Ontology: Mol. function=protein serine/threonine kinase activity; Cellular component=cell cortex; Biological process=protein amino acid phosphorylation
  Homolog annotation: Hit_ID=O22042; Match level="QueryCoverage=60%, HitCoverage=26%, E-value=1e-63, Identity=71%"; Hit description =Mitogen-activated protein kinase kinase kinase 3
  Pfam annotation: Domain name=Pkinase; Domain location=106-280; Score =79.4; E_value=1.1e-20; Accession=PF00069.15; Description=Protein kinase domain
  Pfam annotation: Domain name=Pkinase_Tyr; Domain location=106-275; Score=-15.1; E_value=1.5e-11; Accession=PF07714.7; Description =Protein tyrosine kinase
  Pfam module annotation: Pfam domain module=Pkinase::Pkinase_Tyr; Domain location=106-280::106-275
  Subcellular localization annotation: CTP_CleavageSite=55; ConfidenceScore=5.01e-01
MRRDDAGGGTGFHDLFDSVRRSISFRPTAPAPEAPAGPFGAGAGGIGVRISSCLRKSRGMGLLGLITKSPSPPRRMLPPMPDQSDGGSGGGGANGGVGEENPLIRWRKGELIGAGAFGQVYLGMNLDSGELLAVKQVLIGTSNATREKAQAHIKELEEEVKLLKNLSHPNIVRYLGTVREEDTLNILLEFVPGGSIQSLLGKLGSFPEPVIKKYTKQILQGLEYLHSNAIIHRDIKGANILVDNKGCIKLADFGASKQVAKLARFRDVKFIQSRMKGLNFQAKA

SEQ ID NO: 56794 - protein, 113 aa, Zea mays
  Coding DNA Sequence Number=SeqID_15015
MAATEGVGQGNRRGWRPWELGCSSFTGAMEKFLRAGEKGSLLPDAAGKRESSLRAAVWDEEHGQRRLAGAPVRALGHGAAAPALTCCNRVGGLLREGEEDREERSWRLGKMEG

SEQ ID NO: 56795 - protein, 122 aa, Zea mays
  Coding DNA Sequence Number=SeqID_15016
MAATEGVGQGNRRGWRPWELGCSSFTGAMEKFLRAGEKGSLLPDAAGKRESSLRAAVWDEEHGQRRLAGAPGRALDHGAAAPALTCCNRVGGLLREGEEDREERGWRLGKMEGWECKNASTC

SEQ ID NO: 56796 - protein, 80 aa, Zea mays
  Coding DNA Sequence Number=SeqID_15017
  Subcellular localization annotation: CTP_CleavageSite=41; ConfidenceScore=5.37e-01
MDSAPSTPAVCSLFLHSPFVVVVHPRRGTLRFARRRPIIQRSSDVWSDAQIGITVILANTVWVCLWCHEDDSWMVFMIGE

SEQ ID NO: 56797 - protein, 461 aa, Zea mays
  Coding DNA Sequence Number=SeqID_15018
  Gene Ontology: Mol. function=DNA binding; Cellular component =mitochondrion; Biological process=DNA integration
  Homolog annotation: Hit_ID=UPI00004C1731; Match level="QueryCoverage =90%, HitCoverage=30%, E-value=1e-179, Identity=76%"; Hit description= UPI00004C1731 related cluster
  Pfam annotation: Domain name=RnaseH; Domain location=1-123; Score= -14.2; E_value=0.0012; Accession=PF00075.14; Description=RNase H
  Pfam annotation: Domain name=rve; Domain location=174-332; Score =95.8; E_value=1.3e-25; Accession=PF00665.16; Description=Integrase core domain
  Pfam module annotation: Pfam domain module=RnaseH::rve; Domain location=1-123::174-332
MFFDGSLMKTGAGAGLLFISPLGKHLRYVLRLHFPASNNVVEYEALVNGLRISIELGVRRLDARGDSQLVIDQVMKNSHCRDPKMEAYCDEVRRLEDKFYGLELNHIARCYNETADELAKIASGRTTVPPDVFSRDLHQPSVKTDDTPEPERASAQPKAPSAQHEAPSAQPEAPSTPEGEALHVEEEQSGKASGGYTHLLVAIDKFSKWIEVRPLNSIRSEQAVAFFTNIIHRFGVPNSIITDNGIQFTDRKFLDFCEDHHIRVDWAAVAHPMTNGQVERANGMILQGLKPRIYNDLNKLGKRWMKELPSVVWSLRTTPSRATGFTPFFLVYGAEAILPIDLEYGSPRTRAYDDQSNRASREDSLDQLEEARDMALLHSVRYQQSLRRYHARWVRSRDLQVGDLVLWLRQDARGRHKLTPPWEGPFVIAKVLKLGTYKLANSQGEVYSNAWNIRQLRRFYP

SEQ ID NO: 56798 - protein, 325 aa, Zea mays
  Coding DNA Sequence Number=SeqID_15019
MDMGSNRPTAILQHEANNHWKVSGFQHPSKTENQQTWTWAATGQQPYAHTYRLQYNRAHQKTGTRSESGDWRPYLQAGCWRRHAGDGGGAEEDDAAVSPVTAYAHVVGIGKKEAGLGRWASEVDHWADISIQPARLIVPKLIGRAGPDRVVTLDRHWSYDQPINHCPRSPLTPADPARTPNYPAEDPAARQTTAAEDPDARPPTPTQPRFPAEHPVARPPPASRDFAPNAAIRGRQPQFPAARQPNAAEDPARARPPPPSHDSPPNARGVPLEKNAVCRWRGRPNVKELAPTPDRNDICYCSTVQASTKRKQPKSPMDAGPYKLL

SEQ ID NO: 56799 - protein, 167 aa, Zea mays
  Coding DNA Sequence Number=SeqID_15020
  Gene Ontology: Mol. function=DNA binding; Cellular component=nucleus; Biological process=regulation of transcription, DNA-dependent
  Homolog annotation: Hit_ID=Q3C253; Match level="QueryCoverage=53%, HitCoverage=13%, E-value=2e-33, Identity=68%"; Hit description=GAMYB- like1
  Pfam annotation: Domain name=Myb_DNA-binding; Domain location=108 -152; Score=8.0; E_value=0.85; Accession=PF00249.21; Description=Myb -like DNA-binding domain
  Pfam annotation: Domain name=Myb_DNA-binding; Domain location=55-102; Score=49.3; E_value=1.3e-11; Accession=PF00249.21; Description=Myb -like DNA-binding domain
  Pfam module annotation: Pfam domain module=Myb_DNA-binding::Myb_DNA -binding; Domain location=108-152::55-102
MTVVRVDENPAPDGENSPLDDEYVSADDEHVDDEDKETDSIDDYENPSGTPQMKKGPWSPEEDKRLKDYVEVHGAGNWNKVQQNARLNRCGKSCRLRWTNHLRPDLKKEPFNAEEEEKIIKLHIRRGPKWSMMASYFPASFLHLHSKLPFLVSNIGFRRCLTQLALE

SEQ ID NO: 56800 - protein, 585 aa, Zea mays
  Coding DNA Sequence Number=SeqID_15021
  Gene Ontology: Mol. function=nucleotide binding; Cellular component =membrane; Biological process=transport
  Homolog annotation: Hit_ID=Q656J6; Match level="QueryCoverage=70%, HitCoverage=91%, E-value=1e-145, Identity=63%"; Hit description =Putative ABCG4
  Pfam annotation: Domain name=ABC2_membrane; Domain location=309-520; Score=158.7; E_value=1.6e-44; Accession=PF01061.14; Description=ABC -2 type transporter
  Pfam annotation: Domain name=ABC_tran; Domain location=78-262; Score =131.8; E_value=1.9e-36; Accession=PF00005.17; Description=ABC transporter
  Pfam module annotation: Pfam domain module=ABC2_membrane::ABC_tran; Domain location=309-520::78-262
MATTTPAVTEPDNADASPPSPTSPPSKKVMYELAARNIYYAKPTAAPRSLAQLLKPCGAAPTPPDYILRDVSLTARAGEILAVVGPSGAGKSTLLDILAARTAPTHGRLLLNSAPLRPSSFRRLSSHVPQADVALTLLTVSETFAFAASLLHPESESAVSAAVTALLVDLRLAHVAHTRVSPARLSGGERRRVSIGLALLRNPAVLLLDEPTSGLDSSSAHVVVSCLRAVAAARGTTVVFSIHQPSARLLSAVDCLLLLSRGTVLHHGSLASLDAALLSHGLVVPAQLNPLEFALEVLDQLPHPTPSTPEPKATTQELNSSSSHHKMVATATPSTEAVVVGTLLGTIYIHAGYGEAGAHKRLGLFAFTLTFLLTSTTETLPTFVTERPIVLAETAAGLYRLSSHAAAGTLVFLPYLLAVALLYSVCVYFLVGLCSSAGAFASFVLVVWAVVLTANSFVLFVSSFAPDYIAGMSLVSVSLAGFFLFSGYFLSRGSMPSYWVFMHYVSPYKYALDALLANEYTCAGNRCFGVGGGSECSQTGLDVLVEKGLTAEERWTGVQVLFGFFLLYRVLYWVVLSRRASRAKR

SEQ ID NO: 56801 - protein, 754 aa, Zea mays
  Coding DNA Sequence Number=SeqID_15022
  Gene Ontology: Mol. function=RNA-directed DNA polymerase activity; Cellular component=intracellular; Biological process=RNA-dependent DNA replication
  Homolog annotation: Hit_ID=UPI00004C1731; Match level="QueryCoverage =94%, HitCoverage=53%, E-value=0.0, Identity=82%"; Hit description =UPI00004C1731 related cluster
  Pfam annotation: Domain name=RnaseH; Domain location=361-489; Score =14.9; E_value=2.4e-06; Accession=PF00075.14; Description=RNase H
  Pfam annotation: Domain name=rve; Domain location=490-665; Score =91.7; E_value=2.2e-24; Accession=PF00665.16; Description=Integrase core domain
  Pfam module annotation: Pfam domain module=RnaseH::rve; Domain location=361-489::490-665
MAVPNYTYLKLKMPGPNRVITVGPTYKHAFECDVECVEMKESDQLATSFITPFGMYCYVTMPFGLRNAGATYQRCMNHVFGEHIGRTVEAYINDIVVKTRKASDLLSDLEVTFRCLKAKGVKLNPEKCVFGVPRGMLLGFIVSERGIEANPEKIAAITSMGPIKDLKGVQRVMGCLAALSRFISRLGERGLPLYRLLRKAECFTWTPEAEEALGNLKALLTKAPILVPPAAREALLVYVAATTQVVSAAIVVERQEEGHALSVQRSVYFVSEVLSETKILYPQVQKLLYAVILTQRKLRHYFESHPIIQCREASGRIAKWAVEIMGETISFAPRKAIKSQVLADFVAEWVDTQLPTALIQPELWTMFFDGSLMKTGAGAGLLFISPLGKHIRYVLRLHFPASNNVAEYEALVNGLRIAIELGVRRLDARGDSQLIIDQVMKNSHYRDPKMEAYCDEVRRLEDKFYGLELNHIARRYNETADELAKIASRRTTVPPDVFSRDLHQPSVKIDDTPEPEAPSAQPEKAPGGFTHLLVAIDKFSKWVEVRPLNSIRSEQAVAFFTNIIHRFGVPNSIITDNGTQFIGRKFLDFCEDHHIRVDWAAVAHPMSNGQVERANDMILQGLKPRIYNDLNKFGKRWMKELPSVVWSLRTTPSRATGFTPFFLVYGAEAVLPTDLEYGSPRTRAYTDQSNQASREDSLDQLEEARDRALLHSARYQQSLRRYHARGVRSRDLQVGDLVLRLRQDARGRHKLTPP

SEQ ID NO: 56802 - protein, 230 aa, Zea mays
  Coding DNA Sequence Number=SeqID_15023
  Homolog annotation: Hit_ID=Q6K8I3; Match level="QueryCoverage=18%, HitCoverage=8%, E-value=1e-10, Identity=74%"; Hit description =Fertility restorer homologue A-like
MSVRVRVASISSCLCSISACRLLSQIIPPVQLLRPACHRTQLILKSVCQSLGTLSVILHYLYNDNSQAGSAGVLAHFVEHFEDGLQLAVFGTVPDEDVVDASRLCSWSLSRAPWQQPRRRRGGRSRQTAPCVTRGSSVVTRTNQRGSKRRRASAWSGGRRRTSGSNCSSRNRQGSEAAAREADEERREDGRRLGEAALGGGRVEEVERALRGGGGRDEVRKFRVVEVPQC

SEQ ID NO: 56803 - protein, 48 aa, Zea mays
  Coding DNA Sequence Number=SeqID_15024
MTQQLSYVLELQLPCLRRLACSGVWLCACKFSHSAWLHRNEIKLLYEV

SEQ ID NO: 56804 - protein, 134 aa, Zea mays
  Coding DNA Sequence Number=SeqID_15025
MVQRRRCKQESFGVTAEGGTDLKTKRLFRPRQITIELLSSVKGMNMVVRSFIRPLPSFSEELLALPTTRRTYRSILWKIEGCADLMTKIKASTCVYLWCGISKSKLKIQKLRSQRNGKKTLPFYFEVKCREYTN

SEQ ID NO: 56805 - protein, 52 aa, Zea mays
  Coding DNA Sequence Number=SeqID_15026
MARVACTLRGKRLDGGVYVLSVKKRQTFVASILRLYQKKKTRSKAARGRDPP

SEQ ID NO: 56806 - protein, 61 aa, Zea mays
  Coding DNA Sequence Number=SeqID_15027
MAMYPERLPRRPSHENLLKILGNTPNGCAQGVPWRLELLIEYLRLFDERDRMWTTTPDLYK

SEQ ID NO: 56807 - protein, 146 aa, Zea mays
  Coding DNA Sequence Number=SeqID_15028
MGRGRRDRGWPRRGDNKRKRAPSPPSEDFGDSEYSEEHSIERAGLGGSDESGVSSDEADSSDSSEEWSGDGGDDEGDGSGNDSGEGDGGDDDDGGSKGDGGRGSEGDGGVGGSKGDGGDGGSNGDDNDSGDGDSGDGKASGIAPLV

SEQ ID NO: 56808 - protein, 311 aa, Zea mays
  Coding DNA Sequence Number=SeqID_15029
  Gene Ontology: Biological process=regulation of transcription
  Homolog annotation: Hit_ID=Q5JMF9; Match level="QueryCoverage=94%, HitCoverage=48%, E-value=1e-111, Identity=67%"; Hit description =Tesmin-like
  Pfam annotation: Domain name=CXC; Domain location=102-142; Score =66.2; E_value=1.1e-16; Accession=PF03638.5; Description=TesminTSO1 -like CXC domain
  Pfam annotation: Domain name=CXC; Domain location=186-227; Score =87.2; E_value=5.2e-23; Accession=PF03638.5; Description=TesminTSO1 -like CXC domain
  Pfam module annotation: Pfam domain module=CXC::CXC; Domain location =102-142::186-227
  Subcellular localization annotation: CTP_CleavageSite=58; ConfidenceScore=5.28e-01
MAVAAAAVSRVLQPKASSVGFQHPQHVGAAMPMGVPQQLHQRVLPVMRLHQVVGHVPLAVSVPQLRPVPPQPVQRPPVAVPLKPESPKLRARLYEGKDSTPTKKKCCNCRNSKCLKLYCECFASGTYCDGCNCTNCFNNPDNEVARREAVEAILDRNPDAFRPKIGSSPHMHRNNEVPSDLPLVGKHNKGCHCKKSGCLKKYCECFQANILCSENCKCMDCKNFEGSEERRNLFQGDHKNAINMQQVTNAAVNGAIGATGFPSPSTSRKRKHNDPSLDHFNKEHIAHKNYHIPQEQAEVPCYITRSVSFFP

SEQ ID NO: 56809 - protein, 112 aa, Zea mays
  Coding DNA Sequence Number=SeqID_15030
  Gene Ontology: Biological process=regulation of transcription
  Homolog annotation: Hit_ID=Q5JMF9; Match level="QueryCoverage=99%, HitCoverage=15%, E-value=3e-27, Identity=58%"; Hit description =Tesmin-like
MSPGTLALMCDEEAFEKMCDEQDTMFTTSQNAAPQQTVIVNHNQSALYAEQENVVLTEFRDCLRKFVRYGRMKEERYSMAIKSETSGHPGQIVVAPTGATSIPWLYNLQLPL

SEQ ID NO: 56810 - protein, 48 aa, Zea mays
  Coding DNA Sequence Number=SeqID_15031
MTSSYESYPIPEKKGSIRCLTQLFAKDITLDEKQELDEALQREMYNTD

SEQ ID NO: 56811 - protein, 244 aa, Zea mays
  Coding DNA Sequence Number=SeqID_15032
  Subcellular localization annotation: CTP_CleavageSite=46; ConfidenceScore=5.05e-01
MTKTEGPNTGSFVKKAQLMMMSGMHHGFLSQPALHLPLYSADRTAPARAQPSGFPRTLLPALAWLAARPSPLLPPSSQRALLLFPSREVPWRAGSLLGSFLSAPCSPSTLYRSPARRHGTSLSQRKLLDAASSRSWSSPVVAVVEAPCARASPYSSPAAAPCSPEFDLRPAHHPYARSASSCGFLLAWPRPASMVACPSSSLSACRVRSSLARLLPYWCPPSRSLLSPLGKPPSISRAVHRARL

SEQ ID NO: 56812 - protein, 247 aa, Zea mays
  Coding DNA Sequence Number=SeqID_15033
VYVILGMVWARSGGEEVPELEDSSANAECHGGPSEVCVGGDFVQWRALGQGLCQELLSSLAEKEDIEGVPGLPPSIKCSHFYIVFPWFKLKKGDKVKLRPMPFLNNWMVLSPAFAVELWGWDVFAFVREVEAEAVKIIGNYSAKTELTRSWDIRGLNVRLNRVFELNGLQYGPYPKEGSVNVGDDRGKKMTIWADKGCLKGKTVVARLEKEDWGESDRKGSLRVLAEEEEGPALAGGSLSRREGAVS

SEQ ID NO: 56813 - protein, 81 aa, Zea mays
  Coding DNA Sequence Number=SeqID_15034
MLLLKNVISLNPDAEEVSQQRLLSLVAERLVPTLLGRHCVNVMFGKCNEHTHNIVVVTALAVIHGVAGHLVAASQNQNQIE

SEQ ID NO: 56814 - protein, 135 aa, Zea mays
  Coding DNA Sequence Number=SeqID_15035
MRSVGVAIGPRLLLGEDWASGEPKSRATASIARHALPISLAFDTSQPPVISSSSPVSYPSILPLGDVLYASVTVSPNCQPARCAAYAEAMLHAAAVPLEPAIVFSLAYTLPARPPRLLLAISCTPLLLTTATVLC

SEQ ID NO: 56815 - protein, 214 aa, Zea mays
  Coding DNA Sequence Number=SeqID_15036
  Gene Ontology: Mol. function=catalytic activity; Biological process =cellular metabolic process
  Homolog annotation: Hit_ID=Q653W0; Match level="QueryCoverage=52%, HitCoverage=28%, E-value=7e-36, Identity=71%"; Hit description =Putative dihydroflavonol-4-reductase DFR1
MPIERLRGGRAFARRLSARSSLPAAAGEAGAAAIAREWDRQYRKSRVRPPERGRHPYPALGYQLALAAPSLFEEISAANSQPRDRSRPAGAEMGSVGVGCGSPDEEQQTEGSGPLPPPAVCVTGSTGYVGSWLVRTLLRRGYRVHATARDTGKALQVLAVVEEGRDRLRVFRADMGEEGSFDAAVTGCVALFHVAASMDLHVSPAHQDNLGESL

SEQ ID NO: 56816 - protein, 194 aa, Zea mays
  Coding DNA Sequence Number=SeqID_15037
MGGNIWRIMRYGFAVLKQDVPTTSDEQNILFNDQAMNVLYDALAITEFNRIKTHNGSWNLENIDGRLGLDTPDIDFSYKFLKSLLEKYDTIVTMLVRSDLNNTSLTKVSGKILTQEIFQKSQAKEIRLAKKVKGESIALKAKASKVIEKEESDDEESGSESDEEMPLFCEKVQQVHKEERTTKERSIFKKEHFQ

SEQ ID NO: 56817 - protein, 97 aa, Zea mays
  Coding DNA Sequence Number=SeqID_15038
MTASARPGERATSFVVACSLLSRFVRQNDAAPSQLGLGIKGEVEQQRTPATINLLPGADGEETERRKETMELFPQSAGFGVKDPTAAPRCVLLLHIM

SEQ ID NO: 56818 - protein, 112 aa, Zea mays
  Coding DNA Sequence Number=SeqID_15039
  Homolog annotation: Hit_ID=Q6K3D4; Match level="QueryCoverage=71%, HitCoverage=6%, E-value=2e-22, Identity=67%"; Hit description =Putative PKG-Ib
MAEGVVAGVAAPVAVARAVAGGAGDPGAGPREWKMCIYAADCSEISLVQVRGSGMLKDSACHELDKIRRLKRPYIKRVQDRHKEVQVFEESDLMKSLSKSTCVREVMSTCAD

SEQ ID NO: 56819 - protein, 372 aa, Zea mays
  Coding DNA Sequence Number=SeqID_15040
  Gene Ontology: Mol. function=oxidoreductase activity, acting on the CH-OH group of donors, NAD or NADP as acceptor; Biological process=L- serine biosynthetic process
  Homolog annotation: Hit_ID=Q8LGJ6; Match level="QueryCoverage=42%, HitCoverage=31%, E-value=5e-39, Identity=51%"; Hit description =Phosphoglycerate dehydrogenase-like protein
  Pfam annotation: Domain name=2-Hacid_dh_C; Domain location=147-305; Score=38.1; E_value=4.7e-12; Accession=PF02826.9; Description=D -isomer specific 2-hydroxyacid dehydr
MAPSFSSDSSLALALENQTRLLLIELDKRFQAFDNKWDSRVWALHSFDNDDSVAGPVNALADIELAARPYPGAASSPSTLTRRSTFLSPWPSFCAATTGGLCDRCAEKWVHGHKCPSTVQLQAIEEVWNMLSENEVSELVVKYSEQLMLALSTVALIGANTATTLRLWGTVQQHKLLILIRGFLWGIRSEEGALELTGYDPYASTARDRAMGVKIVSMEESLTSVDFISLHMLLTPAINKMLNDEAFAKMKKWLVRGVIDEDALVRPLDSGIVAHTALDVFTKEPSVPDNKLGLHENVTVTSHLGASTVGAQEGVAIEIAEAVRACTFCCVCRKLGRLAVQLVAGGTVQDLRTHAASLIASRSWMCSDSAST

SEQ ID NO: 56820 - protein, 64 aa, Zea mays
  Coding DNA Sequence Number=SeqID_15041
  Gene Ontology: Mol. function=oxidoreductase activity, acting on NADH or NADPH, quinone or similar compound as acceptor; Cellular component=integral to membrane; Biological process=electron transport
  Homolog annotation: Hit_ID=P92432; Match level="QueryCoverage=61%, HitCoverage=11%, E-value=4e-13, Identity=92%"; Hit description =NAD(P)H-quinone oxidoreductase subunit 1, chloroplast (EC 1.6.5.-) (NAD(P)H dehydrogenase subunit 1)
MKLDFRENFGEREISTSIQQRIGPEYAGPLGLLQAIADGTKVLLKEDILPFEDKRFDSTMPQLL

SEQ ID NO: 56821 - protein, 86 aa, Zea mays
  Coding DNA Sequence Number=SeqID_15042
MALRIDDRDTGARTSGENASVWLAMPRQIRMWLRLAGIALCASGTVRRCGNATLRRDLRRDQDCAAALGSRLGKKSRGRWISSGRR

SEQ ID NO: 56822 - protein, 328 aa, Zea mays
  Coding DNA Sequence Number=SeqID_15043
  Gene Ontology: Mol. function=sterol 24-C-methyltransferase activity; Cellular component=mitochondrial outer membrane; Biological process =steroid biosynthetic process
  Homolog annotation: Hit_ID=Q6ZIX2; Match level="QueryCoverage=53%, HitCoverage=51%, E-value=7e-84, Identity=83%"; Hit description =Cycloartenol-C-24-methyltransferase 1
  Pfam annotation: Domain name=Methyltransf_11; Domain location=1-67; Score=36.0; E_value=1.3e-07; Accession=PF08241.2; Description =Methyltransferase domain
  Pfam annotation: Domain name=Sterol_MT_C; Domain location=76-200; Score=226.7; E_value=5.3e-65; Accession=PF08498.1; Description =Sterol methyltransferase C-terminal
  Pfam module annotation: Pfam domain module=Methyltransf_11::Sterol_MT_ C; Domain location=1-67::76-200
MEFFELLVKLKGNTYVPVMQADFMKMPFDDNTFDAVYAIEATCHAPDPVGCYKEIYRVLKPGQCFAVYEWCITDHYDPNNATHKRIKDEIELGNGLPDIRSTRQCLQAVKDAGFEVVWDKDLAEDSPLPWYLPLDPSRFSLSSFRLTSVGRMITRTMVKALEYVGLAPQGSERVSNFLEKAAEGLVEGGKEDSATVVVVRLRRRLSVIVGFGSSAAPSGSCSRTTQVWCHAGARRIAHRSFNHSRGLLRCVGNRVSAFVTALENKSPTLAPTSGTGTLQPLDPNQDVLSLREARSQKRKAASPTPPDDDLDQEIQNLGNPSAAGSTQE

SEQ ID NO: 56823 - protein, 192 aa, Zea mays
  Coding DNA Sequence Number=SeqID_15044
  Homolog annotation: Hit_ID=Q946U8; Match level="QueryCoverage=68%, HitCoverage=38%, E-value=2e-39, Identity=78%"; Hit description=Long cell-linked locus protein
MNLVYLIIAFGTFSTISTSSLLSGQRNGGGTEEAVVQDAGVAATAAGGAVGAEGRRGAQPAPAPHAPPPGPRPRHGLAGLGGTRGDRLRCGEHEYSIRARAALVFQFRTPSARVMRLIPCIAPAVPDTPGLYGDDRYFFSTAAARVIQPWPAGHIPVLPLLPIKQTKPTPPIFSSTAHAAKTNPESLPPEHK

SEQ ID NO: 56824 - protein, 89 aa, Zea mays
  Coding DNA Sequence Number=SeqID_15045
MNTRTPRIDEIDSNRDWRREGKKNRELAIFYESLSREQVSILKEPREKRLQKGGVEIEVLVRFEPKPIPVYSNPARVSGGLRLDPQTLV

SEQ ID NO: 56825 - protein, 95 aa, Zea mays
  Coding DNA Sequence Number=SeqID_15046
MGGSRTSAWAYWIPGKGGPKPLHVPIVKAVHDYILGPGPYGTVLDTYVCHPDLQPGLETNYNEYGVRKRVLLAMSCSINADDFWELTQKIVSKRT

SEQ ID NO: 56826 - protein, 52 aa, Zea mays
  Coding DNA Sequence Number=SeqID_15047
MYPLFTMDGVHYLVKHNNEDVEMVEKVPKAIIRYTKFIAGLSEEKEVSDSRA

SEQ ID NO: 56827 - protein, 55 aa, Zea mays
  Coding DNA Sequence Number=SeqID_15048
MANNMKLVSTWFRNSYLRVISLIGKINRIGDTIVNQRSHDTEVGGFRSFDLKLDQ

SEQ ID NO: 56828 - protein, 114 aa, Zea mays
  Coding DNA Sequence Number=SeqID_15049
  Subcellular localization annotation: CTP_CleavageSite=37; ConfidenceScore=5.42e-01
MTEAFRAPIRHGRVSLSQVNHPSAQSTLERWRRAKSAAAAKSSRPKVPRRCNGAAGCVSRGNRERGSCGAIHFMCRGRSAAESAAPTMTEHARFARRRMRKTVQRLTQGTDKAA

SEQ ID NO: 56829 - protein, 95 aa, Zea mays
  Coding DNA Sequence Number=SeqID_15050
MQESLAGPPSQQNPPEGLPTLTTPLLPLPLSGLKLWKVQGLRCSIPKTQKTPGMDGGFYSSEPRGFLRKMALRSGIGHDGPLDQTWMYQIESKSL

SEQ ID NO: 56830 - protein, 47 aa, Zea mays
  Coding DNA Sequence Number=SeqID_15051
MGSLVMVRRRGLNPESSAFNQGTTSAECKTGILAELTVKSSSGLWHD

SEQ ID NO: 56831 - protein, 281 aa, Zea mays
  Coding DNA Sequence Number=SeqID_15052
  Subcellular localization annotation: CTP_CleavageSite=32; ConfidenceScore=5.00e-01
MAQVARSSTFSIAMALCVLPSSPFFDFLPWPSAEPMGQGHTMSVYISEIFLKSQVKTFGCYTRTHVTAACGGGNSRITKSVGFIVKSVRRPTSPIAPLLLLCAPARDVNVTSCPSIACADEGPVPPKSEDGGRRPSTRAASSSTVASKALPRGRRVAGQGRHSGIIVRVLVRQDRAGAAARSHRGDLRRDRLHQDEELWQQGGAKHGHCDKCCSPLEDDVEEAAAGTADVAGDEEWAAESEPGVLMTLWSRGDGSNLWQNRPNYFSLSAVTYLNRNNPSVP

SEQ ID NO: 56832 - protein, 66 aa, Zea mays
  Coding DNA Sequence Number=SeqID_15053
MKAKRDDQLLNIEKRKKKNKMQDLKPKNNYYRIFNLSSHLDPFEDPLVCGKAQGISMELPDRELGA

SEQ ID NO: 56833 - protein, 105 aa, Zea mays
  Coding DNA Sequence Number=SeqID_15054
MDPYPYPPGIRRRGSGLLPAGVLGEGEGAGLGPGAWPPRRRLGAWTGACGWGLGPGRRGAAWEPGRGLPQCRRPRGALGPGLLASTSREGWDEDDWDSGSGGCGG

SEQ ID NO: 56834 - protein, 166 aa, Zea mays
  Coding DNA Sequence Number=SeqID_15055
MSGAPEDSNFELVTFENFRKRLRYNSPDYPVYTGHVRCSKEEWPPELTSLGNLLKLLRYNSPDCPVYTGLSRCNSGANGYFGANGYLRGIKCARCACRGQTRPYWRHRTILQCMSGAPPDIQAGPRRQSSKRSTPNGLSGDVAVAPDMSGVHRTVRCAIEQTAPPN

SEQ ID NO: 56835 - protein, 800 aa, Zea mays
  Coding DNA Sequence Number=SeqID_15056
  Homolog annotation: Hit_ID=Q67W96; Match level="QueryCoverage=47%, HitCoverage=99%, E-value=1e-115, Identity=60%"; Hit description =Kelch repeat containing F-box protein-like
  Pfam annotation: Domain name=F-box; Domain location=154-201; Score =24.6; E_value=0.00035; Accession=PF00646.23; Description=F-box domain
  Pfam annotation: Domain name=Kelch_1; Domain location=252-301; Score =17.8; E_value=0.037; Accession=PF01344.15; Description=Kelch motif
  Pfam annotation: Domain name=Kelch_1; Domain location=303-342; Score =14.2; E_value=0.096; Accession=PF01344.15; Description=Kelch motif
  Pfam annotation: Domain name=Kelch_1; Domain location=345-391; Score =5.5; E_value=0.92; Accession=PF01344.15; Description=Kelch motif
  Pfam annotation: Domain name=Kelch_2; Domain location=251-301; Score =20.2; E_value=0.0072; Accession=PF07646.5; Description=Kelch motif
  Pfam annotation: Domain name=Kelch_2; Domain location=303-342; Score =7.8; E_value=3.5; Accession=PF07646.5; Description=Kelch motif
  Pfam module annotation: Pfam domain module=F-box::Kelch_1::Kelch _1::Kelch_1::Kelch_2::Kelch_2; Domain location=154-201::252-301::303 -342::345-391::251-301::303-342
MRGGSMALLWCQILDWIEWFTVFWSGTVSDLEPSRQPNTGTPHPGDDMATMVTPSAMEIEEGRSGGRQLRKAARLGTCPESTHLYKFVPTPLQVPFLITKPNHRAPPHPQRGEANRIKFDRRIAPLGPATMSFSSMSKQQVLDAGDGEGEEVMELIPGLPEEVAEKCLLHLPFLYHRLFRTVSSTWNRFLTDALAKPLLFPHAAGAGTAATGSVPFLFALAFDPMSRRLQCQALDRFSRKWLLLPPVPGGAAAGSFAVVGLPRRGQIYVIGGVEEGGDKAVTSVAVYSAARNGWEEAAAMRTPRGYMAAGEVGGRVVVAGEDGEAEVFDPEAGRWSPAAPRRGAAVARYDAAAAGGKLYVTEGWAWPFERAPRGAVYDAAADSWCEMARGMREGWTGSCAVAGGRMYIVAEYGEWRLKRYDEARDEWRMVAGTGVPPEVRRPHVVAGELGEVAGGRRRIYVVGAGLDVAVGTVSAAASAAAAVPGVEDEVVEWEVVKGSAEFAGMAPCNAQMTQKKPDAQTQLHRLASRNVVVWWTILIVFIAEKSLSTLAVATAAKPDPRRHGKLRFARPHGSDSGSASEDGEQRSARPQGSDSGSAPEDDELRSARPQGSDLGSAPEDGELRSARPQGSDSGSAPEDGELRSSRPQGSDSGSAPAPPDPRARTRAQPRKDGEPRSARPQGSDSGSAPEDDELPLRPTLGLGIGISPEKTTNSASPDPRGSDSALASADGLRLARPGGSDLTSASEDRLDLDLGGGSTSPNPGHGPTTSTGGAIITLPQADSGYGEQDRRPVWLAPPDK

SEQ ID NO: 56836 - protein, 124 aa, Zea mays
  Coding DNA Sequence Number=SeqID_15057
MAVSALEAAAGSRASERICANSVRFAGDVMRRGASGPLRVGRAKHTKREIVTSDKPEASGRKNDEWTPSKEADDKHKEESASSIKSHRKGDKKKNKMKKVVYYETDSSSPSTSGVESTISKRQE

SEQ ID NO: 56837 - protein, 552 aa, Zea mays
  Coding DNA Sequence Number=SeqID_15058
  Gene Ontology: Mol. function=oxidoreductase activity, acting on the CH-OH group of donors, NAD or NADP as acceptor; Cellular component =chloroplast; Biological process=L-serine biosynthetic process
  Homolog annotation: Hit_ID=Q8LGJ6; Match level="QueryCoverage=91%, HitCoverage=89%, E-value=1e-165, Identity=58%"; Hit description =Phosphoglycerate dehydrogenase-like protein
  Pfam annotation: Domain name=2-Hacid_dh; Domain location=49-321; Score=106.8; E_value=6.2e-29; Accession=PF00389.20; Description=D -isomer specific 2-hydroxyacid dehydr
  Pfam annotation: Domain name=2-Hacid_dh_C; Domain location=151-344; Score=182.1; E_value=1.4e-51; Accession=PF02826.9; Description=D -isomer specific 2-hydroxyacid dehydr
  Pfam annotation: Domain name=ACT; Domain location=479-543; Score =30.9; E_value=4.5e-06; Accession=PF01842.15; Description=ACT domain
  Pfam annotation: Domain name=AdoHcyase_NAD; Domain location=160-319; Score=-37.7; E_value=0.077; Accession=PF00670.12; Description=S -adenosyl-L-homocysteine hydrolase, NAD binding domain
  Pfam annotation: Domain name=AlaDh_PNT_C; Domain location=170-310; Score=-61.7; E_value=0.083; Accession=PF01262.12; Description =Alanine dehydrogenasePNT, C-terminal domain
  Pfam annotation: Domain name=IlvN; Domain location=182-314; Score= -73.9; E_value=0.004; Accession=PF07991.2; Description=Acetohydroxy acid isomeroreductase, c
  Pfam module annotation: Pfam domain module=2-Hacid_dh::2-Hacid_dh _C::ACT::AdoHcyase_NAD::AlaDh_PNT_C::IlvN; Domain location=49 -321::151-344::479-543::160-319::170-310::182-314
  Subcellular localization annotation: CTP_CleavageSite=40; ConfidenceScore=5.39e-01
MALATPLRLRRHLLLPAGPSPATHRALSLRRGRLLPASLSAAAGGRPTVLVTETLGSAGLDLLRAFANVDCSYELTAEELRAKVSLVDALVVRSGTQVTREVFEAARGRLRVVGRAGVGIDNVDLQAATEAGCLVVNAPTANTVAAAEHAVALLAAVARNIAPADASLKAGKWQRGKYVGVTLVGKTLAVMGFGKVGPEVARRARGLGMDVVAHDPYAAADRARAVGVDLVSFDEAISTADFISLHMPLTPSTAKLFNDETFARMRKGVRIINVSRGGVVDEEALLRALDNGTVSQEGVALEIAEAVIGALRGDLAATAVNAPMVPAEVLSELSPYVVLAEKLGRLVVQLVAVGSGIKGVRVVYSSARDPDDLDTRLLRAMVTKGIVEPISSAFVNIVNADYVAKQRGLRIVEERVFLDGPPEVPLDSIQVHLANVESKFAGALSDAGHICVEGKVRDGGASHLTLVGSLSVDVSLEGNLILCGQLDHPGIIGRVGSILGKMNVNVSFMSVSRTAPGKQAIMAIGVDEEPGKEALKLIGDTPSVEEFVFLKL

SEQ ID NO: 56838 - protein, 147 aa, Zea mays
  Coding DNA Sequence Number=SeqID_15059
MAGGKGSNGKRGKNDQGEKRKHYSTPPSEDFSDSEFPEEQFSSKGEESLSLLPLSPSSEGLGLSRALCGGEGLHPDSEEEDSEEDEGGSGEDQSGYDSSDEGGNGGVNGGGSRSSGSNGGSNDKGIGGKGGSGDKGSSNAGGKAPPS

SEQ ID NO: 56839 - protein, 208 aa, Zea mays
  Coding DNA Sequence Number=SeqID_15060
MTAQVEPNPDDNLVDASLEDVVEGGNGVKMARYVVEEEDDEEEEVLSLVRRKRRSRTHSNTSSLAAAAKMMDICGLTMSTIEGVLEDAIPQDLLLELPEIRAIDIHIDHLNVVSVLVHHGASAPILEITLAPKGPLAPKGALDPEGAPAHKGASVGSPSAASMDVHVGSLMPRTNDVGATSSIMPIEPSEPTTLELSGSGAEIPNGYF

SEQ ID NO: 56840 - protein, 151 aa, Zea mays
  Coding DNA Sequence Number=SeqID_15061
  Subcellular localization annotation: CTP_CleavageSite=26; ConfidenceScore=5.18e-01
MKAAGFPPLSRRSPAASLSPLRARPRARPIWAGARGDTHSSAQGPPGLETPTEGEHEEQQGEGGGGCDGSSSSPKQAVNPGEEEMVESGPVTATPNAACGFQESSYGVVEVELVLPNSPFVSPTKEEASYADAVTAAAARNGSRSSPRRVD

SEQ ID NO: 56841 - protein, 262 aa, Zea mays
  Coding DNA Sequence Number=SeqID_15062
  Homolog annotation: Hit_ID=Q949F8; Match level="QueryCoverage=64%, HitCoverage=80%, E-value=2e-54, Identity=68%"; Hit description=PREG -like protein
  Pfam annotation: Domain name=Cyclin; Domain location=18-157; Score =201.5; E_value=2e-57; Accession=PF08613.1; Description=Cyclin
  Pfam annotation: Domain name=Cyclin_N; Domain location=33-158; Score=- 19.1; E_value=0.0069; Accession=PF00134.13; Description=Cyclin, N -terminal domain
  Pfam module annotation: Pfam domain module=Cyclin::Cyclin_N; Domain location=18-157::33-158
MAECEELVESGGAEEDMPRVVAALAGILERVANRNDAAAAAEVSAVAPASAFRATTKPGISVRAYMARIARFAGCSPACYVVAYVYLDRLLRRGRLLALAVDSYSVHRLLITAVLAAVKFMDDICYNNAYFAKVGGISLVEMNYLEVDFLFGVGFDLNVAPETFGDYCAVLRSELLSSSVVPAATVDCVYSAGVFGDFLNRVRVRSGSEANFWAILSFRMAQFGQTCPAISPLGKGFVFVRWEMNAGVVSDGKRLGLDLETL

SEQ ID NO: 56842 - protein, 246 aa, Zea mays
  Coding DNA Sequence Number=SeqID_15063
  Subcellular localization annotation: CTP_CleavageSite=29; ConfidenceScore=5.03e-01
MARIPSSPTQARARRRRVHNRALPATTPSCAVEPHEPFPTRLFEVQNKVNRMGEVLPRDSEPVSQTTVRSASATQKNSDEQFTGLLRTSSPDFPRSRSSSPGKSARPLIASGAAVQAHGHGGGRFAPYGRLGNGGWGNATKEKGEDMARPCSHYLRGEGNRGSEFGEVRHARGGEDRADQWLRAMSGLRHAGPDRQAHIPRMRAINARLHRAIVLKTREIARLGYPMGICCDYVVLKVHRKFAIFG

SEQ ID NO: 56843 - protein, 193 aa, Zea mays
  Coding DNA Sequence Number=SeqID_15064
  Gene Ontology: Mol. function=transferase activity; Cellular component= membrane; Biological process=metabolic process
  Homolog annotation: Hit_ID=O49890; Match level="QueryCoverage=85%, HitCoverage=28%, E-value=7e-90, Identity=95%"; Hit description =Alkaline/neutral invertase
  Pfam annotation: Domain name=Invertase_neut; Domain location=5-193; Score=24.2; E_value=7.8e-17; Accession=PF04853.3; Description=Plant neutral invertase
MEPGRSSTGAAKPRARMSTVSQKQGAQGALFYSALLCAREMLTQEDGSADLIRALNNRLIALSFHIREYYWLDMQKLNEIYRYKTEEYSYDAVNKFNIYPDQISPWLVEWIPPKGGYFIGNLQPAHMDFRFFSLGNLWSIVSSLATTHQSHAILDLIESKWSDLVAEMPLKICYPALENQEWKIITGSDPKNT

SEQ ID NO: 56844 - protein, 128 aa, Zea mays
  Coding DNA Sequence Number=SeqID_15065
  Subcellular localization annotation: CTP_CleavageSite=50; ConfidenceScore=5.06e-01
MGAVGAQARHPEGTRARRGARRGAQARSRRVARAEDRDRSRGRRRGEGVRVGRVEGGRVGGASRAKAARPDGEERGRTARGADGDGAAGRTRQSPLCRLPEKKHSTKRLALGKGPDSGSEGNKSTDKA

SEQ ID NO: 56845 - protein, 234 aa, Zea mays
  Coding DNA Sequence Number=SeqID_15066
  Gene Ontology: Biological process=electron transport
  Homolog annotation: Hit_ID=Q6YXT5; Match level="QueryCoverage=88%, HitCoverage=34%, E-value=4e-69, Identity=65%"; Hit description =Putative oxidase-like
  Pfam annotation: Domain name=FAD_binding_4; Domain location=61-208; Score=59.9; E_value=8.5e-15; Accession=PF01565.13; Description=FAD binding domain
MGVLFLIACLLVPAAIYLLPANNNTPPWEPITCTGGNANGESNCTVTNSYGSFPDRTVCRAAAAVYPQTEKELVAAVAAVAAAKGKAKVATRHSHSFTKLACPGGRDGTVISTRWLNRTVRVDVGRRLLTVEGGMVLRDLVRVAAEAGLALPHSPYWSGLTVGGLLATGAHGSSLWGKGSAVHEYVVGMRIVTPAPASQGFAVVRELGADHPDLDATKVSLGVLGVISQITNYS

SEQ ID NO: 56846 - protein, 333 aa, Zea mays
  Coding DNA Sequence Number=SeqID_15067
  Gene Ontology: Biological process=electron transport
  Homolog annotation: Hit_ID=Q6YXT5; Match level="QueryCoverage=98%, HitCoverage=55%, E-value=1e-125, Identity=64%"; Hit description =Putative oxidase-like
MAETVSVWGHLHEFGDMTWLPYQRKVVYRQDDRVDVATGGDGHNDFLGFRFYSKPGVMAARLLDTWLEEKDVDTARCLMARLPMWKVQREAYGFSNDGVSFTGYPVVGFQHRIQASGSCLDDGGGGLLLSACTWDPRLRGGLFYSSGFSVGLSKVAAFVADVQRLRDINPRAFCGLEGKLGVFMRYVKASSAFLGKPEDSVDLDIVYYRSHVEGTLRRHADVVDEMEQMALHKYGAIPHWGKNRNFAFDGAIDKYPRAHEFLRVKNTYDPDGIFSSEWSDQVLGVKGSPSIVRDGCAIEGLCVCSGDSHCMPDKGYFCRPGKVYKEARVCVRV

SEQ ID NO: 56847 - protein, 116 aa, Zea mays
  Coding DNA Sequence Number=SeqID_15068
  Homolog annotation: Hit_ID=Q69KL6; Match level="QueryCoverage=25%, HitCoverage=9%, E-value=1e-07, Identity=90%"; Hit description =Putative UDP-glucuronic acid/UDP-N-acetylgalactosamine dual transporter
MGADAGYGSPPTRLAGHACLHGRKHYSSSLFVLEAHDESSTTTSSSLEEMEHAEPCSAALETCGHGQLRCYQAAVEPQFICTATGVLIATLGDFSFDLYGYCMALTSVFLVGAILF

SEQ ID NO: 56848 - protein, 231 aa, Zea mays
  Coding DNA Sequence Number=SeqID_15069
MVVPKAKMPIIPEEIPLEETEEVKIEDVIALRAQKIVPLKSLLESKEEEEELIAQRGLGETTGSALAPKSVMLPDADTAMPKSLKRIEVKGLKEGPFDQELGGRKRKVHHAARKVMGAKQLAEAIGYNEQIGYPSGSTIFRERSDDYLYCCSDNLEKEAMCKEKSKLEETMGRKVSKLDASNAEKDKRITLLEDELKRATYEDEMTKTMQASAKAVVCLSGAQVKINDLKD

SEQ ID NO: 56849 - protein, 82 aa, Zea mays
  Coding DNA Sequence Number=SeqID_15070
MALSSNIGLPIVGHSDTYIFVGGDAYQLFCALGAVFITSRMADDARKNHTRTGVPAPGADPRCCYHVGDRSTPLLPHLRRQQ

SEQ ID NO: 56850 - protein, 74 aa, Zea mays
  Coding DNA Sequence Number=SeqID_15071
MVHVGVAWDGNGTAAGGPTVLETEKIELEKRWLEQPKSAQSGCTGLFGGAPDSVRGQAGLSKVAALGTSTAVYG

SEQ ID NO: 56851 - protein, 295 aa, Zea mays
  Coding DNA Sequence Number=SeqID_15072
  Gene Ontology: Mol. function=peptidase activity; Cellular component =membrane
  Homolog annotation: Hit_ID=Q9M582; Match level="QueryCoverage=99%, HitCoverage=100%, E-value=1e-142, Identity=90%"; Hit description =Hypersensitive-induced response protein
  Pfam annotation: Domain name=Band_7; Domain location=6-201; Score =133.7; E_value=5.2e-37; Accession=PF01145.15; Description=SPFH domain  Band 7 family
MGNLCCCVQVDQSTVAIREQFGKFDSVLEPGCHCMPWFAGKRVAGQLTLRLQQLDVRCETKTKLLTPGFVQDNVFVNVVASIQYRALADKASDAFYKLSNTRSQIQAYVFDVIRASVPKLHLDDAFEQKDEIARAVEEELEKAMSAYGFEIVQTLIVDIEPDEHVKRAMNEINAAARLRAAANEKAEAEKIVQIKRAEGEAEAKYLSGLGIARQRQAIVDGLRDSVLGFSVNVPGTTAKDVMDMVLITQYFDTMKEIGASSKASSVFIPHGPGAVRDIATQIRDGLLQGSSVAKH

SEQ ID NO: 56852 - protein, 115 aa, Zea mays
  Coding DNA Sequence Number=SeqID_15073
MDRPGTTRNSNNMGLFRLETDRARRPECRPIGPSHAHIGVGVMACHCDPPPCRAKASPCHRGQCPRSPWGGEQLRRWDPIQATMPLPKQKLWKRTEERQLAGEVMMRPPSSVSPR

SEQ ID NO: 56853 - protein, 288 aa, Zea mays
  Coding DNA Sequence Number=SeqID_15074
  Gene Ontology: Mol. function=hydrolase activity; Biological process =aromatic compound metabolic process
  Homolog annotation: Hit_ID=Q8L562; Match level="QueryCoverage=78%, HitCoverage=76%, E-value=1e-63, Identity=54%"; Hit description =Hydrolase-like
  Pfam annotation: Domain name=Abhydrolase_1; Domain location=44-260; Score=60.7; E_value=4.8e-15; Accession=PF00561.10; Description =alphabeta hydrolase fold
MRWYANAKEVGGGGGGAGTVVLAHGYGANQTLWDKLLPALSQHHRVILFDWDFTGEREEAAERYTFGRFADDLIALMDDKGVRGAVVVGHSMSAMVACIASARRPDLFAHLVLLCASPRYLDSPSEGYVGGFDRASIDAMLAAMESDLGAWVRGFVPNAAGADPSATAELEQSFLSMHPRVALEVARMIFLCDQRGALDAVAAPCTVVQVSDDFAAAPAVAEYMRGRMKRAAEVEVVVIDSVGHFPQLVAPQQLLAVLKRVLQRAAAANEERAAAAEEEADGGIDVTA

SEQ ID NO: 56854 - protein, 832 aa, Zea mays
  Coding DNA Sequence Number=SeqID_15075
  Gene Ontology: Mol. function=protein kinase activity; Cellular component=integral to membrane; Biological process=protein amino acid phosphorylation
  Homolog annotation: Hit_ID=Q5ZBB1; Match level="QueryCoverage=83%, HitCoverage=89%, E-value=1e-167, Identity=66%"; Hit description=Dual- specific kinase DSK1-like
  Pfam annotation: Domain name=Pkinase; Domain location=524-771; Score =56.6; E_value=8e-14; Accession=PF00069.15; Description=Protein kinase domain
  Pfam annotation: Domain name=Pkinase_Tyr; Domain location=524-771; Score=68.9; E_value=1.6e-17; Accession=PF07714.7; Description =Protein tyrosine kinase
  Pfam module annotation: Pfam domain module=Pkinase::Pkinase_Tyr; Domain location=524-771::524-771
  Subcellular localization annotation: CTP_CleavageSite=11; ConfidenceScore=5.19e-01
MSLNSLHRGRSASIPSSRPVASLLLIFKFLLGFHHFASCLLYVSPSAAKEARPPPLLNCTALSSPLHQRLPGIQVQSTHREDKPRAAGGCGVNRLPGPRFTSEMTDAGAGSGLQTPDQVPRGAGAGAVVVVALRAAAREISKTAAVWALTHVVQHGDSILLLVLIPPPSSADQGRAVSANRRRRFDDLHRCTGAGKSGRKFWGFPFFAGSCASGHKAVLNQRSDVAELCSQMVRKLRDVYDPNNKIDVKVKILSGSPPGAVAKESKRVQAAWVVLDKELKHEEKRCMEELQCNIVAMKRSQPKVLRLNLVGSHSHEREESSRPPPPPAPSPPPPEPSTSPSPSRVPSSATPSSSPESEEAPFDTSTTDVGASCVSSSDSDTNSFSTNKGTTTTTTTAAAKDSVQRSDADSESEASSLEPWMATILLQTPADRLVGNRPRPRRTPTADSLLEKIAKLDLLTEISAIRSRSDLNFRGNVRDAVALDRSAPPGPPPLCSICQHKAPVFGKPPRWFSYAELEVATGGFSRANFLAEGGFGSVHRGVLPDGRAVAVKQHRLASSQGDVEFCSEVEVLSCAQHRNVVMLIGFCVENKRRLLVYEYICNGSLDTHLYDRNKETLEWAARHKIAVGAARGLRYLHEECRVGDFGLARWQPDGDMGVETRVIGTFGYLAPEYAQSGQITEKADVYSFGVVLVELVTGRKAVDINRPKGQQFLTEWARPLLEECAMDELLDPRLGGRFCENEVYCMVHAANLCIRRDPHLRPRMSHVLRILEGGGGDMVVDSAGSRSWRMQQHQRWQEQSSPAAQRDSSQRGQETAGSPWSRERRQNLCHRY

SEQ ID NO: 56855 - protein, 135 aa, Zea mays
  Coding DNA Sequence Number=SeqID_15076
ELRLKLFTLEISRKTARYNSPDCPVCTGHVRCSKEARPPELASLGFARQPLRYNSPDCPVYTGLSGVHRTVRCASGATAPCGANGSLRCIKCARSARRSQNRPCRGTGLSGVHRTVRCAIEQTPPANGHFWWLGL

SEQ ID NO: 56856 - protein, 117 aa, Zea mays
  Coding DNA Sequence Number=SeqID_15077
  Gene Ontology: Cellular component=integral to membrane
  Homolog annotation: Hit_ID=Q10PI5; Match level="QueryCoverage=51%, HitCoverage=15%, E-value=1e-25, Identity=83%"; Hit description =Haemolysin-III related family protein, expressed
MAATAAEEMERMVEAEWEEGKQGMRKRKRYGLVEYRALPAYLRDNEYIHRHYRCEWPLPQVLLSAFSIHNETLNVWTVTVGDGRGVASIPGPQPGVVHGPNGGRDTNVAAVLAAQER

SEQ ID NO: 56857 - protein, 297 aa, Zea mays
  Coding DNA Sequence Number=SeqID_15078
  Gene Ontology: Mol. function=nucleic acid binding; Cellular component= ribonucleoprotein complex; Biological process=cell wall catabolic process
  Homolog annotation: Hit_ID=Q1SH80; Match level="QueryCoverage=98%, HitCoverage=84%, E-value=1e-102, Identity=59%"; Hit description=RNA -binding region RNP-1
  Pfam annotation: Domain name=RRM_1; Domain location=207-279; Score =52.7; E_value=1.2e-12; Accession=PF00076.12; Description=RNA recognition motif. (a.k.a. RRM, RBD, or
  Pfam annotation: Domain name=RRM_1; Domain location=5-52; Score=3.2; E_value=0.072; Accession=PF00076.12; Description=RNA recognition motif. (a.k.a. RRM, RBD, or
  Pfam annotation: Domain name=RRM_1; Domain location=72-141; Score =54.6; E_value=3.3e-13; Accession=PF00076.12; Description=RNA recognition motif. (a.k.a. RRM, RBD, or
  Pfam module annotation: Pfam domain module=RRM_1::RRM_1::RRM_1; Domain location=207-279::5-52::72-141
MATKLVVLGIPWDVDTEGLREYMAKFGPLDDCVVMKNVLDCEHVLGSRTLEVKVATPKEEMKSQGSKKATRIFVARIPQSVDESMFRRHFEAFGEILDLYMPKEHGSKGHRGIGFITFQSAESVDNIMQESHELDGTTVVVDRATPKDEDVRYPPSRPSQGGYGAYNAYISAATRYATLGAPTLYDHPGSAYGRGYYGPSQAVGKKIFVGRLPQEANTDDLRQYFGRFGRIVDAYIPKDPKRSGHRGFGFVTFADDDTAAPLEIDSAAGGYIDPMHLYAAYGFMRSFAGFCGRLDYD

SEQ ID NO: 56858 - protein, 49 aa, Zea mays
  Coding DNA Sequence Number=SeqID_15079
MVGLQVAMRRMVMIMLMVMVALGAIYAQVKKKASRRISQELQDVDEFED

SEQ ID NO: 56859 - protein, 121 aa, Zea mays
  Coding DNA Sequence Number=SeqID_15080
WYQMDCEQHKHPALNKQQWSIPMRRNTNVSALRLAIIITRYPCTPKGGASPSNDSRLTEKAPGHNAIVEYNLAPVKHNAGRIKAYRQIHVPRCRAPRPLYGSFRTPNPSMNASVNPPGLAP

SEQ ID NO: 56860 - protein, 337 aa, Zea mays
  Coding DNA Sequence Number=SeqID_15081
  Gene Ontology: Mol. function=hydrolase activity, hydrolyzing O -glycosyl compounds; Cellular component=vacuole; Biological process =carbohydrate metabolic process
  Homolog annotation: Hit_ID=Q93WT3; Match level="QueryCoverage=85%, HitCoverage=91%, E-value=1e-126, Identity=80%"; Hit description=Beta- 1,3-glucanase
  Pfam annotation: Domain name=Glyco_hydro_17; Domain location=27-334; Score=624.6; E_value=8.6e-185; Accession=PF00332.9; Description =Glycosyl hydrolases family 17
MAALVATAAVLHGCTTVLLRSKRVRAIGVCYGVLGSGLPSKSDVVQLYKSNGIASMRFYFADQDLLTALRGSGVALALDVGNGKVGELAADPASAASWVRDNVQAYYPDVDIRYVVVGNEVVPGAASVLQAMRNVHAALASAGLAGSVKVSTAVKMDAVDDSSPPSRGVFRDPAAMSPIAQFLAANGAPLLANVYPYFAYQYSDGGIDLDYALFQPSSTTVTDPANGLVYTNLFDAMVDAVRAALDKAGAGGVDVVVSETGWPSADGNGATLDNARTYNQNLIDHASKGTPRKPGPMEVYVFAMFNEDQKDGDPTEKKFGLFNPDKTPVYPINFAGN

SEQ ID NO: 56861 - protein, 116 aa, Zea mays
  Coding DNA Sequence Number=SeqID_15082
  Subcellular localization annotation: CTP_CleavageSite=72; ConfidenceScore=5.01e-01
MAPRILCDDGGSQPPLRKQEDVSKDSTAPTAVPPPSSIAPPTATTSHQLGAKISPTATTALLETGETIMEKLAMYSQKTARSGCTGLSGGAPDSVRCARLALANWLLSGFVGGVRL

SEQ ID NO: 56862 - protein, 294 aa, Zea mays
  Coding DNA Sequence Number=SeqID_15083
  Gene Ontology: Mol. function=RNA-directed DNA polymerase activity; Cellular component=nucleus; Biological process=RNA-dependent DNA replication
  Homolog annotation: Hit_ID=Q8S472; Match level="QueryCoverage=99%, HitCoverage=27%, E-value=1e-150, Identity=86%"; Hit description =Putative gypsy-type retrotransposon RIRE2
MLRRHFHRARPPAEGGKASDDDKKEDHQAGEFPEVCDCFMIYGGQAANASARHRKQQCREVCSVKVVAPVYLDWSDKPITFDQADHLDHVPSLGKYPLVVDPIIGDVRLTKVLMDGGSSLNIIYAETLGLLHVDLSSIRAGAAPFHGIIPGKRVQPLGQLDLSVCFGTHSNFRRETLTFEVVGFRGTYHAVLGRPCYAKFMAIPNYTYLKLKMPGPNGVITVGPTYKHAFECDVECVEYAEALIADLESLSKEVPDVKRHAGKIEPAETVKSVPLDPSSDASKQVRIGSELGPK

SEQ ID NO: 56863 - protein, 36 aa, Zea mays
  Coding DNA Sequence Number=SeqID_15084
MASCATIENYVTYIDVENMVMQQVHIIFRVNVQSNG

SEQ ID NO: 56864 - protein, 54 aa, Zea mays
  Coding DNA Sequence Number=SeqID_15085
MAPPRTRSCRATGFNVSSDEGDPLDLASGHLDAGWKNFGEFPSRCGVGAAASSC

SEQ ID NO: 56865 - protein, 211 aa, Zea mays
  Coding DNA Sequence Number=SeqID_15086
  Homolog annotation: Hit_ID=Q93FQ9; Match level="QueryCoverage=64%, HitCoverage=55%, E-value=7e-10, Identity=30%"; Hit description=Cell surface mucin-like protein
MGAQGAIFLSLALIAITGQQEYDDTTIMKGCLGSNSSIWPARGEALPRPTPELGLNLDAGRWTPPRPTPGLGPSLDLGRRTPPRSTLGLGPSLDSVRRSPPRLTPGLGLNLDLGRRTPPRPTPGLGLNLDSGRWSPPRLTPGLGLNLDLGRRSPPRPTPGLGLNLDPGRRCPPRPTPGPRLSLDLGGASAPPDLGLGPTTSQRGHHYPTPS

SEQ ID NO: 56866 - protein, 197 aa, Zea mays
  Coding DNA Sequence Number=SeqID_15087
  Homolog annotation: Hit_ID=Q6H4V6; Match level="QueryCoverage=21%, HitCoverage=34%, E-value=3e-07, Identity=62%"; Hit description=Auxin responsive protein-like
  Pfam annotation: Domain name=Auxin_inducible; Domain location=86-177; Score=77.1; E_value=5.6e-20; Accession=PF02519.5; Description=Auxin responsive protein
  Subcellular localization annotation: CTP_CleavageSite=75; ConfidenceScore=5.77e-01
MASRYNYKRTVVCGLLLPPASPSSAAPSTASSPPADTAVARSRSRALSPPTAHRSVSSMKRLLRRLSRVAAADACAAAAAYEPLRPDAAAPGKAAALAAGARRLGGGARVPEGHVPVCVGEEGGPVERYAVRAELLGRPAFAALLRRAAQEYGYGHPGALRIPCPVADFRDLLLQLSSACAAADHPDDDAAALCYYS

SEQ ID NO: 56867 - protein, 134 aa, Zea mays
  Coding DNA Sequence Number=SeqID_15088
MARACCCAVQCRQTPRHGHGHGHRASTCHEPCGGAGCNVPCQEAQPISDDSNTAWRLCFPAGVWAPRHACRTCFCPPARSLALGFKSSSSELQACMRMRATQVLIAAARQLRPSSRCVFCGVRGLYIAGAHIFL

SEQ ID NO: 56868 - protein, 94 aa, Zea mays
  Coding DNA Sequence Number=SeqID_15089
  Gene Ontology: Mol. function=calmodulin binding; Biological process =auxin mediated signaling pathway
  Homolog annotation: Hit_ID=Q75GQ1; Match level="QueryCoverage=55%, HitCoverage=48%, E-value=2e-09, Identity=60%"; Hit description =Putative auxin responsive protein
  Pfam annotation: Domain name=Auxin_inducible; Domain location=1-86; Score=64.7; E_value=3e-16; Accession=PF02519.5; Description=Auxin responsive protein
MRELMRRLSFSDRAGGGGVPRGCVPVLVCDGGGESERFVVRVEALRHPSFAALLEMAAQEFGYKQEGVLRVPCDVRHFKEVVLAAASSPRSRNR

SEQ ID NO: 56869 - protein, 136 aa, Zea mays
  Coding DNA Sequence Number=SeqID_15090
MGAYGMPSATNNPDASGQSFSEALKSSRKHLLQYDAFESADGGPGGKGAKKKTKKSKEHRIGGGGQCHVAAGMMRHGKGGKCRALCCGASRLSVSSSASCSILSSREQPSSGRRNPAPSYAAATIPMLPIQLLSSG

SEQ ID NO: 56870 - protein, 105 aa, Zea mays
  Coding DNA Sequence Number=SeqID_15091
  Gene Ontology: Mol. function=ribonuclease III activity; Biological process=RNA processing
  Homolog annotation: Hit_ID=Q69LX2; Match level="QueryCoverage=66%, HitCoverage=5%, E-value=5e-23, Identity=71%"; Hit description=CAF protein-like
  Pfam annotation: Domain name=Ribonuclease_3; Domain location=40-105; Score=11.8; E_value=0.00055; Accession=PF00636.16; Description =RNase3 domain
MRACAGHPSMSPRPSAMAPEKKQILEALTTKNCREDFSQESLETLGDSIFNYITAQHFFGKYKNQHEGALTKMNKNVISNAALCQLACSNSLAVVLPNLASFLKS

SEQ ID NO: 56871 - protein, 122 aa, Zea mays
  Coding DNA Sequence Number=SeqID_15092
  Homolog annotation: Hit_ID=Q10Q83; Match level="QueryCoverage=47%, HitCoverage=13%, E-value=6e-21, Identity=86%"; Hit description =Expressed protein
MAERWKSVSSVPKAENARPTGRWPAAKPKASDLLAHSLDCSLDRKDSILAAIHLLRRSMAFDSTTSLSSSDPAAPALHAPYDTDIISFAARYMQALELQLGDFATPKEAAAGTGTHTGHVKS

SEQ ID NO: 56872 - protein, 69 aa, Zea mays
  Coding DNA Sequence Number=SeqID_15093
MAHHSGAARRGGRAMAMNRSGVQIRWREVRPGRAAASLRCGCLFEVIDQPEDAAEYRSVGQFYTASSQT

SEQ ID NO: 56873 - protein, 163 aa, Zea mays
  Coding DNA Sequence Number=SeqID_15094
  Gene Ontology: Mol. function=transcription factor binding; Cellular component=intracellular; Biological process=regulation of transcription, DNA-dependent
  Homolog annotation: Hit_ID=Q9FPK1; Match level="QueryCoverage=98%, HitCoverage=85%, E-value=1e-73, Identity=84%"; Hit description=Small GTP-binding protein RAB5B
  Pfam annotation: Domain name=Arf; Domain location=20-161; Score= -103.3; E_value=0.088; Accession=PF00025.11; Description=ADP -ribosylation factor family
  Pfam annotation: Domain name=MMR_HSR1; Domain location=33-139; Score=- 7.1; E_value=0.0045; Accession=PF01926.13; Description=GTPase of unknown function
  Pfam annotation: Domain name=Miro; Domain location=34-139; Score =71.5; E_value=2.7e-18; Accession=PF08477.3; Description=Miro-like protein
  Pfam annotation: Domain name=Ras; Domain location=34-163; Score =152.3; E_value=1.3e-42; Accession=PF00071.12; Description=Ras family
  Pfam module annotation: Pfam domain module=Arf::MMR_HSR1::Miro::Ras; Domain location=20-161::33-139::34-139::34-163
  Subcellular localization annotation: CTP_CleavageSite=8; ConfidenceScore=5.23e-01
MGCSSSVPARNTGGLNTISNDSSPDASSKDLRAKLVLLGDSGVGKSCIVLRFVRGQFDPTSKVTVGASFLSQTLALEDSTIVKFEIWDTAGQERGAAAAIVVYDITSPESFSKAQYWVKELQKHGSPGIVMVLVGNKADLHDNRSVSSQDAQDYAEKKQYVFH

SEQ ID NO: 56874 - protein, 350 aa, Zea mays
  Coding DNA Sequence Number=SeqID_15095
  Gene Ontology: Mol. function=metal ion binding; Biological process =metal ion transport
  Homolog annotation: Hit_ID=Q10RN8; Match level="QueryCoverage=52%, HitCoverage=52%, E-value=3e-52, Identity=60%"; Hit description=Heavy metal-associated domain containing protein, expressed
  Pfam annotation: Domain name=HMA; Domain location=132-197; Score =27.3; E_value=5.4e-05; Accession=PF00403.16; Description=Heavy-metal- associated domain
  Pfam annotation: Domain name=HMA; Domain location=16-78; Score=41.1; E_value=3.8e-09; Accession=PF00403.16; Description=Heavy-metal -associated domain
  Pfam module annotation: Pfam domain module=HMA::HMA; Domain location =132-197::16-78
MGAGKGGDGEEAAQPVVLKLDLHCAGCAHKVKKAIRRVPGVGSIVTDVAANRVVVAGTADAGALKARLEAKTNKPVEVVSAGGVPPKPPAAEPQQDAGAGEKKGDKGANPKEEAKEQQAAEEEKKKPKEETVLLKIRLHCDGCGDRIRRRIYKFKGVKDVVLEGNAKDEVKVTGTMDVPDMLSYLKEKLNRDVEAVAPAKKDGDGKDEDKKDGGGGSGGGEDKNKGAGAAGGDDKKDKGIGADDVPVAPSTAAAAALMAAPAVASTYRVAPPYPYGYVAAYQQQPPPPASYYPYPSYYGNGDGVGLANPAHHYPQPQLAYPPYPYRFDVAPPPPPPQLFSDENPNACSVM

SEQ ID NO: 56875 - protein, 163 aa, Zea mays
  Coding DNA Sequence Number=SeqID_15096
MGCTEGAPNGCSPRPSSGFLRIIHSKGTKRKREPTPPSDEFGDSEYSEEEFSSESEGSPAPVSPPASSDDSDDSQGIAAEVWTYIRAVERAGLEGSNESEYSSDEEDSDGGDEGEDDDDDDDDDDGDDSGRGGGDGSRDSTKGGGGGRDSTKGGGGGRGRASG

SEQ ID NO: 56876 - protein, 85 aa, Zea mays
  Coding DNA Sequence Number=SeqID_15097
MSWREGGRSSKEIKSANCEGEGILGELAGSWVEKIKRYDLATMDQVASVKDKSRGFEVTDHMVVKLEQGPWRRWTKCNGEEQAKS

SEQ ID NO: 56877 - protein, 109 aa, Zea mays
  Coding DNA Sequence Number=SeqID_15098
MRTTDKPLIMFMPHGCHSHQAARGKALEQSDKVEMPCLVPPAYAAALDEKSWVSLAAFGVYNKSRNHCSFFSTPLCTHTMSCVQDPWPRHGGRWHKNTHIMQDYAICTA

SEQ ID NO: 56878 - protein, 885 aa, Zea mays
  Coding DNA Sequence Number=SeqID_15099
  Gene Ontology: Mol. function=nucleoside-triphosphatase activity; Cellular component=nucleus; Biological process=protein transport
  Homolog annotation: Hit_ID=Q9LZF6; Match level="QueryCoverage=87%, HitCoverage=95%, E-value=0.0, Identity=90%"; Hit description=Cell division control protein 48 homolog E
  Pfam annotation: Domain name=AAA; Domain location=245-429; Score =327.3; E_value=2.6e-95; Accession=PF00004.19; Description=ATPase family associated with various cellular activities (AAA)
  Pfam annotation: Domain name=AAA; Domain location=518-705; Score =344.3; E_value=2.1e-100; Accession=PF00004.19; Description=ATPase family associated with various cellular activities (AAA)
  Pfam annotation: Domain name=AAA_2; Domain location=242-370; Score= -28.4; E_value=0.0013; Accession=PF07724.4; Description=ATPase family associated with various
  Pfam annotation: Domain name=AAA_5; Domain location=245-377; Score =9.3; E_value=0.00035; Accession=PF07728.4; Description=ATPase family associated with various cel
  Pfam annotation: Domain name=CDC48_N; Domain location=28-114; Score =138.0; E_value=2.5e-38; Accession=PF02359.8; Description=Cell division protein 48 (CDC48), N-t
  Pfam annotation: Domain name=ResIII; Domain location=226-357; Score= -29.0; E_value=0.012; Accession=PF04851.6; Description=Type III restriction enzyme, res subunit
  Pfam annotation: Domain name=Sigma54_activat; Domain location=211 -373; Score=-180.5; E_value=0.017; Accession=PF00158.16; Description =Sigma-54 interaction domain
  Pfam module annotation: Pfam domain module=AAA::AAA::AAA_2::AAA _5::CDC48_N::ResIII::Sigma54_activat; Domain location=245-429::518 -705::242-370::245-377::28-114::226-357::211-373
MASQGEPSSSDPKGKKDYSTAILERKKSPNRLVVDEATNDDNSVVALHPDTMERLQLFRGDTVLIKGKKRKDTVCIVLADETCEEPKVRMNKIVRKNLRVRLGDVVSVHQCPDVKYGKRVHILPIDDTIEGITGNLFDAFLKPYFLEAYRPLRKGDLFLVRGGMRSVEFKVIETDPAEYCIVAPDTEIFCEGEPIKREDEERLDEVGYDDVGGVRKQMAQIRELVELPLRHPQLFKSIGVKPPKGILLFGPPGSGKTLIARAVANETGAFFFLINGPEIMSKLAGESESNLRKAFEEAEKNAPSIIFIDEIDSIAPKREKTHGEVERRIVSQLLTLMDGLKSRAHVIVMGATNRPNSIDPALRRFGRFDREIDIGVPDEVGRLEVLRIHTKNMKLAEDVDLELIAKDTHGYVGADLAALCTEAALQCIREKMDIIDLEDETIDAEILNSMAVSNDHFKTALGTSNPSALRETVVEVPNVSWEDIGGLENVKRELQETVQYPVEHPDKFEKFGMSPSKGVLFYGPPGCGKTLLAKAIANECQANFISVKGPELLTMWFGESEANVREIFDKARQSAPCVLFFDELDSIATQRGSSVGDAGGAADRVLNQLLTEMDGMNAKKTVFIIGATNRPDIIDPALLRPGRLDQLIYIPLPDEQSRLQIFKACLRKSPVAKDVDLHALAKYTQGFSGADITEICQRACKYAIRENIEKDIERERRRKDNPEAMEEDEVDDIAEIMAAHFEESMKYARRSVSDADIRKYQAFAQTLQQSRGFGSEFRFSDQPTAAARRWNSKRATTRANSLYALSGTQGMSIKSDGIPGIFSNNKAKVASPTRESRVSLHQVTSCHVAGEKVRGRGYICQLPHRHLGMATGLKSAGTEITNPYP

SEQ ID NO: 56879 - protein, 140 aa, Zea mays
  Coding DNA Sequence Number=SeqID_15100
MTFCGFHPLGMLTHPLILFPAERKDDRMWRDRLVEKDFQIEQTDTRTRELKEQVEVQDNTIEVLENQLHDLQIELDEANAYMEMHHQEMQQGMEVDGDIKEEEDPEELEPTSSLDTANLAHSGGPRHLSLVQPQLLVDQL

SEQ ID NO: 56880 - protein, 170 aa, Zea mays
  Coding DNA Sequence Number=SeqID_15101
MAKAWKTNGTSDDGEDDDEYGEKVHAPTPSAKNGVARRRRHEGREKRSRMANEVEVTEARTIIIVRRREVVLGNYIQMYLVRILLFLLIFLRLTVTVAAEEVEVAYYKQSVAEADDQLFSQAADEAEANYHKRKAEKCDAGQCCKWNEIVVEDCATDDSDDELLIDCGSD

SEQ ID NO: 56881 - protein, 501 aa, Zea mays
  Coding DNA Sequence Number=SeqID_15102
  Homolog annotation: Hit_ID=Q2QMP1; Match level="QueryCoverage=23%, HitCoverage=10%, E-value=2e-22, Identity=49%"; Hit description=MATH domain containing protein, expressed
  Subcellular localization annotation: CTP_CleavageSite=56; ConfidenceScore=5.05e-01
MTALPSTVVFLAASITLALQQARSQYGSGKNIGYQGPSGQPFQGSLFANSMAIECCQMEDQGKLGFGLSHSDDRILDDFCGQIEEMPLNADNPEEVSDISDSRDDNSDVLHVDIEDRESSPVNWEIDASETQTTIPGSSEVQNDHAGKRTSTVDDSSSSCSSDSVPSVTMNGSYKGGAWTSVRSSSNKYIFQCLWPLKGKTRTIEFPAEEDEDEDADRLARSQAPGADGVIAWQRVVVLKPDPPNPNPSADGEGIGRRRPGRMPPSPRRLRRPRLSRRRTSTCRPPTRRSCRMRTPPLCRTSGGCRSSSGSRGAGQWARPCRTVVGPSRRTSRSKCARTRHCCGSFDAVVNRLQAALDVKAAALWLDLEALDDANARLVGCLDRTLAPPSDGSAIRITHATSAAPRRESAPNQRPKWWIPLKKDPLWCGTRCGRAVRGRAVAAGFAGVRSGQGGHASASRRACRAVKAGMRALRGGHAERSRRGREAGAVYNKLLIVSRDK

SEQ ID NO: 56882 - protein, 74 aa, Zea mays
  Coding DNA Sequence Number=SeqID_15103
MSFKPKLRKPEKLASVVPTVGPSVAGQSSSRSTWDTFDDVDDDDDEDDDDDDDDDDDQGEENVVATGHDIIGPS

SEQ ID NO: 56883 - protein, 283 aa, Zea mays
  Coding DNA Sequence Number=SeqID_15104
MWSVVLSLQLLQCMRSAGRPNSEVARPADVTGRASARPQAGTGRTDTSGRWPATWPAHDRKPRAVAIIRWRSDDRDGRGRGRGRGRGRVPFALQQPAGSLSSRRDLTARRRRGPDAKEWRWPGCERRMQTQTRIGRCSAAQGGGPAGPAVAVATRNHGGDPPERDMPGLADWDEGRVWRRPTSRHLSGCIHAAQGPDKIICMPRVFVRHIIWAWAWAQLATAITSSSHLVVLMARFLAPFGGRLIGASSSNVMFTLLRLDGSGWCSPICFLGVRGYNRFFFEQ

SEQ ID NO: 56884 - protein, 79 aa, Zea mays
  Coding DNA Sequence Number=SeqID_15105
MHIEARKDAILNSLFLLCVVAGEQYDVCLILDYGWEEMGSYIWIRLEAQDFWENLEVPSMPHHSEDMGWDFEEWWDRTM

SEQ ID NO: 56885 - protein, 95 aa, Zea mays
  Coding DNA Sequence Number=SeqID_15106
  Subcellular localization annotation: CTP_CleavageSite=59; ConfidenceScore=5.19e-01
MAHRSYSGPPEAFSPPFSPPFPAIEFTVAPSSSLPNSGDPEPPLAHACLNSDDLTTAERSSAARSHSTPSVWSPPSDSDRTAQIAVRFTRYPFAR

SEQ ID NO: 56886 - protein, 94 aa, Zea mays
  Coding DNA Sequence Number=SeqID_15107
MTNALGKLKRRCGSLEAGAQGQRDGQLTPAFPKIGLDSHQPVTTAQDAKAISGSMMPQCPSAAAQVHYPAPARKATRSKWTPTLPQCPSPTRKM

SEQ ID NO: 56887 - protein, 571 aa, Zea mays
  Coding DNA Sequence Number=SeqID_15108
  Gene Ontology: Mol. function=nucleic acid binding
  Homolog annotation: Hit_ID=Q2R4A9; Match level="QueryCoverage=92%, HitCoverage=100%, E-value=0.0, Identity=68%"; Hit description=Plant protein family protein, expressed
  Pfam annotation: Domain name=DUF246; Domain location=122-485; Score =370.1; E_value=3.4e-108; Accession=PF03138.5; Description=Plant protein family
  Subcellular localization annotation: CTP_CleavageSite=67; ConfidenceScore=5.07e-01
MYLEDLSNKDTRLPHHQPRSESSLCLFLSPGISAQTLTRHAIPMRRGLGSEASLRRRRGPARLWVAVAALVVGTVCLFSSSSVGLLGASYRVQIQMVGEHLHAPRTYWPPPPTESESNGYLRVRCNGGLNQQRSAICNAVVAARIMNATLVLPELDTNSFWHDESESEKRKFWEDLDDMDPRVRGQRSLKEDESVQDDGPGCGFVGIYDVPHFIKTLKYDVRIVMSIPEITTNGKTKKLKGQQLRPPRDAPVSWYATDALETMKKYGAIYLSPFSHRLAEDIDNPELQRLRCRVNYHALRFKPNIMKTSSEIVNKLRSEGHFMSIHLRFELDMLAFAGEEHFAEKELIPMKIRLKGKCPLTPEEVGFILRAMGFDNRTRIYLASGELFGGKRFMKPFKTMFPRLENHSTVGPGKLEENTQGLAGSAVDYMVCLLSDIFMPTYDGPSNFANNLMGHRMYYGFRTTITPNRKALAPILIDRMEGRHIGFERIRRVMSNTHFGAPHKRVHPESFYTNSWPECFCQTDAKNHADRCPPDNINDVLESQFQSEEEMEEARASNQTDPSSQIEELTI

SEQ ID NO: 56888 - protein, 89 aa, Zea mays
  Coding DNA Sequence Number=SeqID_15109
  Gene Ontology: Mol. function=Rab GTPase activator activity; Cellular component=intracellular; Biological process=regulation of Rab GTPase activity
  Homolog annotation: Hit_ID=Q2R4C2; Match level="QueryCoverage=83%, HitCoverage=16%, E-value=3e-35, Identity=90%"; Hit description =RabGAP/TBC domain-containing protein, putative, expressed
MEFSFNVCIHIWDAILGDPEGPSDTLMRICCAMLILVRKRLLAGDFTANVQLLQHYPATNIDHLLHIANRLRGTLVVPGKGKNGCIPEL

SEQ ID NO: 56889 - protein, 222 aa, Zea mays
  Coding DNA Sequence Number=SeqID_15110
  Homolog annotation: Hit_ID=Q5VRC9; Match level="QueryCoverage=52%, HitCoverage=38%, E-value=3e-20, Identity=46%"; Hit description =Putative BRI1-KD interacting protein 128
MKKNSYKVASPGSTVAVREYGGQRGGAVEEVKLNTGNVFAALDSLKKEKKGDKGKAAGSSSRKKHGEGAAQRQEPSQKEMFWAPAPLTTKSWVDVEDDDDYCFTTTSSRRPVWGTAGEPAKEEDDVDDVVRAALQEEVNPVNFLSGLAIGFLLGLLLVCQGEPFQLHQMPLKAGPPDILLHWSPTTSSPSPSRSPRSPRDILLHRAMAAPDILTLPVMPAPL

SEQ ID NO: 56890 - protein, 77 aa, Zea mays
  Coding DNA Sequence Number=SeqID_15111
MTMLVDYTAVGGLLHRRRSFTKDINVNPHRAAVKSLQVARLSCHRAAQWTLRKARGQERDHRLMWSASKTDHLQKMS

SEQ ID NO: 56891 - protein, 218 aa, Zea mays
  Coding DNA Sequence Number=SeqID_15112
  Gene Ontology: Mol. function=protein kinase activity; Biological process=protein amino acid phosphorylation
  Homolog annotation: Hit_ID=Q9SDG8; Match level="QueryCoverage=42%, HitCoverage=13%, E-value=2e-28, Identity=58%"; Hit description =Putative zwille protein
  Pfam annotation: Domain name=Piwi; Domain location=1-187; Score= -106.8; E_value=0.015; Accession=PF02171.8; Description=Piwi domain
MVLLDILRYHLLLLASVCNQSPKMEMIDSLFKPREAKDDGLIRDGVSESQFNQVLNIELQQIIEACKFLDEKWNPKFTLIIDQKKHHTKFFIPRKPDNVPPVIPSRLCPSQRKGVKPHYYQATKPELCDTIITKESSAISTLKLVHTDNTPAKWDHLNIVQQRADALESILELYAKLLEERLDELADVFRPFGERVVSSREMSIQRCLTMSLMTPPKF

SEQ ID NO: 56892 - protein, 269 aa, Zea mays
  Coding DNA Sequence Number=SeqID_15113
  Homolog annotation: Hit_ID=P49027; Match level="QueryCoverage=22%, HitCoverage=17%, E-value=5e-17, Identity=73%"; Hit description =Guanine nucleotide-binding protein subunit beta-like protein
  Pfam annotation: Domain name=WD40; Domain location=44-82; Score=34.5; E_value=3.6e-07; Accession=PF00400.22; Description=WD domain, G-beta repeat
MPSPPPPHRSFHAAATATLAAPIPHDNHGRRVGVPLLLWDLSTVLTTRHFVDHEKNVLSVVFSVDNRQIVSASREKTIKLWNTLGERKFPVPHDLFNLASAPTAPYSHHVLVNLINPYPALCLKKALGESVLLGAIYSRTIWLLYLDSRESSIRKRRQQLIKMVNLNNMALDTSTNSDLFHHILNELQAPLIGTFQMYEPGIACPVLSATVKGQGYALPADVQYVDVQWEVPVVLPLHGCLAHELTCSVNLTGRELISRSYPFKNCLEA

SEQ ID NO: 56893 - protein, 39 aa, Zea mays
  Coding DNA Sequence Number=SeqID_15114
MAAAGRNWLVGVRRGLILVVDLDLRRNRSLRTFPGNKKF

SEQ ID NO: 56894 - protein, 101 aa, Zea mays
  Coding DNA Sequence Number=SeqID_15115
  Subcellular localization annotation: CTP_CleavageSite=55; ConfidenceScore=5.02e-01
MGAGACGFWRLQARALLGVGGCRAWSVAGSWAVLLAARSVRSRGEGRLAVGVAARGMPERGRWAPWARGERSEEEREREEGGRCYKSTRLKKNLVLEIKEG

SEQ ID NO: 56895 - protein, 106 aa, Zea mays
  Coding DNA Sequence Number=SeqID_15116
MTREIHGRQICTCLFLSSPQRENQVKREELLEYAQSGINGEISEIAEIEAASTGEAARLRDALRRAPPGAVRQPHHPFERPNHQNGRCGRLLSYGAPDSPDYTDLI

SEQ ID NO: 56896 - protein, 116 aa, Zea mays
  Coding DNA Sequence Number=SeqID_15117
  Homolog annotation: Hit_ID=Q43802; Match level="QueryCoverage=53%, HitCoverage=4%, E-value=5e-12, Identity=67%"; Hit description =Probable sucrose-phosphate synthase
MKKSYEFVYNWHPTSSFGQCKYYFVKEVVKGIDESDLQGSTRRGSKSSPCTTPTSASPSSRTCAGGSGTSREFEHSGDPKGHFQALLALAMDGLEKGKAGTAGSSDGGFRERQGCV

SEQ ID NO: 56897 - protein, 102 aa, Zea mays
  Coding DNA Sequence Number=SeqID_15118
MAMMGSTSEKMYLCQVSLYNCFRISVSRMICNVYVTGETLLGKKLPKGTFPFLASHSTLMVVLFSRVVIQRTGPYEEVLGKQPESPKVSHVYPHNQDSTNVS

SEQ ID NO: 56898 - protein, 533 aa, Zea mays
  Coding DNA Sequence Number=SeqID_15119
  Gene Ontology: Mol. function=carbohydrate binding
  Homolog annotation: Hit_ID=Q6ZLH2; Match level="QueryCoverage=99%, HitCoverage=100%, E-value=0.0, Identity=71%"; Hit description=Lipase- like protein
  Pfam annotation: Domain name=DUF620; Domain location=186-480; Score =577.9; E_value=1e-170; Accession=PF04788.3; Description=Protein of unknown function (DUF620)
MDKERKQGFFAALKEEVVRGLSPSRRPRAPPPPPPEKVLEQYLGEQLVARSGSLRPGGEALAPLIEGPDAERLAAGDPDAEDSGRREGFGHWVRGHLTRTPSMASSAAGGGGGPGGSSGSFRRSDLRLLLGVMGAPLAPIPSKTAEPLPLLSIKGTPIESSSAQYILHQYTAASGGYKLLQSVRNAYAMGKVRMVASEFETATRVVKNRGPSGRGAAAVEQGGFVLWQMAPDMWYVELAVGGSKVHAGSNGRLVWRHTPWLGAHAAKGPVRPLRRVLQVPAVLPTPRLIPSPPTRANHLTISASFLSVWHWHWQLAMQGLDPLTTAGLFAEARCVGEKKVNGEDCFILKLSADPQTLKLRSEGPAEIIRHVLFGYFSQRTGLMVQMEDSHLTRIQPHAGGDAVYWETTISSALEDYRAVEGVMVAHAGRSAVTLFRFGEAAMSHTKTRMEEAWSIEEVAFNVPGLSVDCFIPPADIRSGSVGEACELPSQPHGERARTGAAVHPSRVAAVERAGTAAGAGGRGEKKVMWRVQV

SEQ ID NO: 56899 - protein, 60 aa, Zea mays
  Coding DNA Sequence Number=SeqID_15120
MALLDPHERFQPEPLEGLGLQPLPVASCFIFQAAIIAYLHGMSMEATLLPASSSSIRGEG

SEQ ID NO: 56900 - protein, 92 aa, Zea mays
  Coding DNA Sequence Number=SeqID_15121
MTGDARAIAAAGCHRGLAWPGHLELPPAQPTPWLCARSTRDGSAGPAALGRRRRAPARKGRSPFPVRSKEEDDGPICKFQNSRGARLFQGPG

SEQ ID NO: 56901 - protein, 105 aa, Zea mays
  Coding DNA Sequence Number=SeqID_15122
MALVCCNRGMRESRRAECRGEARVAQRVCGVLLKARHERALAEDWLSMAVATATRLAACCSRCLPAATVEHVLDGCFWRFLFGFGPGSLQKICSLMYTLQIVYRT

SEQ ID NO: 56902 - protein, 92 aa, Zea mays; identical to SEQ ID NO: 56900
  Coding DNA Sequence Number=SeqID_15123

SEQ ID NO: 56903 - protein, 291 aa, Zea mays
  Coding DNA Sequence Number=SeqID_15124
  Gene Ontology: Mol. function=oxidoreductase activity; Cellular component=membrane; Biological process=metabolic process
  Homolog annotation: Hit_ID=Q7XIP2; Match level="QueryCoverage=87%, HitCoverage=84%, E-value=2e-89, Identity=73%"; Hit description =Putative short-chain alcohol dehydrogenase
  Pfam annotation: Domain name=Epimerase; Domain location=52-267; Score= -46.9; E_value=0.0043; Accession=PF01370.11; Description=NAD dependent epimerasedehydratase family
  Pfam annotation: Domain name=KR; Domain location=51-234; Score=-57.1; E_value=0.00048; Accession=PF08659.1; Description=KR domain
  Pfam annotation: Domain name=adh_short; Domain location=50-217; Score= 69.9; E_value=8.3e-18; Accession=PF00106.15; Description=short chain dehydrogenase
  Pfam module annotation: Pfam domain module=Epimerase::KR::adh_short; Domain location=52-267::51-234::50-217
  Subcellular localization annotation: CTP_CleavageSite=82; ConfidenceScore=5.14e-01
MACSTTSILQEPMSWRSKRDKGTAAGAALRGVVGGFSTASDSQSQRLAGKVAVITGAASGIGRATAAEFVRNGAKVILADVQDGAGRAVAAELGPAAEYARCDVTDEAQIAAAVDLAVARHGRLDVLYSNAGAPGASAPAPLPSLDLADFDRVMAVNARSAVACLKHAARVMVPRGAGCVLYTGSTTGMLGGLAALPYSLSKATVISVVRAAADELARSGVRVNAISPHAIATPLLLRSLARLHPGVPDEQLKRLVETGHERPPWCGAAGPGRRKGGRLPGLRRGQVRHRA

SEQ ID NO: 56904 - protein, 147 aa, Zea mays
  Coding DNA Sequence Number=SeqID_15125
  Gene Ontology: Mol. function=pepsin A activity; Biological process =proteolysis
  Homolog annotation: Hit_ID=Q84RX6; Match level="QueryCoverage=79%, HitCoverage=18%, E-value=2e-29, Identity=59%"; Hit description =Putative CND41, chloroplast nucleoid DNA binding protein
  Subcellular localization annotation: CTP_CleavageSite=51; ConfidenceScore=5.46e-01
PSPPPPSPSLLLAAASGGCRWDPPIGPCRGRRLFLPLTRSYPNASRSRCLVGGAASATGAHPNARMRLHDDLLTNGSAQYYTTRLYIGTPPQEFALIVDSGSTVTYVPCASCEQCGNHQMLRLDNSENNDEERPLAKVSLNCELVGT

SEQ ID NO: 56905 - protein, 132 aa, Zea mays
  Coding DNA Sequence Number=SeqID_15126
  Gene Ontology: Mol. function=pepsin A activity; Biological process =proteolysis
  Homolog annotation: Hit_ID=Q84RX6; Match level="QueryCoverage=63%, HitCoverage=13%, E-value=1e-39, Identity=90%"; Hit description =Putative CND41, chloroplast nucleoid DNA binding protein
MSGECATRRRQKSGSANACDKESAALKQGSEGIIEPRRRSFCVELVDVTSKVHSLKKIRGPDPSYKDICFAGARRNVSKLHEVFPDVDMVFGNGQKLSLTPENYLFRHSKVDGAYCLGVFQNGKDPTTLLGG

SEQ ID NO: 56906 - protein, 449 aa, Zea mays
  Coding DNA Sequence Number=SeqID_15127
  Gene Ontology: Mol. function=RNA-directed DNA polymerase activity; Cellular component=mitochondrion; Biological process=RNA-dependent DNA replication
  Homolog annotation: Hit_ID=Q8S463; Match level="QueryCoverage=99%, HitCoverage=22%, E-value=0.0, Identity=84%"; Hit description =Putative prpol
  Pfam annotation: Domain name=RnaseH; Domain location=37-164; Score =12.1; E_value=4.3e-06; Accession=PF00075.14; Description=RNase H
MGETISFAPRKAIKSQVLADFVAEWVDTQLPTAPIQPELWTMFFDGSLMKTGAGAGLLFISPLGKHLRYVLRLHFPASNNVAEYEALVNGLRIAIELGVRRLDARGDSQLVIDQVMKNSHCRDPKMEAYCDEARRLEDKFYGLELNHIARRYNETADELAKIASGRTTVPSDVFSRDLHQPSVKTDDTPKPEKASAQPEAPLAQSEEPSARPEAPSAQPEAPSARPEIPSTPEGEALRIEEERSGVMPNRNRQTPYLQYLHRGELPLDRAKARRLVRRAKSFVLLGDEKELYHRSPSGILQRCISIAEGQELLQEIHSGACGHHAGPRALVGNAFRQGFYWPTAVADATRIVRTCEGCQFYARQTHLPAQALQTIPITWLFAVWGLDLVGPLQKAPGGYTHLLVAIDKFSKWIEVRPLNSIRSEQAVAFFTNIIHPFGVPNSIITDNGT

SEQ ID NO: 56907 - protein, 97 aa, Zea mays
  Coding DNA Sequence Number=SeqID_15128
MVKSPEEDGIEWIHATLVKPELVRFVEIQREVEAHQSGPQRPDQWGSHGSDRPGWSEGPRGRSVDHGRMVRDLGVCTGQAQASDSPLYKPPRTHGPY

SEQ ID NO: 56908 - protein, 208 aa, Zea mays
  Coding DNA Sequence Number=SeqID_15129
  Gene Ontology: Mol. function=carboxyl- and carbamoyltransferase activity; Cellular component=ornithine carbamoyltransferase complex; Biological process=amino acid metabolic process
  Homolog annotation: Hit_ID=Q8SA97; Match level="QueryCoverage=76%, HitCoverage=23%, E-value=1e-10, Identity=34%"; Hit description =Ornithine carbamoyltransferase
MAPPVDVAGPRPRLGDVEAPPRSRSSLSSVAEVESEPLGRARRRPSAEARAESEPWGRAERCSPSSGAEPESEPWVGRSGVRRLPGLSPSPSPGSGGAEFAVFRGLARVRALGRAERIDTAQAALSFCQAGLLLGEDRASGEPELCADGGYQLRIRSLEDDDEDNVGLYYDYDYDFRYSFHLKGVLLGKEEGAEADLQEFQDFDEFED

SEQ ID NO: 56909 - protein, 164 aa, Zea mays
  Coding DNA Sequence Number=SeqID_15130
MSAPSEQVPETPSASSIGVTEILEFVIAKEKNSKKDAEGGTRKDPSEAGVEETVQKKRRMMVVMRAVHRTPPSGAKKKTAPSKVDEVAETAHKAENSGGPLETTLLEIDRIIDGVVPEKETNEVVATEISSLRMKNVEEASSERRTFNLRHLGAINFLKKICLN

SEQ ID NO: 56910 - protein, 93 aa, Zea mays
  Coding DNA Sequence Number=SeqID_15131
  Subcellular localization annotation: CTP_CleavageSite=58; ConfidenceScore=5.09e-01
MGLRKEKVYLISLKSDGEVEDSLSLTPDGNVSHRRPWPLSSSSSARPPSGPAPSPSPPATARRALNFESADYVADRSRELHPNFDRHAYNILK

SEQ ID NO: 56911 - protein, 149 aa, Zea mays
  Coding DNA Sequence Number=SeqID_15132
  Homolog annotation: Hit_ID=P08799; Match level="QueryCoverage=74%, HitCoverage=5%, E-value=5e-07, Identity=35%"; Hit description=Myosin- 2 heavy chain, non muscle
MAPRTLYDDGGSQPPYGSKRTIVTEFPAEKGSEGATGRKKVKNLEDLLKEKDSKIESTEANLAEVRLRNEKQDIQIEEQNKQLEQLSKEFEKAKSTFRDGMNRLNCEAEDLKMEVKTEAEKNTKLSKALKYLRDTCFGFVTRCWSRLRP

SEQ ID NO: 56912 - protein, 335 aa, Zea mays
  Coding DNA Sequence Number=SeqID_15133
  Gene Ontology: Mol. function=nucleic acid binding; Cellular component= intracellular; Biological process=protein transport
  Homolog annotation: Hit_ID=Q1SDW9; Match level="QueryCoverage=95%, HitCoverage=74%, E-value=1e-63, Identity=44%"; Hit description=PUG; Zinc finger, C2H2-type; UBA-like
  Pfam annotation: Domain name=UBA; Domain location=6-46; Score=44.7; E_ value=3.1e-10; Accession=PF00627.21; Description=UBATS-N domain
MAVPQVDKKMLGELEAMGFPTARSVRALHFSGNSNLESAVNWLLEHESDPDIDRLPLIPREISIECGDTSDEVRNDVEGMRDTVQEQKPKEHTETGRQNETSQLEREPNADGQEEEDRKRILALYKQKRDEEGRARGRIRSQLQEDQRERIRAAKDLMEAKRSLEENQRKRVMESRVADQEEEKRARERIRQRIADDKVKPAGRAVVASEQLRDCLRTVKKNHRDDPAAVARAYQVLLKIVGNVAKNPGEEKFRRIRLSNPVFKDRVGSVRGGVEFLELCGFRRFSGIGYLVMPRDKVDVALLTAARRRDRVGLGEPLLRPALQVKRTAAVAAYC

SEQ ID NO: 56913 - protein, 271 aa, Zea mays
  Coding DNA Sequence Number=SeqID_15134
  Homolog annotation: Hit_ID=Q6QP51; Match level="QueryCoverage=30%, HitCoverage=45%, E-value=2e-07, Identity=40%"; Hit description =Putative growth-regulating factor 1
MAPLRRGRSEPKVGRGRGSSEVEAESELWGRARRRPSSEVEVESEPWGQARRRPSSEVEVESEPWGRARRRPSSGVEVESEPWGRARRSPSSEVEVESEPYGRARQRPSSGVEVESEPWGRARRRSSSEVESFLWRPRLDLAAVGPHSGEWHSSRSRAGGAVFLSDHPLLRARGGLPPRGEPPVRRTVSLRPTHAEPPPTYIACLGLDHYRSRYAGRHRTSLPPSSYDRSQGFVSDDAYARQPFRQQYYHEGQQEGHVRRHHSACQCAHCL

SEQ ID NO: 56914 - protein, 92 aa, Zea mays
  Coding DNA Sequence Number=SeqID_15135
MPVAKEKGERGEWAQEPAWAAFGDVSARYSNGWRSRRALGVALAHRPHWAATMVMVVAHVRRGRGGEGAKALGGVVGIVGEMGGRRRFGEDE

SEQ ID NO: 56915 - protein, 112 aa, Zea mays
  Coding DNA Sequence Number=SeqID_15136
MNSIDGYQWSFNEGEEMRRKEERQLRFWVQPERRRCRGAGWGSAAVDLARDSARGAGRALLGGTSGWRRGHAWARCAEGTGLLAVAWARRFGFWRRGCSVLTRKRRLRFVRA

SEQ ID NO: 56916 - protein, 273 aa, Zea mays
  Coding DNA Sequence Number=SeqID_15137
  Gene Ontology: Mol. function=ubiquitin thiolesterase activity; Biological process=ubiquitin-dependent protein catabolic process
  Homolog annotation: Hit_ID=Q6ZKX9; Match level="QueryCoverage=93%, HitCoverage=25%, E-value=2e-21, Identity=31%"; Hit description =Ubiquitin-specific protease-like
MNQLDSLLIVPQVEHDASTAPGSYVDQNGKGIGEDSNCVLTIEDCLSLFFREEVVERSCDCSKVPMEEPSTNQSRKGKQMEVGTNDEVAANGSHSKQSDRTTCSNGQSSKLNSLSVEYNSCYCRQQHGSDEESDITQMADTHTAGANSRMTCGLKETEYHGGIQETVRSSSLSTEKQTDLLSTQHSQSLIPQNQDLRLDLSAHQLGDKQNGQKERSGRAIQRTNITKLPPVLTLHLKRYFKNGNEYHKNEARVSYKEHLDVGRFMNSRYFPFT

SEQ ID NO: 56917 - protein, 155 aa, Zea mays
  Coding DNA Sequence Number=SeqID_15138
MGKNNKRKREPTPPSEDFGDSEYSEEEFSSESEGSPAPIPLRESSDDSDDSQGLAAEVWTYIRAVERSGLEGSDESEYSSDEEDSDGGGEDEDGDDDDDDEEGGGGGDGDGDGRGGSSGSKDGDGGGSRGGSGGGGSSRGSNRGGSGGGSNRASG

SEQ ID NO: 56918 - protein, 279 aa, Zea mays
  Coding DNA Sequence Number=SeqID_15139
MWVPPIFNLIETKHELVGGCGPKDWKAIVDDWVAATKATMDSGSISTEDGGLATPPMDIGALYLVSHGTEIQNVSEQSNISLIPLTVMAKIKFLHGMDDDDRIRKRRPSRNMSPPVTHKKTTQEQGSQAPRVRIKVRHSSTEHARWVLSKRSSVEKKSFEENHGTVTRISPVLEEGELPSGHVLLEKNGMPTQSSAGPEVGIWKRKRNAQLTEMDMDETKRKLRGAYQEAENSKQRRAIQVVELRDIARSRDNKHVIRCRNPSTKSMDLTNRTHTTNPS

SEQ ID NO: 56919 - protein, 281 aa, Zea mays
  Coding DNA Sequence Number=SeqID_15140
  Homolog annotation: Hit_ID=Q1SRA9; Match level="QueryCoverage=71%, HitCoverage=48%, E-value=2e-12, Identity=30%"; Hit description =Transcription factors TFIIS, elongin A, CRSP70, conserved
  Pfam annotation: Domain name=TFIIS; Domain location=201-280; Score =33.7; E_value=6.5e-07; Accession=PF08711.1; Description =Transcription factor S-II (TFIIS)
MSATFLCRVPAEVVSNRGCVDVSPEDFLSAAVVPRSGQSSALAVPQSQEMMMSSENSSAAGAADDESRLEPWRELFRDRDIYDVISKAILVAATDSPQEFRRRRDGIVEQIYTAPTVPVPQGRAAGERSGRAALEVSDKGSKVASCTVVAPADEGNNSKKKGTAAAHHQHANGNGDSADTDAFGASGMDWLQSLAEEMDAETQQIDEVLRIKEILLNHHELAWFFVIVAQSSDTLFDSLRRLQLMQLTADKIKSTEIGGAIAAMRKHKSHKIRMLVHKIVK

SEQ ID NO: 56920 - protein, 122 aa, Zea mays
  Coding DNA Sequence Number=SeqID_15141
MEDLSTMTQVLVICKLTACKLVCVENVITRQNEKLKQEVAWLTKDLTQVKGNFSNQKKFKWRSSAKSSQTCTSLRCTEQSGVHQTVSGARLAHPVNMPLSGKRQGAAAIIHRIVRCTPDCSM

SEQ ID NO: 56921 - protein, 67 aa, Zea mays
  Coding DNA Sequence Number=SeqID_15142
MGSQNGQIQELPPPLHPTNIGDQPPPVEKTKRQCPGCQLDEVNKASNKVPYLNFCFIWIICLTATAT

SEQ ID NO: 56922 - protein, 103 aa, Zea mays
  Coding DNA Sequence Number=SeqID_15143
MGRERVELLFGWYSRGRNMLAADAVNQGGRGVPAAWAPSAMARRSRAPCLPPCRTREGMAWAAAVWEKTEEKIVAARENRRVGMKNGQVSTPIYRSSPRVRVS

SEQ ID NO: 56923 - protein, 103 aa, Zea mays
  Coding DNA Sequence Number=SeqID_15144
MGRERVELLFGWYNRGRNMLAADAVNQGGRGVPAAWAPSAMARRSRAPCLPPCRTREGMAWAAAVWEKTEEKIVAARENRRVGMKNGQVSTPIYRSSPRVRVS

SEQ ID NO: 56924 - protein, 1113 aa, Zea mays
  Coding DNA Sequence Number=SeqID_15145
  Pfam annotation: Domain name=Drf_FH1; Domain location=194-348; Score=- 14.1; E_value=0.1; Accession=PF06346.3; Description=Formin Homology Region 1
  Subcellular localization annotation: CTP_CleavageSite=41; ConfidenceScore=5.06e-01
MPPTPVARAATTKQRRGANNSKATTWCPRLAEADYAVPRTRGGAVRRARVRVCLQPEPGIEDERSALGAGSLGGGLRVCAQPRTAVLGPGSLGGAGMEPGGGRRRRSSGTAQSPRPTAQPNRQQPTTRTSSGRMGTSGLDDDKALIAYEMGRVSFHASEEIIKVCAEVDSFGKRRKASNTSQRRSFHAMKAKICAAKEASAFEEPSYHLVLRSRRIPDEFLVVSVDKAVTFAMQYNHRSRLPPPPPFGRGGYPRGHKQPYYAPPPPPPFPPAPPPPPLERKYEVLMEAGRLAAEYLVAQGVLPPAALQRGAGISGTWLAHPLPPPPQLPQQQEPPGFYGRRRYEDEYNSNPNGWPRRANGTSSSTSSRDDCSRGSYNGRGKRKYGEYRRGYLDSGRDREERGRPFPNGRHYEEDGDEDGAPGFQRERRGNRGNDEASTSVTEAVREGTPLTAKAVAGLCMEDTTSKIMSSVKDTSKDANDASKVLEETEEGEVEDDSGTQNSETEVVKQGIDTDVNHASCRVVTESDPKQLPYGKIEDEVPDEEAGNEKKVMDEATLDHNTSDGETNMEVEMHVGKDSLIDYCNFTRTPTRPRSVRAHRNAACIPGETAVVETVDLVSSCQASQMVIGDSAERSLTNVASENREDKICHENTSSGDVCAEPKESMLLQENGIPVGTGNMVEEKVDAQPHVVVQQYKEETNLSPLTDALKKSLMQETTLSPFAASHKDSLTQEDGFMQEADLSPLTANHRDSLIEETKLLPTTAFHKVSLIEETGLTRTISYENNLKLQFKEGTKIGDIDMLPQDVDLIELPDQRKIIGHDVGAETVIEMEKGKLDQSSSLNLSDLDLVRGTEVAAVHNCPALVQPSAAGSSAESNNKQQEGPETFTGANASHTYDLCQIPLDNKDVQVIDIECGTPVEVDGFDLSKSNVMIFLLKVKIFDSTRNEMMCSSMDSMMDPGHGIHTDILPGIQDGYSLAFSDFLGSDIPCYPSMQSDLHAGIGANDSEGIAVMDDPIYGSLSDIDMGHPSINPAGTAAYGRDPAAWAGLYNVEYCDVWAFAVFGLEYAGVGSLSEGDVFAFVPTLSGLSSSGLLHARIAGFMDVWGQPTQDYDKFF

SEQ ID NO: 56925 - protein, 191 aa, Zea mays
  Coding DNA Sequence Number=SeqID_15146
  Homolog annotation: Hit_ID=P0C0U4; Match level="QueryCoverage=34%, HitCoverage=21%, E-value=2e-18, Identity=75%"; Hit description =Ribosomal protein S6 modification protein
MLGSYPLNESVAIARARDKLRSMQLLARQGIDLPVTGIAHSPDDTIRPLQLCADGGYQLRIRSLEGRGTADPDGRRDDVAWRAGERRVPGELETAWGRTRDELSTRPGDETNARGELDRQGKVAGVHGAKAERAKHGQDLAMRGGIDHGEQGGKALHAAGWRGPREVDACAEHNYREDQRRGRAWACEAAS

SEQ ID NO: 56926 - protein, 100 aa, Zea mays
  Coding DNA Sequence Number=SeqID_15147
MAFTRAMSLAMDILPKYVVSGRQAADSGEVIWTDRRASGYDSQLTASSAVKIFSPTVVIAPRAHESQCRRGSRRTPTGGDRFTESDLVQSLYHRVLHHTF

SEQ ID NO: 56927 - protein, 1227 aa, Zea mays
  Coding DNA Sequence Number=SeqID_15148
  Homolog annotation: Hit_ID=Q6Z103; Match level="QueryCoverage=27%, HitCoverage=51%, E-value=4e-74, Identity=43%"; Hit description =Myosin heavy chain homolog-like protein
  Pfam annotation: Domain name=LRR_1; Domain location=1026-1048; Score =0.3; E_value=2.5e+02; Accession=PF00560.23; Description=Leucine Rich Repeat
  Pfam annotation: Domain name=LRR_1; Domain location=1109-1135; Score =1.7; E_value=1.4e+02; Accession=PF00560.23; Description=Leucine Rich Repeat
  Pfam annotation: Domain name=LRR_1; Domain location=897-919; Score =11.6; E_value=2; Accession=PF00560.23; Description=Leucine Rich Repeat
  Pfam annotation: Domain name=LRR_1; Domain location=921-944; Score =9.1; E_value=5.6; Accession=PF00560.23; Description=Leucine Rich Repeat
  Pfam annotation: Domain name=LRR_1; Domain location=946-968; Score =10.0; E_value=3.9; Accession=PF00560.23; Description=Leucine Rich Repeat
  Pfam module annotation: Pfam domain module=LRR_1::LRR_1::LRR_1::LRR _1::LRR_1; Domain location=1026-1048::1109-1135::897-919::921 -944::946-968
MASNLISASSLETETAMADPGEGPTAPPPPRLQEIAHDVPDHTVTQFSASQDTETAAGDAATHDSAQPKAESAHCAVGEPEQTTTEADGQPHVATMPQEVAALPSPAETPVQESAAQPTLPPQKQESPVPELASSVHEEEKDASKARGDEGEEKPTAARRPQLKETVNLGAVEQTTTQEVAALPSPAETPAQESAAKATPPPEKQEGGAPELASSVHEEEKDASKASGDEGLEKPASRRWRWLRAVVGLLFLRPKSGETKMPTPPSDKQPVSGLEDTKPTTGEMPPPHKDSGSPVLVPSKPEVGKTEGEMKTAAVDVKKPVSGQEEQKPAAKKKPSRKYSSGAPRREMEDGERSKGGRVEIETQVGKATPQLEGERPMRKKLQKAIRLVQLLMSLYNKHRSQSQEKKPDTASDPGGEEDSEARLESAPEDKKPASAEQEEQKPAAKKKPSRKYSDGAARKLKDDGEMGKGRRDEIQVGKAIPQLEGERPMRKKLQKAIKLVQLLMSLYNKHRSQSQDRKPGTASGPGGEEDSEAKRASAPEEKKPQHRNWPREEVRLEHILEETFTRLLLTEYNKQLSGVSQKCLLTFSIFELASEVKKQIMIYWWVAEFNLRHRSDPARALSGGGETSDSPALQGKGADAADSRDDAESIFIMLSDHGFLVPMKNWCSKVIHGCQVNPLVHWMLKRMARGCRFAELDDKGSPEDLQPNSNILCLTAGNRHVLQQMHMADESQTQAKARKKDESQTQTKKKDHSQAWGKSKVTNEPSMQGKGNDVQDQQQPEAHVGSTSTAAADKTPSQKDEDPTQVTEQLTNKGPQDVKPSSEPEHGDEIPPPSFEGKRVILNLNAHVYPICKSAFSNLAECLVVLQLGRWNNLDDKTYMEVDGLESRDAIGSLKNLRYLSLRGLSRLTELPKGIESLKKLEILDMRGCQNLARVSAGVIKQLKQLTHLDLTECYMLEHIGRGITSLTELQVFKGFVFATGTRGKEACRIQDLRRLKKLQKLTICITTDANVGKREMADLKYLASLRKLTITWSEIPSILEGGTKKAREKRRGLVKTWTSFQLPPDLMKLDIRCYPKEELELECNEKLERLYLRGGDMRRCSTKEPSSIKTLRLRYLRHFEMGWSDIRSKFEKLEYVEIVVNDKNPMEIPDFTLDWDGVWTKDEKEEHNNHQRLQAAPNKKDVGMDKDVQDDGSGNHKEPTKAASTITKVNKDKAATKERAGPLFP

SEQ ID NO: 56928 - protein, 84 aa, Zea mays
  Coding DNA Sequence Number=SeqID_15149
MGLGVCGSLCQGGDKDDVYDYGNVIMAMCDAQNCTRLHLGRMHQTVIPDMYPISTRYPIGTGTGKEEGVEADLQEFQDFGEFED

SEQ ID NO: 56929 - protein, 179 aa, Zea mays
  Coding DNA Sequence Number=SeqID_15150
MPQPLRPPRLPQTHVPPSACLPPQPVRRGPDQSPAIHRRKHEQAIDCLWRRFGMLSILLPSCETESRASSGRGRQDEIRKQVRRGKETGVMEATDHRRLRHEGGSKDATYQSWPVDAHGGVLQDELLQMLYKESDRSKSLTANTCTHWWCLYLAIQIKEHELREKDPVVLGKDQLGALM

SEQ ID NO: 56930 - protein, 198 aa, Zea mays
  Coding DNA Sequence Number=SeqID_15151
MAQSEVRRHRRRGRVWPAGGRADGIVYRPGGHGDGNEGRHRALEDPWARFYDDDKITSTAAAAGVAASATAFTERVASGALTLEFAIKRRRLEGRIERLRTQHTEAVRDKSVTENKSRNLLEKLSVAEKEMENLSRRLAEEKEGAKRARAEAQAACAEADAARAKADFALKRAADKESELKKPTQLLRENGGLHLLWC

SEQ ID NO: 56931 - protein, 343 aa, Zea mays
  Coding DNA Sequence Number=SeqID_15152
MSSSSSSAASASRATPSSEEMLSDLAMLELQPGHTVEVRTSRIFSGHVLEMQRLGYFENGVERAPGAEEKRKIGDKIAQFRSCTFTPRTGKTSAEVVEIVPCARNKWGNWWDFWFYLAPGVVEEDEDEEALRYAARLSSRRDLVEEFIAYGVWPLAHGWTLVEAEAEAAKIVGKYALETETLRSWDIRGSNARLNRFFELNQLLYGAYPEANSANTAYRRGKKTRPLADEGPSWDKAPGVVAKKRELGTVAEDLGLRASGHFVGELLETCAAPGETMSSPELQETSTRMFKVTGGRWPSNVPIPRAASEDFLSRLARDLKIFPYERNIGVVVSAVMENDRQDA

SEQ ID NO: 56932 - protein, 194 aa, Zea mays
  Coding DNA Sequence Number=SeqID_15153
  Homolog annotation: Hit_ID=Q6AU09; Match level="QueryCoverage=42%, HitCoverage=9%, E-value=2e-09, Identity=35%"; Hit description =Putative Fip1 motif containing protein
  Subcellular localization annotation: CTP_CleavageSite=5; ConfidenceScore=5.15e-01
MDVCRALAARSRSRPRVNPAPAMPALSPHPRIRVSPTPLSHSSLPAAPSADDDESPGLTGPESPHHPRERIDIIRRGGPLRGRCRLPSIVILVGPIAGRVNPREVKDARQRRLDGPDGARKRWIGGMSGDVDVCVEVAELIIFLHRGGIRGGGGCEVAAAGWIGWHEESLPIFKRRLLGDLLDFSARELQVQEY

SEQ ID NO: 56933 - protein, 372 aa, Zea mays
  Coding DNA Sequence Number=SeqID_15154
  Homolog annotation: Hit_ID=Q5Z707; Match level="QueryCoverage=14%, HitCoverage=15%, E-value=2e-09, Identity=54%"; Hit description=Ring -H2 zinc finger protein-like
  Pfam annotation: Domain name=zf-C3HC4; Domain location=172-212; Score= 26.8; E_value=7.5e-05; Accession=PF00097.15; Description=Zinc finger, C3HC4 type (RING finger)
MEAQGMIGISSSLTAERRIEAYRTNIEFLSRQSTTSGDRRFTLHLRCYVSVHVSTGNGRPNLVLMYRGQDADTSCLALPDDENGVRDVLHDLLRSTRPLQHLGLTDLEWESLLSQQNVSWLVDPVLRARYAVVSVWQAVELHVCYDAVQMLMMTCKESSDSGAVGGDAEAECSVCLVALRESEAVELPACAHAFHRRCISEWFAHKSTCPLCRDDVAKYLEPKLQRQFANFDYAILIKRNATNAPMPEQLGIASNPSALLLPRPLRCLSSRPPTMPCQEDASAEERKMRGIWRTSLKPENVLLLSDDHVTLVDVESSPPPRASSRDHRPSVEACSLLGDSGCSWPVIGGNADPETRWSKNARGSEGVEHCRS

SEQ ID NO: 56934 - protein, 157 aa, Zea mays
  Coding DNA Sequence Number=SeqID_15155
  Homolog annotation: Hit_ID=Q9M0G6; Match level="QueryCoverage=43%, HitCoverage=34%, E-value=4e-15, Identity=52%"; Hit description =Photosystem II protein W-like
  Pfam annotation: Domain name=PsbW; Domain location=88-157; Score =14.4; E_value=3.8e-05; Accession=PF03912.4; Description=Photosystem II reaction centre W protein, PsbW
MSQVAAFERDEEDAVRQVQLEAGAVSSAMGSGHSDEALAVAASPVSARIAQQPRRYVAGGVSRRLQSLFHGVSVGHKWRWWTQVAAVRPTIQFIQGTDEQTIPDVRLTKSQDGKNAVGVRLFCGARDITGFYMINDEGVLQSVDVSAKFVNGKDDEG

SEQ ID NO: 56935 - protein, 379 aa, Zea mays
  Coding DNA Sequence Number=SeqID_15156
  Gene Ontology: Mol. function=catalytic activity; Biological process =metabolic process
  Homolog annotation: Hit_ID=Q9FRQ0; Match level="QueryCoverage=56%, HitCoverage=38%, E-value=7e-49, Identity=51%"; Hit description =Putative 4-coumarate CoA ligase
  Pfam annotation: Domain name=AMP-binding; Domain location=62-379; Score=-114.9; E_value=0.0098; Accession=PF00501.18; Description=AMP -binding enzyme
  Subcellular localization annotation: CTP_CleavageSite=34; ConfidenceScore=5.16e-01
MGWMHTGPFLHRWRQSHVVFAASVIQSLRSLMVFATARWSEGGDRAFAWATSVARMLELADTAFDLWNVDVEILERGGGVFAFAPIAVCTGLRLRAPGWASPRQAAPPGSRAIGGRAPRAARPAEIAARVRDTSPALVFATPDNVEKLSPLRVPVVLVPDAFHLTDDGAPEFAPFPELLLLDSEPLPGPSVRQDDAAAILYSSGTGGQSKGVVLTHRNLIATVKLFVRFEASQYAAPACDNVYLAALPMFHVYGLSLFAVGLLSLGSMVVVMKRFKAGEAVKAIHRFKVTHFPIVPPIMAALVHTTKPAAMPLECLVQVSTGAAPSSLRLIDDFVKAFPHVDLIQVPAYPTYSHVIRSSLPCPSVGISGTTYKVPIWGV

SEQ ID NO: 56936 - protein, 310 aa, Zea mays
  Coding DNA Sequence Number=SeqID_15157
MRVPPFPWSLSLISFLPRSNLFSHLSLSPTEVGALCLGDGDHWELCIPEGGAPLPLSHSLSLPLPLPFTFSPARPLPPRRAPPRLGLLRRIPAHRRLGPVPLRAWRRRPRPRPSLAPPRICAPGSGGSAPCPRPRAHGPCASVPGGGGSTLRPAAPVPEAPGARAGGGGSAPAPACLAPTASAALPLSRPTLTASPAPPGGLRGPSAWRPVAWRPASCLARPCASRPGSHVWTYIRTVERAGLEGSDESEYSLDEEDSSDSSEEGSGGGGGDDGDDGGDGDGGGDSGRGGDGGRKGGNGGGSKGSNKASG

SEQ ID NO: 56937 - protein, 168 aa, Zea mays
  Coding DNA Sequence Number=SeqID_15158
  Subcellular localization annotation: CTP_CleavageSite=78; ConfidenceScore=5.10e-01
MGRRSFPYHRLKKLPAAAPSPPHPPATTAGPATAAAAIEDSYRSYYRALVARRRRRGSGRRLRRARVWGALARALRRRAAAAGARVRASVARVARRLRDGRPYVGDLFAGNYMFLQVAPSPMTITGSHGGGAVVPFAEYYYGYKARARARAAAVQLHRYPTGAVLYET

SEQ ID NO: 56938 - protein, 48 aa, Zea mays
  Coding DNA Sequence Number=SeqID_15159
MEPVTGDPFMAQPLAAALSSNRSPTLHHFEEVFLSFDGVRKMDLSPFD

SEQ ID NO: 56939 - protein, 125 aa, Zea mays
  Coding DNA Sequence Number=SeqID_15160
  Subcellular localization annotation: CTP_CleavageSite=54; ConfidenceScore=5.33e-01
MSTVQRQNNGSAMQPPCFCFSARRLTYMAYMAQQLVGRITMEVAPSKLPSTMARCARLPRNLDTIAEDDDDKEAAAMESTRELPLRNASRGAQVVVVDAPVHCADKLACYLAPMAKTTECLKIKA

SEQ ID NO: 56940 - protein, 369 aa, Zea mays
  Coding DNA Sequence Number=SeqID_15161
  Homolog annotation: Hit_ID=Q6Z1C1; Match level="QueryCoverage=95%, HitCoverage=92%, E-value=9e-65, Identity=56%"; Hit description =Putative RNA-binding protein Virp1a
  Pfam annotation: Domain name=Bromodomain; Domain location=140-229; Score=70.7; E_value=4.5e-18; Accession=PF00439.15; Description =Bromodomain
  Subcellular localization annotation: CTP_CleavageSite=58; ConfidenceScore=5.01e-01
MTSAVLAGRDEVHHGHPHHRHWGGARAPLMPKPSSNPNPRRYRPGPNPIVSGSPPAPRAGSAVAAEPLPSPLRHVKFRPSELTPAEARHLRERLTGELGRVRAFVSRIDSWQDGRRRGPEPEPEPPARRSSPPPALVEAMRRRCADILTRLRRSKKSVWFNSPVDVEGLKLHDYRAIIRSPMDLGTVKQNLTAGRYPSHEAFAGDVRLTFNNALRYNPPDHHVHRYAGDLLATFEGMYKEAVSWFEQQRQQLEPPMQLDLLPPPPPPQLPVSVPVQAPLRMWDAIDATIVPDDDDRVEVAVNPSVVVEIGESETDVPEKNEVEAEMGDEYVDIGDEMLTMNYQSVEIQRDSLAASSSSGPGSGSSSSTA

SEQ ID NO: 56941 - protein, 69 aa, Zea mays
  Coding DNA Sequence Number=SeqID_15162
MDTVVAPRRSAQVFPTADGGGWQMRDHGNREGRPRRPGREHPESSYGGERGKQGEVERIGFGRGFFFPK

SEQ ID NO: 56942 - protein, 135 aa, Zea mays
  Coding DNA Sequence Number=SeqID_15163
MARGRRQKQKLRTDGPRLRQWAGQVVVAAAHFLLRQGQPSFEFYGHDESSATAIRIGRRRRAGRTLPAERRLHPRCFSSSNNVDGLGLPKPAGCGNICRRATGFSVCHQGMTGQALIMKVGFEPMPDGRRAKDTE

SEQ ID NO: 56943 - protein, 145 aa, Zea mays
  Coding DNA Sequence Number=SeqID_15164
MGKGNKRKREPTPPSEDFGDSGYSEEEFSSESEGSPAPVSPLASSDDSDDSQGIAAEVWTYIRAVERSGLEGSDESEYSSDKEDSPEEDGDGDDNDDDDDDGGDGGDDDDGGGRGGNGNSKGGDGGSSRGSNGGGSSKGSNKASG

SEQ ID NO: 56944 - protein, 550 aa, Zea mays
  Coding DNA Sequence Number=SeqID_15165
  Gene Ontology: Mol. function=identical protein binding; Cellular component=cytoplasm; Biological process=negative regulation of enzyme activity
  Homolog annotation: Hit_ID=O82007; Match level="QueryCoverage=98%, HitCoverage=78%, E-value=1e-103, Identity=39%"; Hit description =Serine protease
  Pfam annotation: Domain name=Peptidase_S8; Domain location=1-396; Score=-27.6; E_value=2.7e-05; Accession=PF00082.12; Description =Subtilase family
MPPPPAKWRGSCEFGGAPCNKKLIGGQSLTPGEHGTHTSSTAVGAFVSDVQMFRAKVGAASGMAPRAHLAFYEVCFEDTCPSTKQLIAIEQGAFMDSVDVISISAGDDTQKPFYQDLTAVGSFSAVTSGVFVSTSAGNAGPDYGTVTNCAPWVLTVAASTMTRRVVSRIRLGNGLVIQGEAGRRYKGLKPAPLIYVQGVFEDGALNTVDVRGKIVFCDRSETATMRGEDGPRCRRRGHHHVQRRLRGREADGAKIMSYINSTANPTANLHFTGVMLDPSYQPAIAEYSSRGPCNMSNLGVIKPDITGPGTSIIAAVPGAGGGNGSAPSHTFGLLSGTSMAAPHLSGIAAVLKRARPAWSPSAIKSAMMTTADVTHPDGTPITDQITGKPAGPLLMGSGIVNPTKALDPGLIYDLSALDSPTYICGHRPLQNVSCATVSKIESKDLNYPSFLVTLTAAAPVVEVRRTVTNVGEAVSAYTAEVVAPKSVAVEVVPPRLEFGSVNQKMDFRVRFSRVGAAADGGTAEGSLRWVSGKYSVRSPILVLDGTQNLV

SEQ ID NO: 56945 - protein, 88 aa, Zea mays
  Coding DNA Sequence Number=SeqID_15166
MTVMTRGGDDDKVGGGNKSDGKQQQVATDSNKGKQIVTKGNDGKGSGNTRWQGATGITIGSPIYSLKEGCQECQGLLHMGEEACPSPI

SEQ ID NO: 56946 - protein, 575 aa, Zea mays
  Coding DNA Sequence Number=SeqID_15167
  Gene Ontology: Mol. function=dimethylaniline monooxygenase (N-oxide -forming) activity; Cellular component=intrinsic to endoplasmic reticulum membrane; Biological process=electron transport
  Homolog annotation: Hit_ID=Q9LMA1; Match level="QueryCoverage=96%, HitCoverage=96%, E-value=1e-144, Identity=48%"; Hit description =Probable flavin-containing monooxygenase 1
  Pfam annotation: Domain name=DAO; Domain location=20-230; Score= -61.9; E_value=0.079; Accession=PF01266.14; Description=FAD dependent oxidoreductase
  Pfam annotation: Domain name=FMO-like; Domain location=20-568; Score=- 406.9; E_value=5.3e-05; Accession=PF00743.9; Description=Flavin -binding monooxygenase-like
  Pfam module annotation: Pfam domain module=DAO::FMO-like; Domain location=20-230::20-568
MAAAQQQSRSTRQAVPASSRVAIIGGGISGLAAAKQLAAHDPVVFEATPSHRRGVEALRVPFSDYSWRNRDDPTFPTHGEIVEYLEGYADTFGLWRYIMLGAKVVDVKFLGGAAAGFTERWSGTGEALQGKPMWEVGVATAGSHTVQYYQFEFVVVCAGKYGDVPRMPVSFPEGKGPEVFRGQVMHSLDYCKLSEEETVELMRGKKVVVVGYKKSAIDLALECAQANQATCVGNELGGRRRPNRRAIPEKVTLVMIRRTLHLRPTPTSTAGEGGEACTMLVRTLHWVVPSYSIWGLPFFLFYSTRLAQFLYERPNQGILRSMLCRLMTPLRAGVSKFIESYLAWKLPLDKYGLRPDHPFVEDYASCQMAILPDGFFDMADRDMIRFKRASGGWCFSRNGVLLDDGTEVEADLVFLATGFEGKDKVRAVLPDPFRGLVVDRSGMMPLYRYARPSVLEIGIAHCSGTIHPLIPNMAFVGYVESVSNLHTSELRCRWLAGLLGGRFALPSVEDMVRHVEGEAEAMRRTTRFYRRHCISTYSIHDSDAMCADLGSRVLRKGNWLAELFAPYNNQDYKED

SEQ ID NO: 56947 - protein, 142 aa, Zea mays
  Coding DNA Sequence Number=SeqID_15168
  Subcellular localization annotation: CTP_CleavageSite=45; ConfidenceScore=5.81e-01
MVGFLRAFAAASAVPAAAAAAYALFSSSAPSSSKLRFPLPDSFLSAAASSTSGRAPNAVPPMATAAATADLSAADDKQRDSALPELTLVDVFPICRASNPLVCVSEDGYKGLSKLWIWEVFEEPLSDLQIVPLTGAFNFTVN

SEQ ID NO: 56948 - protein, 55 aa, Zea mays
  Coding DNA Sequence Number=SeqID_15169
MALAASTDPVFLAFFVFFFAPLPPGPPSADSGWLLRLQGTGDNMAGVKELSDMIC

SEQ ID NO: 56949 - protein, 210 aa, Zea mays
  Coding DNA Sequence Number=SeqID_15170
  Gene Ontology: Mol. function=binding; Cellular component=thylakoid; Biological process=photosynthesis
  Homolog annotation: Hit_ID=Q8VYL2; Match level="QueryCoverage=69%, HitCoverage=22%, E-value=8e-48, Identity=65%"; Hit description =Putative TPR repeat nuclear phosphoprotein
MTSVYIPVQGTEEEVQVALDQLPHDASDILDILKAEQAPLHLWLIIAREYFKQGKIEQFRQILEEGSGPEIDEYYADVKYERIAILTALGAFHTFLGKDWSFQYAHMPIVPVGQLCIAKGELQMASDSFKIVLDEDENNFPALLGQALKKPGVPVAMTKDQQNEGRQKRVSKYWRSGEANHLSLLPSSSAPDAMSITDIGHLGVAAAVNN

SEQ ID NO: 56950 - protein, 641 aa, Zea mays
  Coding DNA Sequence Number=SeqID_15171
  Gene Ontology: Mol. function=oxidoreductase activity, acting on CH-OH group of donors; Biological process=alcohol metabolic process
  Homolog annotation: Hit_ID=Q9M4V5; Match level="QueryCoverage=93%, HitCoverage=92%, E-value=0.0, Identity=58%"; Hit description =Putative mandelonitrile lyase
  Pfam annotation: Domain name=DAO; Domain location=42-509; Score= -55.2; E_value=0.028; Accession=PF01266.14; Description=FAD dependent oxidoreductase
  Pfam annotation: Domain name=GMC_oxred_C; Domain location=460-614; Score=104.7; E_value=2.7e-28; Accession=PF05199.4; Description=GMC oxidoreductase
  Pfam annotation: Domain name=GMC_oxred_N; Domain location=41-372; Score=28.1; E_value=2.1e-09; Accession=PF00732.10; Description=GMC oxidoreductase
  Pfam module annotation: Pfam domain module=DAO::GMC_oxred_C::GMC _oxred_N; Domain location=42-509::460-614::41-372
MDLLAWDRPLQKENDEADVGVRGVNYTFVKDAALAPSVSYYDYIIVGGGTAGCPLAATLSERFRVLLLERGASPYDDDRIGDMARFADTLSDTSPGSPAQRFVSEDGVINSRPRVLGGGSCINAGFYTRASDDYVRGVGWDLGAAGAAYRWVEDVVAFQPELGPWQAALQGGLLEAGVAPDNGFTFDHFDGTKVGGSIFDADGRRHTAADLLRYARAEGLDVLLRARVAKILFFNVRGQDVRTRVKCFYRLPTHAGHRSLPALRVVPAELTGGYFASAPGRRSGRRTAARGVVFHDSEGRMHKAFLSAGRRNEIILSAGAMGSPQLLMLSGVGPADHLRSFGIPLVRDHPAVGQGMSDNPMNAIYVPSPSPVEVSLIQVVGITQVGSYIEGASGSNWGVRHSASGSGPDGVHRPRNFGMFSPQTGQLATVPPKQRTPEAIAHAAESMRQLDDSAFRGGFILEKVLGPLSTGHLELRNRDPDDNPLVTFNYFSHPEDLRRCVAGLSVIERVIHSQAFKNFTYPDFSMETLLNMSTGFPVNLLPRHDNDSTSLEMFCKDTVMTIWHYHGGCQVGRVVDAEYRVLGIDALRVIDGSTFNASPGTNPQATVMMLGRYMGVRITNERLHILSELYHVVCYYVDYYE

SEQ ID NO: 56951 - protein, 622 aa, Zea mays
  Coding DNA Sequence Number=SeqID_15172
  Gene Ontology: Mol. function=steroid hormone receptor activity; Cellular component=nucleus; Biological process=regulation of transcription, DNA-dependent
  Homolog annotation: Hit_ID=Q6EPQ3; Match level="QueryCoverage=99%, HitCoverage=96%, E-value=0.0, Identity=69%"; Hit description=SPX (SYG1/Pho81/XPR1) domain-containing protein-like
  Pfam annotation: Domain name=MFS_1; Domain location=227-617; Score =43.0; E_value=1e-09; Accession=PF07690.6; Description=Major Facilitator Superfamily
  Pfam annotation: Domain name=SPX; Domain location=1-123; Score=31.9; E_value=1.8e-08; Accession=PF03105.10; Description=SPX domain
  Pfam annotation: Domain name=Sugar_tr; Domain location=227-622; Score= -141.3; E_value=0.019; Accession=PF00083.14; Description=Sugar (and other) transporter
  Pfam module annotation: Pfam domain module=MFS_1::SPX::Sugar_tr; Domain location=227-617::1-123::227-622
MKKMLKQYVQQTQHDEKDREQVLKDFSRFLDDQIERIVLFLLQQQGHLASRIEKLAEKRTALLEEYDISQVYQLHDAYREVGLDLIKLLRFVDVNATGIRKILKKFDKRFGYKFTDYYVTTRANHPYSQLQQVFKQVGIVAVVGALSRNLEYLQHHEGSFVSIYDRPAVTLKDPIIDQVNHAVQKLTHATNFMQFLGQHALIVQEDAESESEDLVGDQSYHFMSLVLNLVNTFLYMVNTYIIVPTADDYAVSLGAAATVCGIIIGSMAVAQVFSSVYFSAWSNKSYFKPLVFSSIMLFLGNLLYALAYDLNSLIVLLTGRLLCGLGSARAVNRRYISDCVPLKMRLQASAGFVSASALGMACGPALAGFLQIKFKIYSLSFNQSTLPGWVMCISWLIYLLWLWLTFKEPEHFTKTLVNEQPSESGLAEPLLQGIERRQDENSEVNDDTEVESESSHEPATSIASAYRLLTPSVKLLIYFMLKYAMEILLSESSVVTTYYFSWSTSAVAIFLAILGLTVLPVNAIVGSYVTNLFEDRQILLASEVMVLIGIIMSFCFTPHYSIPQYVLSAFITFVFAEVLEDATITAAGYLGTDLLLNVTLLPSLVICIVSIAAALYTYNNLY

SEQ ID NO: 56952 - protein, 248 aa, Zea mays
  Coding DNA Sequence Number=SeqID_15173
  Pfam annotation: Domain name=DUF674; Domain location=1-224; Score= -273.9; E_value=6.7e-05; Accession=PF05056.3; Description=Protein of unknown function (DUF674)
MSTTTATPTLSMKLLIDRRTQRVLFAEASKDVVDFLFSLLTLPVATAVKLVGKDALVGCVCNLYASVEKLDSVYLQAGVAKEALLCPKVVLPAANTNSSLLRLPEPPVVEPNNMYRCTGNTYGMCRTYITDEYGKMCPHCRCSMTTAAQYLLSARGSCGGSGQVAAPKSAAGGFVQGIVVTYTVQDDLTVTPVSSISSVSLLSTFSVRDIYDLQEKTVQLGYNEGLAIFKASLKSKSVLTDVFLHGKN

SEQ ID NO: 56953 - protein, 242 aa, Zea mays
  Coding DNA Sequence Number=SeqID_15174
  Pfam annotation: Domain name=DUF674; Domain location=1-214; Score= -323.0; E_value=0.035; Accession=PF05056.3; Description=Protein of unknown function (DUF674)
MKLYIDRKAQRLLFAEASKDVVDFLFAILALPVATAVELVGKEAMVGCVGNLYASVEKLDSTYLQAGVANVDLLCPTVVSPYAIANTRRSLLCLPKAKNLFRCGKTVAGSTYCGNYITDMYNKKCPGNCGNHMTAAVQYLSSAVPSNDSGKVAAAAPQSAAEGIVQGVVTYMVLDDLTVTPMAGVSSVATVLNTFAVRDIGDLQEKTVQLGYKEGLAILKASLKSKSVLTNVFVHANNSSVA

SEQ ID NO: 56954 - protein, 252 aa, Zea mays
  Coding DNA Sequence Number=SeqID_15175
  Pfam annotation: Domain name=DUF674; Domain location=1-228; Score= -285.8; E_value=0.0003; Accession=PF05056.3; Description=Protein of unknown function (DUF674)
MSTTTATAGLTMKLLIDRKAQRVLFAEASKDVVDFLFSLLVLPIATAVKLIGKEAMVGCVGNLYASVDKLDSATYVQAGVGKNALLCPTVVSPAANTSSSLLRLPAPSSVQPKQLYRCTNTNNMNVNNCRAYITEQYGRACPACGCSMSTTANYLPFAGGSSASVGQSVAQSAAGGFVQGTATYTVLDDLTVTVTPKSSISSITLLNTFAVRDIGDLQEKTVQLGYNQGLAILEASLKSKSVLTDVFLYANK

SEQ ID NO: 56955 - protein, 72 aa, Zea mays
  Coding DNA Sequence Number=SeqID_15176
MALKPGGKKGFGSTRRYAIARGSEDRQQTTGEEAVWGFGEVTPNKTPRDAKEMAKSDDPEMAKAKAQAQAQA

SEQ ID NO: 56956 - protein, 277 aa, Zea mays
  Coding DNA Sequence Number=SeqID_15177
  Gene Ontology: Mol. function=RNA-directed DNA polymerase activity; Cellular component=intracellular; Biological process=RNA-dependent DNA replication
  Homolog annotation: Hit_ID=UPI00004C1734; Match level="QueryCoverage =97%, HitCoverage=83%, E-value=1e-114, Identity=74%"; Hit description= UPI00004C1734 related cluster
MTESDQLATSCITPFCMYCYITMPFGLRNAGATYQRCMNHVFGEHIGQTVEAYVDDIVVKTRKASDFLTNLETTFKCLKAKGVKLNPEKCVFGVPRGMLLGFIVSERGIEANPEKIAAISNMGPIKDLKGVQRDQGNALRRFISRLGEKRPTPVPPLKEERTLHLDPRGRGSPRELEGAGAGLLFISPLEKHLRYVLRLHFPASNNVAEYEALVNGLRIAIELGVRRLNARGDSQLVIDQVMKNSHCHDPKMEAYCDEVRRLEDKFYGLELNHVARR

SEQ ID NO: 56957 - protein, 281 aa, Zea mays
  Coding DNA Sequence Number=SeqID_15178
  Gene Ontology: Mol. function=ion channel activity; Cellular component= integral to membrane; Biological process=ion transport
  Homolog annotation: Hit_ID=Q1A3R7; Match level="QueryCoverage=68%, HitCoverage=67%, E-value=5e-75, Identity=79%"; Hit description =CASTOR protein
MLVDNDNDFAESECPSCACAVARRRYLHRVQEQKGGRGIEDMMLLEMAKGKNWKRCPKCEFFVEKRDGCLHVTCSRLLLWHLDPSIIRLDLSVMLKEVLDAFLAPGSGLWMFNDVPEVDRERKLIDGGLDFSRLDNITLVHREGNAVIRHHLESLPLESFDSILILADESVEDSAIQAESRSLATLLLIRDIQAKRLTCKESLISHVPRGTFSEGSWIGEMQQASDKYVIISEILDPRTKNLLSVSKISDYVLSNELVSMALAMVAEDRQINNVLEELFAE

SEQ ID NO: 56958 - protein, 127 aa, Zea mays
  Coding DNA Sequence Number=SeqID_15179
MANLAPFEVSRMSKPPVSPQALATPPSDPHVEGKKNIDSKAVALPMVALPASLVVDLLPSDQLREGEVPTEETTVQRVSPSPAHEDKRVEMLPTEETLMLPSHPQPVMVDKLWPSLLWYLSMAAQAF

SEQ ID NO: 56959 - protein, 960 aa, Zea mays
  Coding DNA Sequence Number=SeqID_15180
  Homolog annotation: Hit_ID=Q10JI7; Match level="QueryCoverage=60%, HitCoverage=50%, E-value=6e-32, Identity=27%"; Hit description =Expressed protein
MDRDGAHGGAAERTGGEKERSLQWLVLVWFGLVPASTRVGHGSASASNHHILPVKSKVFPTPPPSFCNCRGGQPPAFPGSLALAPPISSFHESGKGKPEDAGQVPRPGGVGGGQAPGPPPPGGLRHRDLAGLRPPPPSRLLLPQEAASPNRSRFLTLCFLFSCEVLAHDTPRTVLSQPHLLSPNQPPTKTSPCKFGTFFQIRKMSLTERNKSFLLQESRKACSSLARFSIDNDSLLAAGHAVSSNPSKEGDCTRYSPQIVLENSSKTWADSQRAPATELSQTSYSSSPSSSFSSVDDNKSTQQDLSSTDRMLFPERPFKSSPKLKSYFDSDTGLDYPDDAPTKSKDMPIVQSSLPTLGIRNLVKDSIYMDSRELSVRICTKEVTDHPSNCGDQPRELNGPPRDSTQEKSKGLVDINESLRVLAKLREASWTPAESVHHARLSYDAPRFSYDGKEAASKLREVPRLSLDIKESHLRNGEIDSRLNPSLSSTDRSSNTVIGSNAAFEIQQKQPACKRLPSVVAKLMGLEELPEHNQSIASSHACKTVQGSKQEAMFNPLSISSHNEHALRQQRNHDSTVRNLPNSKFPVETAPWKQQERIILPRKLPKGSKGAHGREQPAASVISDIEKRLKDLDFRQSYKDLRALKHILDSMQAKGLLENKNREEISMPKLSDGNHNGQEIASVNMRVNSNTNNVCMPEESNAESSFKSPIVIMKPSKCANLFNEVDSSVFPLGGSSDPPQQQTSNSTYRRKASTRNRTAKEQHAKFSSKVPTSQPLVSYDRRSYGRNDDSSNNQKSSSLLVTESSSRRQQLPRDSSISMKKNKHSTTPRLQQRKLGSERRARPPIPCAESNKSQNQSGDRNNAETVSPRSKFRRKLLCPQEGDDDMPSGLNNRTRSLNQHGNDMSTRSDGSITVASELDIISNDRSTEVDIPNFDQGIGTPSGRNPQRVVNNFLAILPYF

SEQ ID NO: 56960 - protein, 36 aa, Zea mays
  Coding DNA Sequence Number=SeqID_15181
MASLWGALRRSTSRASKWSRFCRFVSKSVLDPPVII

SEQ ID NO: 56961 - protein, 105 aa, Zea mays
  Coding DNA Sequence Number=SeqID_15182
MTWEGEPESGEEEIRVRDFSIGEGPSHQGRARVWRGAPHGRGAGDEDPAETTTTVRRCRDKSYYTSRLISVDHLRPEKVTNIRRLTGIKFLGFSVVLVFPLLSIS

SEQ ID NO: 56962 - protein, 48 aa, Zea mays
  Coding DNA Sequence Number=SeqID_15183
MKAMCDKAMDKAVRAGRILMRRPGVVGIVITLNQASVSMSHRLQAFPT

SEQ ID NO: 56963 - protein, 565 aa, Zea mays
  Coding DNA Sequence Number=SeqID_15184
  Gene Ontology: Mol. function=nicotianamine synthase activity; Biological process=nicotianamine biosynthetic process
  Homolog annotation: Hit_ID=Q8LT19; Match level="QueryCoverage=99%, HitCoverage=100%, E-value=0.0, Identity=89%"; Hit description=ZmNAS2 protein
  Pfam annotation: Domain name=NAS; Domain location=247-524; Score =650.8; E_value=1.1e-192; Accession=PF03059.6; Description =Nicotianamine synthase protein
  Pfam annotation: Domain name=NAS; Domain location=3-246; Score=430.7; E_value=2e-126; Accession=PF03059.6; Description=Nicotianamine synthase protein
  Pfam module annotation: Pfam domain module=NAS::NAS; Domain location =247-524::3-246
MEAQNVEVAALVKKIADLHADITKLPSLSPSPDVNALFTSLVMACVPPSTVDVTKLSPDSQRMREELIRLCSDAEGHLEAHYADMLAAFDNPLDHLGRFPYFSNYINLSKLEYDLLVRYIPGLAPSRVAFVGSGPLPFSSLVLAARHLPNTTFDNYDRCAAANDRARKLVRADKDLNARMFFHTVDAHGGRSGSRRAERARGSRVPIPDCGSLGFRCGGFDVLTVYHPDDEVIYSVIIARKIDAHTNTEVSALVQKITGLHAAINKLPSLSPSPDVDALFTELVMACVPPSPVDVTKLGTDAQRMREELIRLCCDAEGHLEAHYADMLAAFDNPLDHLGRFPYFNNYVNLSKLEYDLLVRYVTGIAPSRIAFVGSDPLPFSSLVLASRHLPNVMFDNYDRCAAANDRARKLVRADEGLRKQMFFHTADVANLTDELRKYDVVFLAALVGMAAEDKAKVVAHLGRHMVDGAALVVRSAHGARGFLYPIVDPEDIRRGGFDVLAVYHPDDEVINSVIVARKINAHVKGLQDGHAHARGAVPIVSPPCKCCKMVANTLHQKREEMATA

SEQ ID NO: 56964 - protein, 213 aa, Zea mays
  Coding DNA Sequence Number=SeqID_15185
  Subcellular localization annotation: CTP_CleavageSite=87; ConfidenceScore=5.05e-01
MYSIAQALSKVHWGFAGTLKSPDSIFRARAPLAVGDQWQRDLLSCRSLRASHPRLAADRRARPGSSSRGVCVFHYRVNGTSGPLGSRSASRVTVFFAQLHLCICRPHPTAPTNIGAHDLAHSCSYFLAAVSPHHSLRRHVPRGEVEPAARELVCAEHTSLYARLRVCTGGQGSRLCPNLNYTPLGLKEFLTGGQIWAESPLLRGPSASHRHRR

SEQ ID NO: 56965 - protein, 553 aa, Zea mays
  Coding DNA Sequence Number=SeqID_15186
  Gene Ontology: Mol. function=serine-type peptidase activity; Biological process=proteolysis
  Homolog annotation: Hit_ID=Q10MJ1; Match level="QueryCoverage=92%, HitCoverage=54%, E-value=0.0, Identity=88%"; Hit description=Prolyl oligopeptidase family protein, expressed
  Pfam annotation: Domain name=Abhydrolase_3; Domain location=326-488; Score=-92.4; E_value=0.1; Accession=PF07859.3; Description=alphabeta hydrolase fold
  Pfam annotation: Domain name=Peptidase_S15; Domain location=255-480; Score=-101.7; E_value=0.012; Accession=PF02129.9; Description=X-Pro dipeptidyl-peptidase (S15 family)
  Pfam annotation: Domain name=Peptidase_S9; Domain location=305-510; Score=18.4; E_value=9.8e-09; Accession=PF00326.11; Description =Prolyl oligopeptidase family
  Pfam module annotation: Pfam domain module=Abhydrolase_3::Peptidase _S15::Peptidase_S9; Domain location=326-488::255-480::305-510
MKCSMIFVKNIYLRIKYNFHLSKLVETQDGGDAKVEVSPRDIVYMENAEPINGEHPEILHKLDLRYAGTSWCDESLALVYESWFKTRKIRTWVLSPDKKDVSPRVLFDRSSEDVYSDPGSPMMRRTVMGTYVIAKIKKEDGNIYVLLNGMGATPEGNIPFLDLFDINTGSKERIWESDREKYYETVVALMSDKTDGELLLDQLKILTSKESKTENTQYYLQTWPEKNQVKITNFPHPYPQLASLYKEMIRYQRKDGVQLTANLYLPPGYDSSKDGPLPCLVWSYPGEFKSKDAAGQVRGSPNEFPGIGATSPLLWFVILSGPTIPIIGEGDEEANDSITNYCRYVEQLVTSAEAAVEEVVKRGVAHPDKIAVGGHSYGAFMTANLLAHAPHLFCCGIARSGAYNRTLTPFGFQNEDRTLWEATNTYVEMSPFMSANKIKKPILLIHGEQDNNSGTLTMQSDRFFNALKGHGALSRLVILPFESHGYSARESIMHVLWETDRWLQNYCVNGTSKVDSVSEADSKNKTLSASGGSAAREGLNPEELSSLPRSLLW

SEQ ID NO: 56966 - protein, 343 aa, Zea mays
  Coding DNA Sequence Number=SeqID_15187
  Gene Ontology: Mol. function=serine-type peptidase activity; Biological process=proteolysis
  Homolog annotation: Hit_ID=Q10MJ1; Match level="QueryCoverage=81%, HitCoverage=33%, E-value=1e-142, Identity=81%"; Hit description =Prolyl oligopeptidase family protein, expressed
MLLLGSHCTTSSTYSDVHLEDELFEEMGRDVMIDIFYARRKTSHAGLSSGDMGYRLPPKEIQDIVDAPPLPVLSFSPNKDKILFLKRRALPPLSDIAKPEEKLAGLRIDGNSNTRSRMSFYTGISIHKLLDDGTLGPEKEEDSKSGKLRVWIADVESGEARPLFKSPEIYLNAIFDSFVWVNDCTLLVCTIPATRGDPPHKPSVPSGPKIQSNESKNVVQARTFQDLLKDEYDAKLFDYYATSQLVLASLDGTVKPIGPPAIYTSVDPSPDDKYIMLSSIHRPYSYIVPCGRFPKKVELWTVDGKFIRELCDLPLAEDIPITMSSVRKDELLLQHLLRLKPST

SEQ ID NO: 56967 - protein, 64 aa, Zea mays
  Coding DNA Sequence Number=SeqID_15188
MDVDVECSGKELEDVTQGMVEVVETMVEVEKVIVVEASSYLGRRVSRLVVEPMGPSVQILLHEV

SEQ ID NO: 56968 - protein, 107 aa, Zea mays
  Coding DNA Sequence Number=SeqID_15189
MTNSPMTASADQLCLADRMANSLTMTNSPLSDDHLTDQLCEADQMTNSPMMANSHMMTNSPMMTNSQMMTNSMMMTNSPIMTNSLMMTNSQMMTNSPMMTNSDEKLR

SEQ ID NO: 56969 - protein, 644 aa, Zea mays
  Coding DNA Sequence Number=SeqID_15190
  Gene Ontology: Mol. function=transcription regulator activity; Cellular component=nucleus; Biological process=regulation of transcription
  Homolog annotation: Hit_ID=Q652L2; Match level="QueryCoverage=97%, HitCoverage=65%, E-value=0.0, Identity=82%"; Hit description =Putative HIRA
  Pfam annotation: Domain name=WD40; Domain location=116-154; Score =39.9; E_value=8.6e-09; Accession=PF00400.22; Description=WD domain, G-beta repeat
  Pfam annotation: Domain name=WD40; Domain location=15-53; Score=33.1; E_value=9.6e-07; Accession=PF00400.22; Description=WD domain, G-beta repeat
  Pfam annotation: Domain name=WD40; Domain location=210-281; Score =26.4; E_value=9.8e-05; Accession=PF00400.22; Description=WD domain, G-beta repeat
  Pfam annotation: Domain name=WD40; Domain location=286-324; Score =7.3; E_value=5.2; Accession=PF00400.22; Description=WD domain, G -beta repeat
  Pfam annotation: Domain name=WD40; Domain location=74-112; Score =50.6; E_value=5.1e-12; Accession=PF00400.22; Description=WD domain, G-beta repeat
  Pfam module annotation: Pfam domain module=WD40::WD40::WD40::WD40::WD4 0; Domain location=116-154::15-53::210-281::286-324::74-112
MKSVDKNNNHNDSSQGLLATMRDHFGSVNCVRWARHGRYLASGSDDQVILIHERKAGSGTSEFGSGEPPDVENWKVIMTLRGHTADVVDLNWSPDDSTLASGSLDNTVHIWNITNGMCTAVLRGHSSLVKGVTWDPIGSFIASQSDDKTVIIWRTSDWSLAHKTEGHWEKSLGSTFFRRLAWSPCGHFITTTHGFQKPRHSAPVLERGEWSATFDFLGHNAPIVVVKFNNSMFRKSFSNGQDTKAAPAGWANGTSKISSKEQQPYNVIAIGSQDRTITVWTTASARPLFVAKHFFSQSVVDLSWSPDGYSLFACSLDGSVANFHFEAKELGYKLSDSDLDELKRSRYGDVRGRQSNLAESPAQLLLEEASAKQSASKKGTPIVQQFQAPQKLSADVLNPAPVVQNQKAPEALPEDEKKSSDPAADGMNKVTRLSSPVKQREYRRPDGRKRIIPEAVGFPSNQDNIPSRSQNHVIDFSSLDQRMNGIRPSYCSSSNCNNSGVKDCSGVTARANITESLVIQKASTNASSDGRLTVERTGSVVPGSLNCPALSIHVLDKKDNEDSLPVCLEANPVEHAAGDMNGVGGAFSTKGTEIRCTRGTETLWLDRISAKVTALAGNTNFWAVGCEDGYLQASNIFLSEFLID

SEQ ID NO: 56970 - protein, 73 aa, Zea mays
  Coding DNA Sequence Number=SeqID_15191
  Homolog annotation: Hit_ID=Q1SGL9; Match level="QueryCoverage=70%, HitCoverage=13%, E-value=2e-08, Identity=61%"; Hit description =Protein phosphatase 2C-like
MSRAFDDYCIKDSGVISVPEVTQMRIDSNDQFVIHATVKGVGRALQRQGHVDHGIYRNLHGTDSHNVVVKQLD

SEQ ID NO: 56971 - protein, 99 aa, Zea mays
  Coding DNA Sequence Number=SeqID_15192
MGRPLQCVSLQSIGPSASARSDRLEEWPGAALRVRLSGRKGLFAKLSVDETLLQPYSVYVVRRKDNDYYYAAADKDNDTTCNGTQAETFRPKIHRFLSN

SEQ ID NO: 56972 - protein, 208 aa, Zea mays
  Coding DNA Sequence Number=SeqID_15193
  Subcellular localization annotation: CTP_CleavageSite=22; ConfidenceScore=5.23e-01
MTRSPSPRARAPRAVPRRPACRARTRPAAPGPALPRPDPALPRPDPALPRPDPAPPRARLGRPPASPTSAPPRRARPRPRRPRLAPRHRGFVPRSPASGLAPAAPASPRRARARPPPASPPPRRLTPASPAPPSPGLAPASRPAPSRARLGRPPPRPASPAPARPPAPVPSSAAPSSPRRGGRPCPRSPVLACPGVLARSPRRALLAS

SEQ ID NO: 56973 - protein, 83 aa, Zea mays
  Coding DNA Sequence Number=SeqID_15194
MAMEVHGPDYDLRTEDIDEDVLRKVRARSTSVSLAIQPQQQSSQHRIQELPMGDARRHKFYPGSGNRRPYFQQRGMRLILSCT

SEQ ID NO: 56974 - protein, 49 aa, Zea mays
  Coding DNA Sequence Number=SeqID_15195
MTLSSKSQRKAYPCRALQSQRLTLTTSLNPRLSLAPPEQEAQEVVDWDE

SEQ ID NO: 56975 - protein, 68 aa, Zea mays
  Coding DNA Sequence Number=SeqID_15196
  Gene Ontology: Mol. function=glutathione peroxidase activity; Cellular component=mitochondrion; Biological process=response to oxidative stress
  Homolog annotation: Hit_ID=Q8L8G3; Match level="QueryCoverage=59%, HitCoverage=24%, E-value=7e-12, Identity=87%"; Hit description =Glutathione peroxidase 1
  Pfam annotation: Domain name=GSHPx; Domain location=10-59; Score= -39.5; E_value=0.002; Accession=PF00255.10; Description=Glutathione peroxidase
MAASSTATSVHDFIVKDASGKDVDLSTYKGKVLLIVNVASQWYESSAAETFLIFLLFVIVWPMAKAYQ

SEQ ID NO: 56976 - protein, 452 aa, Zea mays
  Coding DNA Sequence Number=SeqID_15197
  Pfam annotation: Domain name=SPT2; Domain location=362-446; Score= -9.1; E_value=0.0026; Accession=PF08243.2; Description=SPT2 chromatin protein
MTIIVQGNHQEVEDEYGDEYYDQDEYDEEGSGAGDEYFEEEEPTEGQKEILELRERLKEQIRRKAKAAASCTAGRSSSLQIPQARDKFGSFFGPSKPVISRRVIEERKSLKELHSTVAREPRPSGKDIPSSSKVQSKVNGHQHKQKIVNQVKKKAEALKDNRDYSFLLSDDADLSSSPKEKPAARSSLTQRADREVMRTTVKSKAPTSQPARVSNGYGSKNKMSTQRHAEGRVDTMRKEAFLNRERVVSRDNERMHERVVSRGNERMHGSAINGSNQASTSKTTIQKLTSRGSIANKQASTDLNDAALRKSSVAPKHHFSEVDRSKSLQSQKDAVSWSETAAFFPMGQYLEQRRVQANDRVKQAERHIRPPSKSMPSRPVSSNGIRDDHAKRKQVVKRRFDDDDDEDDPLAMIRNMFGARIARQEDEEQLRLIEEEERREQERKRRKMARGR

SEQ ID NO: 56977 - protein, 309 aa, Zea mays
  Coding DNA Sequence Number=SeqID_15198
  Gene Ontology: Mol. function=DNA binding; Biological process =regulation of transcription
  Homolog annotation: Hit_ID=Q6JAH1; Match level="QueryCoverage=84%, HitCoverage=46%, E-value=3e-45, Identity=43%"; Hit description =Putative NAM protein
MASHDSRIADMAGGEAGEDERPSESGWDDDDKDDGKYPIGFRLKPTTAVKRPAASAHTGAPNKRTSLPDGRLARTRGEGGSGVRMPPVGVGAGAAGCHHGPGLPTHWPSARMPNANGQAPGQAPRMSRLGPPHRTSAIAPNSQGASATTTMMPPPNLDPGQPARLPSPQHPPPESAEEAYKNRVYARLIAEMNLQKAQQSEEAYKNRVYARMIAEMKLQKAQQQDSAARAEHEQQRIGQNASAEAEPGCSHDEGANRHAGVEVTAPPDQFPLPHGGYPYGRSNNDLAQRTHLQQSSSAVEKAPAAEKLL

SEQ ID NO: 56978 - protein, 59 aa, Zea mays
  Coding DNA Sequence Number=SeqID_15199
MTNAPTSYELSFPSLALEKRPIPTYLGSQAQEEYLHPASQTEEADQATKQKKAVSREPG

SEQ ID NO: 56979 - protein, 296 aa, Zea mays
  Coding DNA Sequence Number=SeqID_15200
  Gene Ontology: Mol. function=DNA binding; Cellular component =mitochondrion; Biological process=DNA integration
  Homolog annotation: Hit_ID=O24587; Match level="QueryCoverage=60%, HitCoverage=21%, E-value=4e-96, Identity=78%"; Hit description=Pol
KYTHDLLKRFGMKDAKPAKTPMGTDGHTDLNKGVKRILRYLVATPCFGLWYPKGSTFDLIGYSDSDYAGCKVDRKSTSGTCQFLGRSLVSWNSKKQTSVALSTAEAEYVAAGQCCAQLLWMRQTLRDFGYNLSKVPLLCDNESAIRMAENPVEHSRTKHIDIRHHFLRDHQQKGDIEVFHSRRRIEREKVDLDHERLPLHSDERGCYVKGLESRHKDLALVEAGCRYARSGLQLSRKTRQRKVPITDFDARIEVYEAWSKATYIILRTTDVARAKGKPALSWDASWSLYRYPWLRT

SEQ ID NO: 56980 - protein, 820 aa, Zea mays
  Coding DNA Sequence Number=SeqID_15201
  Gene Ontology: Mol. function=solute:hydrogen antiporter activity; Cellular component=integral to membrane; Biological process =potassium ion transport
  Homolog annotation: Hit_ID=Q9ZTZ7; Match level="QueryCoverage=33%, HitCoverage=47%, E-value=1e-103, Identity=70%"; Hit description=KEA1
  Pfam annotation: Domain name=Na_H_Exchanger; Domain location=560-820; Score=-20.8; E_value=0.0018; Accession=PF00999.11; Description =Sodiumhydrogen exchanger family
  Subcellular localization annotation: CTP_CleavageSite=93; ConfidenceScore=5.34e-01
MDLSRLASVAGPSRAAPRAGLQIGAAGNGFRVCSLRHRGAGNGRLTSAAALLRGSSGLFYLAPARGGPPRLRARGRPRCQGSDSLAYVDGPLEAAKGSGEVYDDDATSSGPDDDDNDKGPADVDGLREMLQRCRNELEVARLNSTMFEEKAQRISESAIALKDRAEGAQRDVSAAVATVQEVIVKEADAKEAVQKATMALSMAEARLQLASEALDAKRGSVGPMEVSIEGVEEEALVSAQEEIKDCRAALLRCEEELERIQEQKMNLQKEVDRLTELAEKAQLDASKAEEDVTNIMVLAEQAVALEMKATQRVNDAEAVLLKAEKVISSVDTVVELTSLAEEQKSAEEDSVSEGYEYSSNGTDDVPVRDEVSSIERLMVGDLTVEGIEQLEPSREIYDEASSDKMSVEPQKEAEPDSDKLKQGKKQEMERKEFTKEPLSAQKSLKKRSSRFFPASFFSSKADGEFTPTSVFRGLMKSVQKQAPKLVVGILLLGAGAFFLNRAEKSQLFQQQEIATSIGKVTSTTKPIVREIRQIPQRVKKLIELLPHQEVNEEEASLFDILYLLLASVIFVPLFQKIPGGSPVLGYLAAGVLIGPYGLSIIRNVHGTKAIAEFGVVFLLFNIGLELSVERLSSMKKYVFGLGSAQVLATTAAVGVIAHRFAVLPGPAAIVVGSGLALSSTAVVLQVLQERGESTSRHGRATFSVLLFQVGFQAIAEAMGMAAVKAVAAITAIIAGGRLLLRPIYKQIAENQNAEIFSANTLLVIFGTSLLTARAGLSMALGAFLAGLLLAETEFSLQVESDIAPYRGLLLGLFFMTMEPF

SEQ ID NO: 56981 - protein, 269 aa, Zea mays
  Coding DNA Sequence Number=SeqID_15202
  Homolog annotation: Hit_ID=UPI0000D9F167; Match level="QueryCoverage =31%, HitCoverage=36%, E-value=3e-27, Identity=64%"; Hit description =PREDICTED: similar to nudix (nucleoside diphosphate linked moiety X)- type motif 21
MVTRCAVGVLRPVDLLILADDTTATPPDANLVPLLRLHRPHRPLSALRYGGVRDPTGQPHLGPGAVSTRHRRVCVCVNCEASSKLHNLFLSLYPRVPDTRRVGECVAVWWRPNFETVMYPYCPPHITKPKECKKLFIVHLSEREYFAVPRNLKLLAVPLFELYDNVQRYGPVISTIPQQLSRFQFNMLHLSSLFSSSSSHIAMFPLENEVRSAFSKYSTRELKNILNKAFLPKKQTNKPDFGYKGPVYGLRLTGLTDFSSIRNQYHTRN

SEQ ID NO: 56982 - protein, 286 aa, Zea mays
  Coding DNA Sequence Number=SeqID_15203
MSIRHHDGTAGDEIVEDVVGESVSPKREDLAPPMRVVGVRLVQHNRHEGPDVVHSSVLSVESGRCGQRRVQGRGGLGCERRSLMVYRRMGEDETLRGGHLGSQGYAHGTLVLQGEGRGSLALLRGSHDGLDGGDGGDQRGVGGERRVGRDDVVLGGYSEGGKARRGASAPLLRCGRRRRCVGEGPEADDVGGASNNELAAGDEAGQGGADAQGGSQESGKEVLVGDDVQGRSATPAVRATSAAAPRPFMPVRGGRKATMRRGAGLADGEGGGRSEGSQGRLGWGDG

SEQ ID NO: 56983 - protein, 163 aa, Zea mays
  Coding DNA Sequence Number=SeqID_15204
MAKMAWCPEMAGATVIDRDGATFASGGHGVHERAAERVDGGGARCGGARGRARAWGWRGAYGQRGAYGQRRARVGRKRGRERTGGGGVVWRGEQWAAAHASVDGDGSAGGRGARGRRRAMVAGGVLDGKRGEKYKREKNDELKLWAGRVLAPASSGIKWAERR

SEQ ID NO: 56984 - protein, 126 aa, Zea mays
  Coding DNA Sequence Number=SeqID_15205
MAVHVELQSTDERNCLSPKREDHLRQTVRNRKIAATGSLAMTVSKRSSGKSLHISCSMTSILFEEGAFSRFRSLRGRLQGGDWETKTQMAGFYVNLRKIEAGRILSLWPDRQCSEGLFGLHPGNIA

SEQ ID NO: 56985 - protein, 140 aa, Zea mays
  Coding DNA Sequence Number=SeqID_15206
  Gene Ontology: Mol. function=protein dimerization activity
  Homolog annotation: Hit_ID=Q2QNH1; Match level="QueryCoverage=89%, HitCoverage=14%, E-value=2e-29, Identity=53%"; Hit description=HAT family dimerisation domain containing protein, expressed
MAPSKKRKRRKEVEEFIESQRGAMDKFVRTNTRTSSNEDQPNLAIVVVAEQPNTNEEDHDPTLEENVDINTNGNDVTGHDPIFDSSHIGNDSFDEQSVPTEDIYDPRNWGNLDNKSRDILVEKGPIREENIVFPLDANAF

SEQ ID NO: 56986 - protein, 112 aa, Zea mays
  Coding DNA Sequence Number=SeqID_15207
MDRVGSGGGERIEQWGTTHCWRGGFGDCGRGGFAAVAALRARRGLRGRGGFRDSGREDGGGDCGRRESRARQNIASLRQNIANVDAYTKGIRSSRDYVIYFNMSLTVLWVCG

SEQ ID NO: 56987 - protein, 102 aa, Zea mays
  Coding DNA Sequence Number=SeqID_15208
  Subcellular localization annotation: CTP_CleavageSite=66; ConfidenceScore=5.10e-01
SGTSKPSSAGNQRSAAGPTGLWEQLQTDLMGVGASGLAETRHSPPVGPTSPTVFVLASASQPRDPRGAHGGDRHCSSRSICDLGARSIAAITGGVGARFGNQ

SEQ ID NO: 56988 - protein, 92 aa, Zea mays
  Coding DNA Sequence Number=SeqID_15209
MAGAPDSVRWRTGLSALVLNVLAENLDALKCGGWEVARLRVGRRELISGELVIGVGHWRVGQSIRLAELVDEVVETVLGMVFSKIHGRVGGI

SEQ ID NO: 56989 - protein, 483 aa, Zea mays
  Coding DNA Sequence Number=SeqID_15210
  Gene Ontology: Mol. function=ubiquitin-protein ligase activity; Cellular component=ubiquitin ligase complex; Biological process =protein ubiquitination
  Homolog annotation: Hit_ID=Q6ZC56; Match level="QueryCoverage=66%, HitCoverage=39%, E-value=1e-110, Identity=66%"; Hit description =Putative arm repeat-containing protein
  Pfam annotation: Domain name=Arm; Domain location=228-268; Score =40.6; E_value=5.4e-09; Accession=PF00514.13; Description =Armadillobeta-catenin-like repeat
  Pfam annotation: Domain name=Arm; Domain location=269-309; Score =26.7; E_value=8.2e-05; Accession=PF00514.13; Description =Armadillobeta-catenin-like repeat
  Pfam annotation: Domain name=Arm; Domain location=310-350; Score =42.2; E_value=1.7e-09; Accession=PF00514.13; Description =Armadillobeta-catenin-like repeat
  Pfam annotation: Domain name=Arm; Domain location=351-390; Score =21.6; E_value=0.0028; Accession=PF00514.13; Description =Armadillobeta-catenin-like repeat
  Pfam annotation: Domain name=Arm; Domain location=391-431; Score =20.8; E_value=0.0049; Accession=PF00514.13; Description =Armadillobeta-catenin-like repeat
  Pfam annotation: Domain name=Arm; Domain location=433-473; Score =10.6; E_value=0.58; Accession=PF00514.13; Description=Armadillobeta -catenin-like repeat
  Pfam module annotation: Pfam domain module=Arm::Arm::Arm::Arm::Arm::Ar m; Domain location=228-268::269-309::310-350::351-390::391-431::433 -473
PINGRTSDKSPFSENSSRENKFGSPDHISSDDSCHPNLLHENFDSDDQISKASSSEDTDDSETGPPKLLVASTEANKLMCNASIDGSDAIKQSRKDGFHASDVEPRLQRNSISGDIGTSASSSSNHLEVVEKDKEEQVSSNSIASETTRNGRTVTCSKPNFQPRLGGVRSRNHLVWQQRSDKAVSLDSRSDFAIVDNKVRKLIEDLKNERTDPERAAIGELLVLSRHNMESRISIANHGAIPFLVNLLYSADPSMQENAVTVILNLSLDDNNKITIASADAIKPLIHVLETGNPEARANSAATLFSLSVNEENKAKIGRSGAIKPLVDLLRDGSAQGKKDAATALFNLSIFHENKARVVEAGAVKPLVELMDPAAGMVDKAVAVLAILATVQEGRNGIAQAGGIPVLVEVVELGSARAKENAAAALLQLCTNNSRFCSLVLQEGAMPPLVALSQSGTARAREKAQVLLSYFRNQRQVGKVTRR

SEQ ID NO: 56990 - protein, 97 aa, Zea mays
  Coding DNA Sequence Number=SeqID_15211
  Subcellular localization annotation: CTP_CleavageSite=17; ConfidenceScore=5.32e-01
MSVPSCALSPSLPLAARSDLRSARDSPSTICPSQPRSCNPDLAIGLIESSPTFLAINTTPSTLETPIYLVYGSCAAAGENGAAPSRPEKVKSPGTPS

SEQ ID NO: 56991 - protein, 299 aa, Zea mays
  Coding DNA Sequence Number=SeqID_15212
MNEVSEFRCFMRALPHYYEVELHNFNPNSITEVRSVHHTVCVGGCTLQLCSDWAVLEEMEVGAAVGALDPPQIAAGGTAEALGPRSHHGRGFCGLPLADGAGAGAGRLHLDEMTPEASVESSRMASIALSTDELLWQVKEIAGKADYSVVVPMRPEQGYVSLGFRTARPSALVDTVDREVCWLAAEEKKWKKDEAKKRPRKKMVARDSLEKRHRAQDREGIPLEASPSAEEEDDDDDDEGMEVREGFSPKVGPSSIAARAPTSAEPAPVPASAEEAEVMEGEATPLPMEAVVALAGAPA

SEQ ID NO: 56992 - protein, 146 aa, Zea mays
  Coding DNA Sequence Number=SeqID_15213
MTKDTGHGSRGGSTVIFSAIKMREEARGDEGLCRKKARTTFEVCPIALNDCVPSEEKLVERHSTSRLKREASSPQTPSNGSMTTRITRRYLLGRVSEPQADFDRKELRPLFGSPVNSSMETSCALPIKGSMMHSPFLLAERRQRGV

SEQ ID NO: 56993 - protein, 396 aa, Zea mays
  Coding DNA Sequence Number=SeqID_15214
KIKIGDKIAQFGSCTFTPRTGKTSAEVVEIVPYARNKWGNWWDFWFYVAPGDIEGLPSLPLAILCSHCYVAFPQFEVAKEDEDEGALRYAAHLSSRCDLVEEFTAYGLVRSPVFAVDLRSRDVAAFVHEVEAEAVMIVGNYTAKTKTLRRWDICGSNARLNHVFELNRLPYGSYTEGDSADTADHRGKQPRPSADEGPSRDKAPGAVARKRKLGTAAEELGLMAFGHFVGELLEMCAAPGETMSSPELRETSARMLKVTGAVMEKDRQDAQQKKHRAPVRLVDPRREVKVAWPSMKSAASGAGMPLPATPASGRRPPSPPCIAETVVAAAGGVSTELSVDDYLVGGVAMFDAQTGLPPAGAVSGQLAVVPAAASAGPVVAATETKGDTGALRGPMG

SEQ ID NO: 56994 - protein, 153 aa, Zea mays
  Coding DNA Sequence Number=SeqID_15215
MGKNNKRKHEPTPPSEDFGDSEYSEEEFSSESEGSPAPIPLCELSDDSDDSQGLAAEVWTYIRAVERSGLEGSDESEYSSDEEDSDGGGKDEDGDDDDDEGGGGGDGDGSGRGGSSGSKDGDGGGSRGGSGGGGSSRGSNRGGSDSGSNRASG

SEQ ID NO: 56995 - protein, 143 aa, Zea mays
  Coding DNA Sequence Number=SeqID_15216
MWGPPCLSFFHLVTELPRSSRDLLATATIAQQPRVARENRDRALRGLGDKSPASLAPFHYQLPVCFKPRPTAARREEEGRPPRPILVLSAVFLGEVDSASEGGHKIRRNLLTRPNSIALSIRRWLALLCRGILPPRSDLTIVP

SEQ ID NO: 56996 - protein, 123 aa, Zea mays
  Coding DNA Sequence Number=SeqID_15217
MAVYQGLRQAVSLTRASAELNSGLIIDVSILNGHIQQPPRGGPPDDRGQRLSSPSNERLQDWPMRMNHSLEGASVGMKVNLALGQSNEVITNPRLTVMLQVARDFTWQQIRQHQPSTGGVEGM

SEQ ID NO: 56997 - protein, 75 aa, Zea mays
  Coding DNA Sequence Number=SeqID_15218
MALCGDWRGFDLFAYDNIFENLNLLATIPLCKLLGLMFLALHLKAATFSRPGLKVQTTLMQVHKIEIEEFNVNNI

SEQ ID NO: 56998 - protein, 93 aa, Zea mays
  Coding DNA Sequence Number=SeqID_15219
MAHTTTAWFRSPDDAAAEIPTTAAMAQPLLSLSVWALAAVRVEKWAKARVFFSGPKVGSEAQVKKQQIFVVSVPRWYLKKKIKTEATGGRVLR

SEQ ID NO: 56999 - protein, 138 aa, Zea mays
  Coding DNA Sequence Number=SeqID_15220
MGAGAAGAVEGGPYGELDIFGAPPMNIVDDRPPEASSGSRAAKNMPTRTRGHDGAGTSRGSKEETPIPPLVPPILAEAIAALLNATADNTRFLREMAGNQIHPQGGRGQNQAPEILLIWSFWKVVPLFSLKQTNSGGG

SEQ ID NO: 57000 - protein, 66 aa, Zea mays
  Coding DNA Sequence Number=SeqID_15221
MARVACTVRGKRLDGGVSVLSVGVNPFWSLETRILSWVLIDSYRRYFSDMKTWSPPYTVVTSELRM

SEQ ID NO: 57001 - protein, 161 aa, Zea mays
  Coding DNA Sequence Number=SeqID_15222
  Homolog annotation: Hit_ID=Q6Z6S1; Match level="QueryCoverage=77%, HitCoverage=24%, E-value=2e-35, Identity=69%"; Hit description =Putative fibroblast growth factor 2-interacting factor
MKSNNFVSNAVLTGTEETVRAASKRLTQGMADFSKAISSAKTEEEKTKIKGDQQTSTRTMRSYNNILAMAQILGASSSYNIGGRYKMVIHQIVHMFANHSRGKRSQPATTNGNGPANKKGRGGMHNQLVNRAFEGLSRGGRGTGRGRGRGGRGRRGWGGYR

SEQ ID NO: 57002 - protein, 368 aa, Zea mays
  Coding DNA Sequence Number=SeqID_15223
  Gene Ontology: Mol. function=fibroblast growth factor binding; Cellular component=spliceosome; Biological process=anti-apoptosis
  Homolog annotation: Hit_ID=Q6Z6S1; Match level="QueryCoverage=66%, HitCoverage=45%, E-value=1e-127, Identity=89%"; Hit description =Putative fibroblast growth factor 2-interacting factor
  Pfam annotation: Domain name=API5; Domain location=1-368; Score =114.8; E_value=2.4e-31; Accession=PF05918.2; Description=Apoptosis inhibitory protein 5 (API5)
MSHLTPRADERSFEDWWRKASKSTRKDKRKGLNCVIIPGAWCLWLHRNRTVFDGICPSIQRMQQLFSDEFSCWLMAGARSLGQLGLTGLTELDDSIEAHRLFILLYVHWFLLLMRTLYWPDSLQPLFKHVEQGSEIREKIICFLRDKVFPLKAELLKPQAEMERFITDLVKKSVQDVTGSEFELFMGFLRSLSIFGDSAPRESFQELIEIIQAQADLNSQFNVSDIDHIERWISCMYMALPIFMRGASASKFLNYFVKQIVPAFEKIPEEKKLDLLKTIASSSPYATAQDSRQLLPSVVQLLNKYMPGKKVDDINHNYVECLLYTYHHLAHKTPNTTNSLCGYKIVTGQPSDRLGEDFTEHYKDFTER

SEQ ID NO: 57003 - protein, 67 aa, Zea mays
  Coding DNA Sequence Number=SeqID_15224
MAERLPRGAQDPLPHIFLLELELNPAHAPPSIPSRPWHRLSALHLEVVSAVVEHRCELPAPSPPVSP

SEQ ID NO: 57004 - protein, 196 aa, Zea mays
  Coding DNA Sequence Number=SeqID_15225
MVVGKNASSREKLLPKNLIFLSREGLLSSSSFGWKVARSLLVGCCSHSFSVDLLERLSTDFDSCTLRHVDSHSPIVSSPSGQAQGRGHARPPGRRRRTRVGPMPPRQVCQVLQRLPRHCGPAFVILLSLGTRRREQREHEGHRLVEPSKLGLGTGEHHEGAETDQLLVQQEHHGRIHNRVNGTMHAGFASWVDAAA

SEQ ID NO: 57005 - protein, 151 aa, Zea mays
  Coding DNA Sequence Number=SeqID_15226
  Homolog annotation: Hit_ID=Q6QP51; Match level="QueryCoverage=34%, HitCoverage=28%, E-value=8e-13, Identity=74%"; Hit description =Putative growth-regulating factor 1
MQVACNRTTGMHPFDFIASSTEAQAHTSCNRRAGYYVRETAPPLAPMQRLLDCGTIAATRGNPACGPTVPIEHIDHGDRERGYFERDPSPRRKRAPSPPTDQGFKGWPLGRVRRSPQSTRASSSLLIRGSKAGPSKGFDSRLRAPGLCAHY

SEQ ID NO: 57006 - protein, 112 aa, Zea mays
  Coding DNA Sequence Number=SeqID_15227
  Subcellular localization annotation: CTP_CleavageSite=55; ConfidenceScore=5.03e-01
MPLVLPTVVPARGNLTHPLVLAAAGSCLGFLFLQADQQLGGAPPTTRAAPPLTPRATPPTRFRLPPLAHLRYPLAFAEKLVLAVFGAWLATISLAIYKAFDHLGMLKKKKCF

SEQ ID NO: 57007 - protein, 393 aa, Zea mays
  Coding DNA Sequence Number=SeqID_15228
  Gene Ontology: Mol. function=hydrolase activity, hydrolyzing O -glycosyl compounds; Cellular component=cellulose and pectin -containing cell wall; Biological process=carbohydrate metabolic process
  Homolog annotation: Hit_ID=Q9FIU7; Match level="QueryCoverage=95%, HitCoverage=72%, E-value=1e-139, Identity=62%"; Hit description=Beta- glucosidase
  Pfam annotation: Domain name=Glyco_hydro_1; Domain location=21-390; Score=350.3; E_value=3.2e-102; Accession=PF00232.9; Description =Glycosyl hydrolase family 1
MAVLTLVNILISFAACAEALRRADFPQGFVFGTASSAYQYEGAVNEGQRGPTIWDTLTRRPGRVIDFSNADVAVDHYHRYKNTGPTENYPETTSLTFDWQEDVDLIKDIGMDAYRFSISWSRIFPNGTGEPNEEGLNYYNSLINTLLDKGIQPYVTLFHWDLPQALEDRYGGWDDFVHYASTCFKEFGDRVKHWITFNEPHNFAIEGYDLGIQAPGREGKSSTEPYVVAHNILLAHAGAFHTYKQHFKKEQGGIIGIALDSKWYEPLSDVDEDTEAAARAMDFELGWFLDPLMFGHYPPSMQKLVGDRLPQFSARASMLVSGSLDFVGINHYTTLYVRNDRMRIRKLVMNDASTDAAVIPTGSVRMAAHSALGHVQADEAHQRKVRESARDHY

SEQ ID NO: 57008 - protein, 197 aa, Zea mays
  Coding DNA Sequence Number=SeqID_15229
  Gene Ontology: Mol. function=structural constituent of ribosome; Cellular component=intracellular; Biological process=translation
  Homolog annotation: Hit_ID=Q653V9; Match level="QueryCoverage=90%, HitCoverage=86%, E-value=1e-78, Identity=81%"; Hit description =Putative 50S ribosomal protein L24, chloroplast
  Pfam annotation: Domain name=KOW; Domain location=83-116; Score=41.4; E_value=3.1e-09; Accession=PF00467.19; Description=KOW motif
  Subcellular localization annotation: CTP_CleavageSite=50; ConfidenceScore=5.55e-01
MASLSISALGAATASSSSFWGNRLATYSAPQPGVCSCFPIPFRSADGLVRFMVKICPIEMRLKRWERKKCKPNSLPVLHKMHVRIGDTVQVIAGREKGKVGEVTRLFKHNSTVIVKDLNLKSKHKKGTDDEPGEIVMIEGPIHSSNVMLYSKEKSVVSRVGHKFLEDGTKVRYLVKTGEVIDSVEKWVKVFKEGNSE

SEQ ID NO: 57009 - protein, 219 aa, Zea mays
  Coding DNA Sequence Number=SeqID_15230
  Gene Ontology: Mol. function=electron carrier activity; Cellular component=intracellular; Biological process=electron transport
  Homolog annotation: Hit_ID=Q653W1; Match level="QueryCoverage=86%, HitCoverage=45%, E-value=4e-27, Identity=40%"; Hit description=Zinc finger (C2H2 type) protein-like
MAGSNPAIHQEQRRAWKRTLRRSKKMAILWWTALKKSLSCKSQDSCDVIKRDDASRGASASARGLGLKRSFLLQPSLSLPRSGCSRSISNLRDVIHSARFQAPPAVRSKCDSPMSVESSDVLNAVTHDVLLAAGGPASALAASDVGAVPPYAHSPLLMRCATGARLSQRKSPLRLGGGDLGSPIPAWAPCVEVGVRCNRCGARFPNDNALESHHLVFHA

SEQ ID NO: 57010 - protein, 122 aa, Zea mays
  Coding DNA Sequence Number=SeqID_15231
  Gene Ontology: Mol. function=nucleic acid binding
  Homolog annotation: Hit_ID=Q8H6I0; Match level="QueryCoverage=89%, HitCoverage=7%, E-value=2e-25, Identity=51%"; Hit description =Putative gag-pol polyprotein
MSGAHAKKEMVTGEKPATSHEKAPSGESGNKKREESPPHVKSHRSGDKKKKMNKVVYYETDSSSPSTSGSDTLSVTSKRHERKKFSMIPLRYPRISKRTPLPSVPLGKPPVLTVKIIVGDHN

SEQ ID NO: 57011 - protein, 161 aa, Zea mays
  Coding DNA Sequence Number=SeqID_15232
  Gene Ontology: Mol. function=hydrolase activity, acting on ester bonds; Biological process=lipid metabolic process
  Homolog annotation: Hit_ID=Q69KY5; Match level="QueryCoverage=64%, HitCoverage=41%, E-value=7e-43, Identity=81%"; Hit description=GDSL -motif lipase/hydrolase-like
  Subcellular localization annotation: CTP_CleavageSite=64; ConfidenceScore=5.08e-01
MANNMPSSQIHSRLRCSCSWLLLLVLHFSSSASRAAGGKVPALIVFGDSTVDPGNNNFIPTVARANFPPYGRDFDRGVATGRFSNGRLVTDFLSEAFGLPSSVPAYLDPSYTIDQLATGVSFASGGTGLDDLTANIPGQVRSRNDPQRHHFNKLRDTRCIT

SEQ ID NO: 57012 - protein, 40 aa, Zea mays
  Coding DNA Sequence Number=SeqID_15233
MDDMDRVHLAVDDMDSAARSAACSSQRPMSPRPTDVYLMI

SEQ ID NO: 57013 - protein, 115 aa, Zea mays
  Coding DNA Sequence Number=SeqID_15234
MAGERRSMTVAGGQSTSCPVRSARRPARDGLAALEAMLSVGTERRKRGDGVREKGEGGLPFIEQSSGHARLHQQVADVDTIEISLENADSDYVFGHSLTVEKADSDIDQITSQLS

SEQ ID NO: 57014 - protein, 78 aa, Zea mays
  Coding DNA Sequence Number=SeqID_15235
MDEPTFVLTRRIQDPQPDNPPHPDHARSDIDGLDLPDRTGTDGQVVISSLTIGTEQQDPADGDEVHRCHDTKVPTPQF

SEQ ID NO: 57015 - protein, 144 aa, Zea mays
  Coding DNA Sequence Number=SeqID_15236
MAPPVDVVGLRPRLGDVEAPPRPRSSLSSVVEVESEPLGRAKRSSSSSRAKPKSEPWVGRSGVHRLPGLSPSPSPGLGGVEFVVFPGLSPCPSPGSGGAEFAVFRGLSPSPSPGSGGAEFAVFRDLARVRALGRAERSLPSSGT

SEQ ID NO: 57016 - protein, 112 aa, Zea mays
  Coding DNA Sequence Number=SeqID_15237
  Subcellular localization annotation: CTP_CleavageSite=26; ConfidenceScore=5.22e-01
MTLGQNQSKNASIHYGPSDGKASTVRDQARTVRSVKNRKSEVEEPVTEDPSAQQIEVAEQELVEACLVIGDPEYTPTESLQQSSRTLTDESNQDIEEIQQGYNAYIHMKQDK

SEQ ID NO: 57017 - protein, 400 aa, Zea mays
  Coding DNA Sequence Number=SeqID_15238
  Gene Ontology: Cellular component=chloroplast inner membrane
  Homolog annotation: Hit_ID=Q9SIY5; Match level="QueryCoverage=65%, HitCoverage=38%, E-value=4e-41, Identity=35%"; Hit description =Chloroplast lumen common protein family
  Subcellular localization annotation: CTP_CleavageSite=72; ConfidenceScore=5.79e-01
MALPPSSSPSSLSAASAQPTPLHLHLPTKAPGRLPLLPFSRAALPPPLRLRIARTSLSPGTPLPRALLPPPSASADAAASDVGGGGAGFGGHDDDGHNHHGGEGGGDDGGHGDDAGHGDDAPGGGDARGEALFVLAQLGRKLDSLPSDLAAAVDSGRIGADIVRRFTELEANGFFRWLLQFQGFRERLLADELFLTKLGIECGIGLVAKTVAEFQKRGDNFFKEIEVVISDVVMAIVADVMLVYLPAPTIGLQPPLARNAGAIANFFYNCPDNTFQIAMAGRSFSLLQRIGAFVIGTSVTNAALKAKRAVDKDLEDEVMEIPVVSTSVAYGVYMSISSNLRYQLLAGVIEQRMLEPLLHNQKLLLSAMCFIVRTGNTFLGSLLWVDYARWIGVQKSHEEA

SEQ ID NO: 57018 - protein, 1008 aa, Zea mays
  Coding DNA Sequence Number=SeqID_15239
  Gene Ontology: Mol. function=protein kinase activity; Cellular component=integral to membrane; Biological process=protein amino acid phosphorylation
  Homolog annotation: Hit_ID=Q8LQ10; Match level="QueryCoverage=96%, HitCoverage=97%, E-value=0.0, Identity=68%"; Hit description =Putative receptor-like protein kinase
  Pfam annotation: Domain name=LRRNT_2; Domain location=36-76; Score =49.7; E_value=9.9e-12; Accession=PF08263.3; Description=Leucine rich repeat N-terminal domain
  Pfam annotation: Domain name=LRR_1; Domain location=105-127; Score =13.6; E_value=0.73; Accession=PF00560.23; Description=Leucine Rich Repeat
  Pfam annotation: Domain name=LRR_1; Domain location=129-151; Score =16.7; E_value=0.086; Accession=PF00560.23; Description=Leucine Rich Repeat
  Pfam annotation: Domain name=LRR_1; Domain location=153-172; Score =13.3; E_value=0.92; Accession=PF00560.23; Description=Leucine Rich Repeat
  Pfam annotation: Domain name=LRR_1; Domain location=175-194; Score =12.3; E_value=1.4; Accession=PF00560.23; Description=Leucine Rich Repeat
  Pfam annotation: Domain name=LRR_1; Domain location=200-224; Score =6.2; E_value=20; Accession=PF00560.23; Description=Leucine Rich Repeat
  Pfam annotation: Domain name=LRR_1; Domain location=226-248; Score =14.4; E_value=0.42; Accession=PF00560.23; Description=Leucine Rich Repeat
  Pfam annotation: Domain name=LRR_1; Domain location=250-272; Score =14.0; E_value=0.54; Accession=PF00560.23; Description=Leucine Rich Repeat
  Pfam annotation: Domain name=LRR_1; Domain location=274-296; Score =9.0; E_value=5.9; Accession=PF00560.23; Description=Leucine Rich Repeat
  Pfam annotation: Domain name=LRR_1; Domain location=298-320; Score =15.3; E_value=0.22; Accession=PF00560.23; Description=Leucine Rich Repeat
  Pfam annotation: Domain name=LRR_1; Domain location=322-344; Score =17.1; E_value=0.062; Accession=PF00560.23; Description=Leucine Rich Repeat
  Pfam annotation: Domain name=LRR_1; Domain location=346-368; Score =12.6; E_value=1.3; Accession=PF00560.23; Description=Leucine Rich Repeat
  Pfam annotation: Domain name=LRR_1; Domain location=370-392; Score =14.1; E_value=0.51; Accession=PF00560.23; Description=Leucine Rich Repeat
  Pfam annotation: Domain name=LRR_1; Domain location=393-415; Score =11.6; E_value=1.9; Accession=PF00560.23; Description=Leucine Rich Repeat
  Pfam annotation: Domain name=LRR_1; Domain location=418-440; Score =15.8; E_value=0.15; Accession=PF00560.23; Description=Leucine Rich Repeat
  Pfam annotation: Domain name=LRR_1; Domain location=442-464; Score =14.5; E_value=0.38; Accession=PF00560.23; Description=Leucine Rich Repeat
  Pfam annotation: Domain name=LRR_1; Domain location=466-488; Score =8.1; E_value=8.8; Accession=PF00560.23; Description=Leucine Rich Repeat
  Pfam annotation: Domain name=LRR_1; Domain location=490-512; Score =15.5; E_value=0.19; Accession=PF00560.23; Description=Leucine Rich Repeat
  Pfam annotation: Domain name=LRR_1; Domain location=514-536; Score =13.8; E_value=0.62; Accession=PF00560.23; Description=Leucine Rich Repeat
  Pfam annotation: Domain name=LRR_1; Domain location=538-560; Score =17.4; E_value=0.051; Accession=PF00560.23; Description=Leucine Rich Repeat
  Pfam annotation: Domain name=LRR_1; Domain location=562-585; Score =7.9; E_value=9.5; Accession=PF00560.23; Description=Leucine Rich Repeat
  Pfam annotation: Domain name=Pkinase; Domain location=751-994; Score=- 79.4; E_value=0.00078; Accession=PF00069.15; Description=Protein kinase domain
  Pfam annotation: Domain name=Pkinase_Tyr; Domain location=751-994; Score=-116.5; E_value=2.5e-05; Accession=PF07714.7; Description =Protein tyrosine kinase
  Pfam module annotation: Pfam domain module=LRRNT_2::LRR_1::LRR_1::LRR_ 1::LRR_1::LRR_1::LRR_1::LRR_1::LRR_1::LRR_1::LRR_1::LRR_1::LRR_1: LRR_
  Pfam module annotation: Pfam domain module=Domain location=36-76::105- 127::129-151::153-172::175-194::200-224::226-248::250-272::274 -296::298-320::322-344::346-368::370-392::393-415::418-440::442
  Pfam module annotation: =514-536::538-560::562-585::751-994::751-994
MAATTAANSPALLLFLLLLLIGGAPPATKADMPMAVNEEVLGLVVFKSALSDPTGALATWTESDATPCGWARVECDPATSRVLRLALDGLALSGRMPRGLDRLGALQDLSLARNNLSGPLPPGLSLLGSLRSLDLSYNAFSGPLPDDVARLASLRYLDLTGNAFSGPLPPAFPRTLRFLVLSGNQFSGPVPEGLASGSPLLLHLNVSGNQLSGSPDFAGALWPLERLRTLDLSHNLFSGPVTDGIARLHNLKTLSLSGNRFFGAVPADIGRCPHLSTIDLSSNAFDGHLPDSIGQLASLVYLSASGNRLSGDVPAWLGKLAAVQHLDLSDNALTGSLPDSLGDLKALKYLSLSRNQLSGAVPASMSGCTKLAELHLRDNNLSGSIPDALFDVGLETLDVSSNALSGVLPSGSTRLAETLQSLDLSGNQLTGGIPTEMSLFFKLRYLNLSRNDLRAPLPPELGLLRNLTVLDLRSTGLYGAMPADLCESGSLAVLQLDGNSLSGPIPDSIGNCSSLYLLSLGHNGLTGPIPAGISELKKLEILRLEYNNLSGEIPQQLGGLENLLAVNISHNRLVGRLPASGVFQSLDASALEGNLGICSPLVAERCMMNVPKPLVLDPNEYTHGGGGDNNNMGTNGGGVGAPRKRRFLSVSAMVAICAAVAIVLGVIVITLLNVSARRRAEAAGGVGPGHGQKKEVDESVVTSSSSTTKSSPAPAPGGKGKGKLAAGKMVTFGPGSSLRSEDLVAGADALLGKATEIGRGAFGTVYRAPVGDGRVVAVKKLAAASMVRSREEFEREPGGAAARRRRRRGDDVGGAGSACCPGRPGRWRTCTMRSRPAAGALQREAEQHLIADAECNPAVGEFGLARLLADGGGRQQVAMGGGRFQQGGAGYVAPELACQSLRVNEKCDIYGLGVLILELVTGRRAVEYGDDDVVVLVDQVRALLEHGNALECVDPGMGGRVPEEEVLPVLKLGMVCTSQIPSNRPSMAEVVQILQVIKAPVGRMEGSF

SEQ ID NO: 57019 - protein, 68 aa, Zea mays
  Coding DNA Sequence Number=SeqID_15240
MDFSQQSACKGSGVLANISGLWLMNSRCLSWGGTGGGGGGNASASELQPLDQSQSVEDSKDSYLLVVV

SEQ ID NO: 57020 - protein, 311 aa, Zea mays
  Coding DNA Sequence Number=SeqID_15241
  Gene Ontology: Mol. function=binding
  Homolog annotation: Hit_ID=Q5JJU1; Match level="QueryCoverage=99%, HitCoverage=100%, E-value=6e-47, Identity=40%"; Hit description =Armadillo/beta-catenin repeat-like
  Pfam annotation: Domain name=Arm; Domain location=146-187; Score=8.3; E_value=1.1; Accession=PF00514.13; Description=Armadillobeta-catenin -like repeat
  Pfam annotation: Domain name=Arm; Domain location=188-231; Score=8.1; E_value=1.2; Accession=PF00514.13; Description=Armadillobeta-catenin -like repeat
  Pfam annotation: Domain name=Arm; Domain location=40-79; Score=17.9; E_value=0.038; Accession=PF00514.13; Description=Armadillobeta -catenin-like repeat
  Pfam module annotation: Pfam domain module=Arm::Arm::Arm; Domain location=146-187::188-231::40-79
MEVKAHTARVLVARLRGATAARDGAAAAAVSEIRLATKTDPEIRAPLADAGALPLLAAQLQRASPAAVDAAAALLNISISARDQVASAPGVLDALTAALRSGDAAHHAASLVHSLLCGGEPHRATVPGATRATKDALRALFGAALYPPARAALVSLGAVQALFALVLTDARDGVVEDATAVVAQVAGCAESLEAFRWVSGVRILLDLVESGGAATPRARENAAAALLNLVVAGGEAAAADVVAVGGAEETVRELAEDSAASPRGKAKAEALLRALEDAAVRRREHRLADFLDGLVQSDPYISSPASASTHG

SEQ ID NO: 57021 - protein, 98 aa, Zea mays
  Coding DNA Sequence Number=SeqID_15242
MVFALRLRLCSVSFQQDHPRSGSSDFDGFYKQILSVAETEMEAEDFVGSVTEAEIEKGAALRGGHIHLNCVFSLMGLEYEEHKAKPKRGRKTSTGVPA

SEQ ID NO: 57022 - protein, 165 aa, Zea mays
  Coding DNA Sequence Number=SeqID_15243
MREKHGPDVDWMIADFDTVVAYAAGGDVRHGRFRTYTIVPQQGVTPTPLANPASSHGDASQGSGTGPHNQMMPQRCRGYAASDAYANAASDTNADAASDTNVDATATDVVGISSHGAITNALGICSMADTATPSRGVGSGSCPTPDDAMNFVDPIFNTTDDPPQV

SEQ ID NO: 57023 - protein, 159 aa, Zea mays
  Coding DNA Sequence Number=SeqID_15244
  Homolog annotation: Hit_ID=Q69NI4; Match level="QueryCoverage=64%, HitCoverage=11%, E-value=6e-30, Identity=65%"; Hit description =Putative nodule inception protein
MATVNGDINRRQLRNPPPSAFAVDLEPRVDTIAPRQQVAAPGGALWEHRDAPRSLGLHAFTPHGKDKVELSFGGNSADRRGDASWTSLAGTSQQESELAALRMHGMFSPGGQGPSLSGVQATAEGSKAKRRTKAEKTVSLQILRQYFTGSLKDAARSLG

SEQ ID NO: 57024 - protein, 874 aa, Zea mays
  Coding DNA Sequence Number=SeqID_15245
  Gene Ontology: Mol. function=zinc ion binding; Cellular component =nucleus; Biological process=cell cycle
  Homolog annotation: Hit_ID=Q1S0W0; Match level="QueryCoverage=90%, HitCoverage=69%, E-value=0.0, Identity=55%"; Hit description=PHD -finger, putative
  Pfam annotation: Domain name=HEAT; Domain location=497-535; Score =6.7; E_value=6.6; Accession=PF02985.12; Description=HEAT repeat
  Pfam annotation: Domain name=HEAT; Domain location=736-771; Score =11.3; E_value=1.8; Accession=PF02985.12; Description=HEAT repeat
  Pfam annotation: Domain name=HEAT; Domain location=778-810; Score =0.5; E_value=37; Accession=PF02985.12; Description=HEAT repeat
  Pfam annotation: Domain name=PHD; Domain location=567-613; Score=8.5; E_value=0.0081; Accession=PF00628.19; Description=PHD-finger
  Pfam module annotation: Pfam domain module=HEAT::HEAT::HEAT::PHD; Domain location=497-535::736-771::778-810::567-613
MYKRAPQKLKSKFYRMTIRPAMLYGPFGGPGYHNQEREKHFEHLTPNMSKTRNGSAFSQDEINSHREHFRNELTPDSVASKKPKVRKKEINNSVSTSPHSIPNNQEVIATFCEAVEDFCGKAEIPDDGDGGDWLSIPLDDVKVLVNEITSVRSKRILHEVPMDTVTRLLDVIDRQIRCSQGLSIDVKENSDAFDAEPLVFSALESSHAALAIMTHHDMPKQLYREELIERIIDFSRHQITDCMAASNPTFRALYKPAGNVANDGDDDEGDLENGQVSKRRRTATNLSMRKSSNRVSASVYSAVQKLCLILGFLKELLTTVRLSDSCILQLAKTCFTTFLVDNMQLLQLKAIGVICTVFSSYTQHRSYLVDETLHLLRKLQFSKNAVRTYHLADEDQKQIQMITALLVHLVQFSAIVPDSLKGTVDWTTIVDASSDADYYPIQCHEAATEACCRFWTDVLQRFTAAKSQDMSETKGIIDNLVQDFLTILNLPEYPAAASILEVLCVLLLQNAGLKSKDINARCFAIDLLGGIASRLKRDSVVCSEEKLWILQDFTDKGSDGSIFLKNKCCVCLGGRGINIACNECGRCFHSDCMGAGSQDNLQRDSVCPLCFCKQQLNVLQSYCQSQIKENGKKTAASASKKSAKPTEVSAVEIVQQILLSYLQEAGSQDDGNLFTRWFYLCIWNKDDQHSQEKIIYYLARLKSKEILRDSGNGLAISRDSAKKICLALGQKNSFCRGFDKILALLLASLRENSPVIRAKALRAVSCIVEADPEVLGDKRVQYAVEGRFCDSAISVREAALELVGRHIASHPDVGLKYIEKVAERIKDTGVSVRKRAIKIIRDLCASNPNTDTTHAFVEIISRVNDEESSVQVDS

SEQ ID NO: 57025 - protein, 206 aa, Zea mays
  Coding DNA Sequence Number=SeqID_15246
  Subcellular localization annotation: CTP_CleavageSite=44; ConfidenceScore=5.33e-01
MSRAAVTGSENTPADASRIQGLPLPSPALTPSAMPGFMVAQALEASTGGDTKLLARACFTSDSGRPCPPRSHPLSPPRRLLPPPPRPHLPPSVGLATKVEIVEIDLTEEDTSSLAHDSPSSTSIEVVGIRRLEEAIHGVIDHDSPSSTSIEVVGIRRLEEAIHGVIPEGCFGLEHRTVRWCTGQCPVRQAASAEEAALRNLLTAYG

SEQ ID NO: 57026 - protein, 209 aa, Zea mays
  Coding DNA Sequence Number=SeqID_15247
  Gene Ontology: Mol. function=binding
  Homolog annotation: Hit_ID=Q7XHN9; Match level="QueryCoverage=90%, HitCoverage=20%, E-value=1e-81, Identity=73%"; Hit description =Tetratricopeptide repeat(TPR)-containing protein-like
MWKLCYVFENLCSHERLLLQIEIASSCSDLYHVVGETYWVATRCDSMAFRGGKTGFDFAIRTPCTPSRWEEYDEEMTAAWEAICEAYCNDTNPTRDPGVLDAVKDAILRMTYYWYNFMPLSRGSAVVGYVVLLGLFLAANMDITASIPPGVQVDWEAILSPDPGTFVDAVKPWLYPSTKISRCLKDYTDVSCAFSTTGSVVAALTSVDP

SEQ ID NO: 57027 - protein, 149 aa, Zea mays
  Coding DNA Sequence Number=SeqID_15248
MGKSKKGGSSSHHSGDKRKREPTPPSEDFGDSEYSEEEFSSESKGSPVHASPPASSNDSDDSQGIAAEVWTYIRAVERVGLEGSDESEVSSDEENSSDSSEEGGGDDDGEGDDDDGGDDDGDGDDGEGGGKGGKGDGKDGRKGSNKASG

SEQ ID NO: 57028 - protein, 578 aa, Zea mays
  Coding DNA Sequence Number=SeqID_15249
  Homolog annotation: Hit_ID=Q10F41; Match level="QueryCoverage=89%, HitCoverage=85%, E-value=3e-61, Identity=57%"; Hit description =Nodulin family protein, putative
  Pfam annotation: Domain name=Cation_efflux; Domain location=32-309; Score=-135.9; E_value=0.1; Accession=PF01545.11; Description=Cation efflux family
  Pfam annotation: Domain name=MFS_1; Domain location=33-482; Score =5.6; E_value=0.00018; Accession=PF07690.6; Description=Major Facilitator Superfamily
  Pfam annotation: Domain name=Nodulin-like; Domain location=28-284; Score=301.0; E_value=2.2e-87; Accession=PF06813.4; Description =Nodulin-like
  Pfam module annotation: Pfam domain module=Cation_efflux::MFS _1::Nodulin-like; Domain location=32-309::33-482::28-284
  Subcellular localization annotation: CTP_CleavageSite=10; ConfidenceScore=5.07e-01
MAAFGCVHAAAATLGGGARFAVRVLCGRWFMLFASTMIMTTSGGAYIFGAYSKALKASLEYDLDTLDTIGFSKNMGISLGIVSGLINEVAPPWVVLVTGAAMNLAGYLMVYLAMSAAAHRPPVWLMCLYIFVGTVSQTFASTGALVTSVRNFPDDRGVVLGMLLGYAGFSGAVFTQLYRAFDGGGGGEAATLLLLLACLPTAVSLLFSFTVRVIPPRRPPISSSTAERKGVLGFLGVSVLVGVYLLALNVVEVKAATRLPRRFYHVTNTLLVLILVVGPLVVVVKQEYHQQTSSHSHSTLQQDVPRAVPGPGEQEINYSVRQALCSQHMLLLFVATACGIGGIMTVVDNMSQIGQSLGHSQRTITMLVSLVSLANYAGRVLAGLGSDYVVARYRLPRPLALTATLLLAFFGHLLVAAGLRDGVYAASLIMGFCLGSLWTVLFAVVSEVFGLKHFSTLYNLSTLASPVGSYVLSVQVAGRMYDREAQRQGHRRQDELACVGVQCFRASFEIIAGVTLLGVAVSMVMAWRTRAFYHDRTRFLFSAAAADVADTAATTDSSSSRQEDENKTIAASQSIGIC

SEQ ID NO: 57029 - protein, 180 aa, Zea mays
  Coding DNA Sequence Number=SeqID_15250
  Gene Ontology: Mol. function=binding
  Homolog annotation: Hit_ID=Q7XHN9; Match level="QueryCoverage=96%, HitCoverage=23%, E-value=9e-72, Identity=75%"; Hit description =Tetratricopeptide repeat(TPR)-containing protein-like
KEMALYIASKANLEFSQFNIDDDVDPLFKVKYRMAGLAAIEIAQKVSKAWRFLRNPKNIAKLVRKRDKLNMSQNRGGYCSTSTLAGSPTSSPNEDRVSSGISLSWQDVYNIAVKWRQISEPCDPVVWVNKLSEEFNSGFGSHTPMLLGQAKVIRYYPYYQRVLETAKTIMLDFEILTVEK

SEQ ID NO: 57030 - protein, 153 aa, Zea mays
  Coding DNA Sequence Number=SeqID_15251
MACRGRMGELLRKGEEDRDVGWRRKKGQGYRERARWEEIGLEASHGDGSQPLVHEESFGQRRAVRGGSSSGRWEERRVLRERKNKTDFSPAHVELGCDGDLTDWMRTQRGLDWASPWPGLAAAPLRWIAGPPNHRAGLHGHRPVENGGQESRD

SEQ ID NO: 57031 - protein, 553 aa, Zea mays
  Coding DNA Sequence Number=SeqID_15252
  Gene Ontology: Mol. function=structural molecule activity; Cellular component=actin cytoskeleton; Biological process=signal transduction
  Homolog annotation: Hit_ID=Q6AT64; Match level="QueryCoverage=99%, HitCoverage=100%, E-value=0.0, Identity=74%"; Hit description =Putative ankyrin
  Pfam annotation: Domain name=Ank; Domain location=177-209; Score =28.5; E_value=2.3e-05; Accession=PF00023.20; Description=Ankyrin repeat
  Pfam annotation: Domain name=Ank; Domain location=237-269; Score =15.8; E_value=0.16; Accession=PF00023.20; Description=Ankyrin repeat
  Pfam annotation: Domain name=Ank; Domain location=287-319; Score =26.9; E_value=7.1e-05; Accession=PF00023.20; Description=Ankyrin repeat
  Pfam annotation: Domain name=Ank; Domain location=321-353; Score =28.6; E_value=2.1e-05; Accession=PF00023.20; Description=Ankyrin repeat
  Pfam annotation: Domain name=Ank; Domain location=411-443; Score =43.3; E_value=8.4e-10; Accession=PF00023.20; Description=Ankyrin repeat
  Pfam annotation: Domain name=Ank; Domain location=444-476; Score =36.6; E_value=8.3e-08; Accession=PF00023.20; Description=Ankyrin repeat
  Pfam annotation: Domain name=Ank; Domain location=477-509; Score=2.6; E_value=13; Accession=PF00023.20; Description=Ankyrin repeat
  Pfam annotation: Domain name=Motile_Sperm; Domain location=4-126; Score=-6.4; E_value=0.054; Accession=PF00635.16; Description=MSP (Major sperm protein) domain
  Pfam module annotation: Pfam domain module=Ank::Ank::Ank::Ank::Ank::An k::Ank::Motile_Sperm; Domain location=177-209::237-269::287-319::321 -353::411-443::444-476::477-509::4-126
MDRLVIPEPSNEVMIRVEPGMQARGELTLRNAMHTMPVAFRLQPAVRGRFAVRPHTGILAPLAAVTVEVLYLASAPPDRPSGSGRGGGSRGEDAFLLHSVVVPGAAVKEPVTALDSVNPEWFSARRKHVFVDSGIRASFVGASVAARLVEAGAVEALREVLDRSEPEWRAADAADEYGRTLLDLAVGLGRADIVQVLLEYGADADKPSRGRTPLEAAAASGECLIAELLLANGATPAGSDAIHVAAAAGHDDVLKLLLGKPAPASLASSSSASFSSSFTSIDAAGRDGKTPLRLAAEAGRRDAVKALLAAGARADARCGTDGATALHAAARRGDEAVARLLLSHGVAGTATVRDAAGKTAFEIAAQEGHGGRILQFLGLGEAILAAARKGEVRSVRRAADGGASVEGRDAHGWTPLMRAAFKGRADTARDLIARGADIDAADAEGYTVLHCAAEAGRADVVDLLLKNGANAKATTVKGRTAADVAAAAGRSKVVRLLDRASVIGRKQDVTEKVAKGGSMDRKQRGRKGSSGAIRFGGGKEGFEAAVVTFGWSH

SEQ ID NO: 57032 - protein, 101 aa, Zea mays
  Coding DNA Sequence Number=SeqID_15253
MATMVVEPSMVSVAVHDLAYVVTVMVGDVQRGPTVEGVGVISVMFLKLMPHVEEQEGRIWGGVCADRSVYKVKFKRRDDEIAAGDRLTIEKRREVRVEALR

SEQ ID NO: 57033 - protein, 69 aa, Zea mays
  Coding DNA Sequence Number=SeqID_15254
MQKAKLLVWFVAAVLACAVVLTDLAHRTVRCTPDSPVLPSDRWLGHVSRADRAADRWLTGQSGAHRTVR

SEQ ID NO: 57034 - protein, 260 aa, Zea mays
  Coding DNA Sequence Number=SeqID_15255
  Homolog annotation: Hit_ID=Q7XE46; Match level="QueryCoverage=35%, HitCoverage=44%, E-value=4e-07, Identity=36%"; Hit description =Hsp20/alpha crystallin family protein, expressed
  Pfam annotation: Domain name=HSP20; Domain location=25-133; Score= -5.8; E_value=0.0018; Accession=PF00011.11; Description=Hsp20alpha crystallin family
MQAAAAPPLPPPRRRVYTAVDPRCEWRSTEDADTLVVDVSGFKKDELKVVYSVRRKKLKATGGRQPDGAPRLKVTGERRADGGRWARFLKVVPVPRSCDAGTIQARLDTERAQLSVVLPKPKGSSSSSKDSQKERHPAERAHSLEELMRADTAGGSSGRSDGSMRSAQEDAGNGKVEDKEQKQDRHQAMEEPRHDQAMNVQDLPGGDGGATENAARNNDGDGKGEDGRWWRKIRNLRVLSFLLVLALVGVGATVLYIALL

SEQ ID NO: 57035 - protein, 204 aa, Zea mays
  Coding DNA Sequence Number=SeqID_15256
  Gene Ontology: Mol. function=structural constituent of cell wall
  Homolog annotation: Hit_ID=Q3SNT6; Match level="QueryCoverage=66%, HitCoverage=22%, E-value=2e-07, Identity=30%"; Hit description =OmpA/MotB
MDPRSPIHDASLASNSRTPFLSGTPEGHGFGRDENDCPRLHPPDLRNPRRSKPPANPAPASTARRPEYSPPQTARPTDRRRDPQARKSFRESRRDHRNPFAASPNNPEPPLQSVRRVAPAAYSAANQNPRAQSPACGPELNPPSQARGKTQMAPAGGQQQPMKRPRPTEFSGPPAPSPPALDLRCCSRLLPVWCPLDLSVAAGA

SEQ ID NO: 57036 - protein, 627 aa, Zea mays
  Coding DNA Sequence Number=SeqID_15257
  Gene Ontology: Mol. function=lithium ion binding; Cellular component =integral to membrane; Biological process=calcium ion transport
  Homolog annotation: Hit_ID=Q8W0Q9; Match level="QueryCoverage=86%, HitCoverage=94%, E-value=1e-152, Identity=58%"; Hit description=K -exchanger-like protein
  Pfam annotation: Domain name=Na_Ca_ex; Domain location=176-313; Score= 108.4; E_value=2.1e-29; Accession=PF01699.14; Description =Sodiumcalcium exchanger protein
  Pfam annotation: Domain name=Na_Ca_ex; Domain location=475-618; Score= 86.6; E_value=7.8e-23; Accession=PF01699.14; Description =Sodiumcalcium exchanger protein
  Pfam module annotation: Pfam domain module=Na_Ca_ex::Na_Ca_ex; Domain location=176-313::475-618
MNSSACVVVIPAEMDNEPARLDLLRLFTLQTSRPIHESSAPRPPAHLVKTASPRPAPRSPTPARPARACFLLLLLLLLTSSSLLAAPTSGRAESGGGSVLGDASSSSGKARGDSCEELQSISGGEARCAYLRAQNSPCSPAGYVDYLRLFYCAFAGAPAAAACAALALWLAVLFYLLGDTASEYFCASLEGLSAALRLPPAVAGVTLLSLGNGAPDVFASVVSFASGDDGGGGVGLGSALGGALFVSTVVAGAVALAVGARGGAVVEWRGFVRDLCFLLLALCYLLAVLVHGEVTVWVAASFVSLYVGYVVLVWTSHCCTEKGKPAADSLSAPLLLDDDDDVGDVVPSLPSHTKTEASSTATSRVIATLHCLAAALCMPLYLPRRLTIPDIAGHRWSRPYAVASAALAPVLIAVTWSSQRHNPTSWHGLAVLVGGALLGLLLAALAAATTDASSPPRGRRRRVPWLAAGFVMSVLWAYTLARELVALLVAIGYVAGIKPSVLGVTVLAWGDSLGDLVSNVAMAVHGGPGGAQTAVSGCYAGPLFNTVVGLGLSLALAAGAQHPAPFAVPVDAAAYEAVGFLGAALAWALFVVPVRGMRIDRVYGVGLIAIYLCFFAVRVSETLGLWS

SEQ ID NO: 57037 - protein, 198 aa, Zea mays
  Coding DNA Sequence Number=SeqID_15258
  Subcellular localization annotation: CTP_CleavageSite=70; ConfidenceScore=5.01e-01
MDPKLLRHGNLRSIVLPPVPRLARASAAATASPRKIFLYERMEVSAGLRLPPVAAAASLLGCRSASVPPRAAASHSVRVCGAVGTNGYADLVLLFDIAACRAPGSLDSVIRAAAINGLQRNRSNLESLFCYDKSVPEQDIGEPSGLNLEKKNVGDKPPCSSCEAKGALLCATCAGSGLYVDSILESQGIIVKVRCLGK

SEQ ID NO: 57038 - protein, 135 aa, Zea mays
  Coding DNA Sequence Number=SeqID_15259
MDEVARGRASRPREERAPASKLLGEVAGRTSAAGNKGPGELQAGNREKQRPSWGSKTPWEGRELAPTKKKTEPEPGLGGDAEKHQGEERDGCAAGLEEQGLGTMPPWASAGEKHLLPPASTGRKAGSAARGRRSA

SEQ ID NO: 57039 - protein, 185 aa, Zea mays
  Coding DNA Sequence Number=SeqID_15260
  Subcellular localization annotation: CTP_CleavageSite=48; ConfidenceScore=5.02e-01
MAPPSISELLGLRPLFNRNPGGSAQTTPRLRTPTVDGGLNNRNPKWLRLDRRDCEPVHAISREIEIQWFGFYETQTNHIRPIQDLRHPLYPSQHPCLTESGPPAQIERCPRIVFHTRQRTVAQAPTAVPMAGVQCPRGAGALNLTPTGAKRCSGTCELIRRFLTMIREMQSLRPGARRGVGDGKL

SEQ ID NO: 57040 - protein, 175 aa, Zea mays
  Coding DNA Sequence Number=SeqID_15261
MDVRDPKAGGRSWVRWRHWTSRRGFTGDEGGGHDRALGVWGRAQACSGRSGALSRGRNTGMEAPESVKHGEAERLGDGRDVVKPQVDGGGLRLRKKCSGERGPDELEQKRANQGVSRVADGKAELTEVTDAAAAFGERRWSCLVARAGRERGRGSSAEGANEQGKWAIGVRALKG

SEQ ID NO: 57041 - protein, 131 aa, Zea mays
  Coding DNA Sequence Number=SeqID_15262
  Homolog annotation: Hit_ID=Q6H664; Match level="QueryCoverage=64%, HitCoverage=43%, E-value=2e-10, Identity=45%"; Hit description=Auxin- responsive protein-like
  Pfam annotation: Domain name=Auxin_inducible; Domain location=1-95; Score=33.0; E_value=1.1e-08; Accession=PF02519.5; Description=Auxin responsive protein
MKLQRAQEGAGGHLLTKTPSRHDAERTVTKGCATFWVGEEGEAPRRVAVPVARLGHPRMLELLGEAREEYGFAHQGAVVVPCAVERFMRAVEASASAGNRHEHHRHGHHHHHFRLPHIHIARCFRPSHVVA

SEQ ID NO: 57042 - protein, 184 aa, Zea mays
  Coding DNA Sequence Number=SeqID_15263
  Homolog annotation: Hit_ID=Q9LW53; Match level="QueryCoverage=43%, HitCoverage=74%, E-value=1e-07, Identity=35%"; Hit description =Arabidopsis thaliana genomic DNA, chromosome 3, P1 clone: MLM24
MSRSGDSVSGIASRRVRAVEVELWIHAEMQAPRGDGFLGKRKERDYCPHPSVSPTEQAAPLQRQPPPFARPDPRGVKLDRPAVRFGAKPPLPQQGAKVGGNGNKLLAGYLAHEFLRCGTLLGERRLEPPRLKEKDPAAPSPAPTPAPEPSRRYADVSRLLMTGGARIPGVVNPSQLGRWLRIKE

SEQ ID NO: 57043 - protein, 75 aa, Zea mays
  Coding DNA Sequence Number=SeqID_15264
MGKRRGEASPAAGVHGKKGRVGCTREKKRPPTIFISFPTGLALAKRYTLNFEWSYNKMLAKDLSQARDSLVARHS

SEQ ID NO: 57044 - protein, 139 aa, Zea mays
  Coding DNA Sequence Number=SeqID_15265
MGGRSELGSDAQQLGLVSSDDHREEREKQGAEHENNGDLGERMDSTADGGHGRSGARTGEQTEGGARAGEQAPRRGRRADERSRKQGAGASSKRGTGRSSGRAGAPRRHEREESSRQPRRRLLTQLKGLRSDSKRERQR

SEQ ID NO: 57045 - protein, 67 aa, Zea mays
  Coding DNA Sequence Number=SeqID_15266
MAPRFYARDTQEHASSFVDFAGKKAKYVSRYRITDSDSLDAAMEATDHQRQISVGVVFVTVGMNALI

SEQ ID NO: 57046 - protein, 124 aa, Zea mays
  Coding DNA Sequence Number=SeqID_15267
MVGSLPESPHEHTAKAFQKLPLPEYLISVRLLSNALRSLATATATPDANGRPSSLLVHYVRLDIFYRSQKHLEPTELYLKGYTLKDQRSKFNGPVELNIKNVGTVELNIKNVGTVELNTKNVRF

SEQ ID NO: 57047 - protein, 655 aa, Zea mays
  Coding DNA Sequence Number=SeqID_15268
  Gene Ontology: Mol. function=phosphopantetheinyltransferase activity; Cellular component=integral to membrane; Biological process =macromolecule biosynthetic process
  Homolog annotation: Hit_ID=Q8H012; Match level="QueryCoverage=83%, HitCoverage=91%, E-value=0.0, Identity=85%"; Hit description =Putative endosomal protein
  Pfam annotation: Domain name=EMP70; Domain location=53-551; Score =986.7; E_value=8.5e-294; Accession=PF02990.7; Description =Endomembrane protein 70
  Pfam annotation: Domain name=Oxidored_q3; Domain location=311-507; Score=-34.9; E_value=0.083; Accession=PF00499.10; Description=NADH -ubiquinoneplastoquinone oxidore
  Pfam module annotation: Pfam domain module=EMP70::Oxidored_q3; Domain location=53-551::311-507
MAASPAAAAALLILFALGAAGGVAADGSDHRYKMYEPVPLYANKVGPFHNPSETYRYFDLPFCSPEKVKEKSEALGEVLNGDRLVDAPYKLDFRSEVESKAVCSKKLTKEDVVKFRNAVAKDYYFQMYYDDLPLWGFIGKVEKGGKADPSEWKYYLYRHIIFDILYNNDRVIEINVHTDQSALVDLTEDKETNVDFLYSVKWKETPTPFEKRMEKYSSSSNMPHHLEVHWFSIINSCVTVLLLTGFLATILMRVLKNDFVKYAHDEEAADDQEESGWKYIHGDVFRFPKNKSLFSAALGTGTQLFALTTFIFLLALVGVFYPYNRGALFTALVVIYALTSGIAGYVATSFYSQLEGTNWVRNLLLTGCLFCGPLLLTFCFLNTVAIAYSATAALPFGTICVIVLIWTLVTFPLLVLGGIAGKNSKSEFQAPCRTTKYPREIPPLPWYRRTIPQMAMAGFLPFSAIYIELYYIFASVWGHRIYTIYSILFIVFIILLIVTAFITVALTYFQLAAEDHEWWWRSFLCGGSTGFFVYGYCLYYYYARSDMSGFMQTSFFFGYMACICYAFFLMLGMEDCPSAANLHGAAKVKSEVEWKGKEVASRRRCRLAANASPTHQVPTVYMSRARMCVKPSQHKSSRSPQVSTPRAGSRKKGGG

SEQ ID NO: 57048 - protein, 461 aa, Zea mays
  Coding DNA Sequence Number=SeqID_15269
  Gene Ontology: Mol. function=nucleic acid binding; Cellular component= intracellular
  Homolog annotation: Hit_ID=Q10PE6; Match level="QueryCoverage=51%, HitCoverage=56%, E-value=1e-76, Identity=58%"; Hit description=Zinc finger, C2H2 type family protein, expressed
  Pfam annotation: Domain name=zf-C2H2; Domain location=108-130; Score =30.5; E_value=6e-06; Accession=PF00096.16; Description=Zinc finger, C2H2 type
  Pfam annotation: Domain name=zf-C2H2; Domain location=213-235; Score =18.5; E_value=0.024; Accession=PF00096.16; Description=Zinc finger, C2H2 type
  Pfam annotation: Domain name=zf-C2H2; Domain location=240-261; Score =14.5; E_value=0.28; Accession=PF00096.16; Description=Zinc finger, C2H2 type
  Pfam module annotation: Pfam domain module=zf-C2H2::zf-C2H2::zf-C2H2; Domain location=108-130::213-235::240-261
  Subcellular localization annotation: CTP_CleavageSite=31; ConfidenceScore=5.37e-01
MPPKPFHTQTHSDIRTLEAFHPDSLKRSKLMALLVKSHHQMLVSSSTSSSSPSASQQRQPPPPPPSSSCLTEQQPSPAKRKRRPPGTPDPDAEVVALSPRTLLESDRYVCEICGQGFQREQNLQMHRRRHKVPWRLVKRAPPPPAAAAGGGGGAADANNSSGTGGGAGGGAPRKRVFVCPEPSCLHHDPAHALGDLVGIKKHFRRKHGGRRQWVCARCAKGYAVQSDYKAHLKTCGTRGHSCDCGRVFSRVESFIEHQDACNSSRMRGEAVVVAVPVPVPPPSALPVIRPAVPRHPPTVAVAPPPPPVLQLLPASAGVSAPRTSSATTTASPSTTTTASHHQAKPHAATTTKLQLSIGPIVTAAAAAAVDCGEDESKAEELRRAVEEKAAADAARERARGEAAAAERALDEARPRPGSVTCHACRHRSLAVAVVRGAAEGHAAGPAVACDSIRGGGLGAGI

SEQ ID NO: 57049 - protein, 144 aa, Zea mays
  Coding DNA Sequence Number=SeqID_15270
MLRHVEGQGRGRGVRHWGGVEAAHGEVEAGSPWEQGIVGRAERQRVRAQGSDGGMRVRGGGSGKELGFGRDREYRKRVFLGAGGIGSSWAQAGRGSRGVGRRVRLILGAVAVERREREEKGGEREAGWEKQVAAAKGRRHARLG

SEQ ID NO: 57050 - protein, 105 aa, Zea mays
  Coding DNA Sequence Number=SeqID_15271
MSVDLWCAGHALARGLGGVDRVASVIEDWRDTRLVVKDVQRGAVLTTDHCIHLVIADIGRDLRKIRFKLVLENPNKTPISCDSFTSSIELKICGVLENIFSQNVL

SEQ ID NO: 57051 - protein, 1138 aa, Zea mays
  Coding DNA Sequence Number=SeqID_15272
  Gene Ontology: Mol. function=protein binding; Cellular component =membrane; Biological process=defense response
  Homolog annotation: Hit_ID=Q53P15; Match level="QueryCoverage=90%, HitCoverage=99%, E-value=0.0, Identity=53%"; Hit description=NB-ARC domain, putative
  Pfam annotation: Domain name=LRR_1; Domain location=1007-1036; Score =1.1; E_value=1.8e+02; Accession=PF00560.23; Description=Leucine Rich Repeat
  Pfam annotation: Domain name=LRR_1; Domain location=783-804; Score =1.7; E_value=1.4e+02; Accession=PF00560.23; Description=Leucine Rich Repeat
  Pfam annotation: Domain name=LRR_1; Domain location=806-827; Score =9.4; E_value=4.9; Accession=PF00560.23; Description=Leucine Rich Repeat
  Pfam annotation: Domain name=LRR_1; Domain location=829-850; Score =14.4; E_value=0.42; Accession=PF00560.23; Description=Leucine Rich Repeat
  Pfam annotation: Domain name=LRR_1; Domain location=852-873; Score =11.7; E_value=1.9; Accession=PF00560.23; Description=Leucine Rich Repeat
  Pfam annotation: Domain name=NB-ARC; Domain location=263-692; Score =139.2; E_value=1.1e-38; Accession=PF00931.13; Description=NB-ARC domain
  Pfam module annotation: Pfam domain module=LRR_1::LRR_1::LRR_1::LRR _1::LRR_1::NB-ARC; Domain location=1007-1036::783-804::806-827::829 -850::852-873::263-692
MTISCAAAEEALQWQSGQQVALLPEEAMQQQPSCPAKKLVTDDKCHGRVRSCTLSVGQTDGVRGEDDDGDVDGEETWHRLPALSHSRHVHTCTTRPPHIGSLTDSRNTSEMAEAALLALSKIGSYLGGEAATFIATKFSNLIELPNTVRRIRRELLMMNIFIRKTGASYLSDELLKAWITEVRILAYRVENIIDNFSYHSLQFKQDPKGKKLANGLSYGLVFSGIAADLAQIEKEIEHVSKLKNLWLNSVHELLHTQVSSAEQQFPQYSLPQILKDENLVGLKEEREQLKEWLIPNAPVNMTNIPALKVVTLSGMGGMGKTTLLTSVYDKLKDIFEIHAWLTVSQTYRSVDTLLKELLKIVSASEHTTLVNNDYQKEVIVPVDIDIRDKKQLKPDVIDKMGILDLKSTLKAVLKHKRYIVVLDDVWNRCVHDGISDVFEDCGKESRIVITTRKQDVAALATPGYQLNLNPLDIKDALQLFCTKAFPNKNHFDWTSVLLEHAKDMMKRYEGLPLEKCPLELQELATHIVRKCEDFSVSKCPSELQDLATYTVNKFKGFSLSACPSELQNLATDIVNHCKDLPLVKCPSELQEIAIDIVKKCRGLPLAIVSVGSRLSSRKQIVPVWRQMCNELPCELEKDDQVRGILNLSYYDLPSDLRNCFLYCSLFPEDYHFSKDDLVRLWVAEGFVEKKGDNTPEEVAEGYLTELIHRNMLQLVENDELGRVNTCKMHDILRELALHISKAEMFGTVNDFGAMVQMDTDVRRISSYGWKKMKKNKSKLKFPHLRTLMASDTIVDYVPSILSESKYLTVLELQNSDFQALPTSIGNLFNLKYIGLRNTRITSLPDSIKNLSNLQTLDVKSTSIKALPPGIVNLTKLRHLLADKFADKNQSEFRYFVGVDAPEGLSNLEELQTLETVQASMDLPEQLDNLLQLRSLWVDNITSAHCAGLFATLSTMPLLSSLLLSAADEKETLLLNHFNPTCTKLHKLIVRGLWSLTGCPILQNHGRYLKYLALSRCHFVGDPLVVLASTVPNITYLRLNNIPSPPTLDLLEGSFPQLKTLVLKNMNDVSLLKISSGALPVIECLYITSLPKLQTVPRGIKSLSSLKKLWLLGLHSNFKARWDMEGMQKDLQHVLEIRT

SEQ ID NO: 57052 - protein, 82 aa, Zea mays
  Coding DNA Sequence Number=SeqID_15273
  Homolog annotation: Hit_ID=Q94IM7; Match level="QueryCoverage=46%, HitCoverage=5%, E-value=2e-09, Identity=76%"; Hit description=P-type ATPase
MGENSQMIAKIVVVCNDPIIAHSEHQYVATGMPIEAALKPEEHEGRRGQTGEEGKADGTIDESASAISISYRVHFQKPGVVC

SEQ ID NO: 57053 - protein, 395 aa, Zea mays
  Coding DNA Sequence Number=SeqID_15274
  Gene Ontology: Mol. function=protein kinase activity; Cellular component=membrane; Biological process=protein amino acid phosphorylation
  Homolog annotation: Hit_ID=Q2L855; Match level="QueryCoverage=80%, HitCoverage=92%, E-value=7e-44, Identity=34%"; Hit description =Resistance protein
  Pfam annotation: Domain name=Pkinase; Domain location=8-235; Score= -46.6; E_value=8.7e-06; Accession=PF00069.15; Description=Protein kinase domain
  Pfam annotation: Domain name=Pkinase_Tyr; Domain location=261-381; Score=-149.2; E_value=0.0026; Accession=PF07714.7; Description =Protein tyrosine kinase
  Pfam module annotation: Pfam domain module=Pkinase::Pkinase_Tyr; Domain location=8-235::261-381
MDLGLEDRRKEESAGQGGALTERRAAARDREAQGGGGGRESWICARGGDGGHEVLDESSGIDWTMRFKIILGICNGLHFLHEERSEAIVHLNLKPSNIMLGDDMNKPRTLTKNVVGWIGYIAPEYHYRGEISVKSDIFSLGVLILEIVTGLKRDLNIQDISSELLIDNVSKNWTEMSHIESKYPSLEEQHLLQVKRCIELGLNCVESDPKKRPTVGSIIGKLKEISHEASIHKFMEKKLQLITEFPREPKLHFIEVITGDFANEREIGKGSFGVVYKGVLQNGEVVAVKRLLVVAKTNLDKQYLNEVSSLIDLNHRNIVKLFGYCNEIQRKLVESHGTYVFADTEERILCYEYLPRGSLDKYLYGVLYPFKSPFTVLVSHVNFSLSSSILTNITP

SEQ ID NO: 57054 - protein, 230 aa, Zea mays
  Coding DNA Sequence Number=SeqID_15275
  Homolog annotation: Hit_ID=Q6QP51; Match level="QueryCoverage=48%, HitCoverage=55%, E-value=5e-15, Identity=45%"; Hit description =Putative growth-regulating factor 1
MDKVSSKEDLDFFVALDGVSASEAGAIEGPSNRAPLPTINGERAELEESRWMLLAKTTGEVLGPCCLGELELRALFEGEELELILSKLRPLKGHDLASPEPSLGQEQQTQVDSRLARGRQGRSDRSHFASPLTDLTGKQRRLPCSDCCATRQGLGLNLDPGRRSPPRPIPRLGLNLDPGRRSPPRPTLGLGLNPDLGRRSPPRPTPGLGLNPDLGGVTASPDLGLGPTTP

SEQ ID NO: 57055 - protein, 201 aa, Zea mays
  Coding DNA Sequence Number=SeqID_15276
MDKDRQESSEKRVKLRYDWWTLVSRRRHNMLMDRSTEHRCRGWGIKAQRRATAVVAMPPHAALASADVGMPSPGKASRDARAKGTGKGATSGDMLDISVNDYLIEGVNEFDAHTRQGGGGLMSYASRVTCEGAANALSREGYRHFERNEEVEDLAGLEGSVATLDDGILEKGAEEQSSRVQADTGEPDAAGASHRVADEQV

SEQ ID NO: 57056 - protein, 95 aa, Zea mays
  Coding DNA Sequence Number=SeqID_15277
  Subcellular localization annotation: CTP_CleavageSite=56; ConfidenceScore=5.20e-01
MQSACNRAKWARPFDSNAPSMEAQAHTSCNRRAGCYVRATAPPLAPLPRLLDCGTSTSTRGNPACDPAVPARDRERGIPRKGSFSVKETGTEPPY

SEQ ID NO: 57057 - protein, 195 aa, Zea mays
  Coding DNA Sequence Number=SeqID_15278
MGDGKEGPRLGRARVGEKEDPCVRHGELGWVRAGNRIRSGEEAAGEEDVRREQGAQTLGRAAQWSRGMGASWGRAAAREKVPAMGRTTAGWASWGRVEGGERSGWTSSHGSRGKAPRRARGREAESERRKDKQGHTRHGRFGRMLERLGAMQESRSQDAMGGSRPWGREMETQPWIGRRNFVDIVEPKFLDRGET

SEQ ID NO: 57058 - protein, 107 aa, Zea mays
  Coding DNA Sequence Number=SeqID_15279
MCALDTVKRYMCLCPSPPDRDLALLLMSLLAESFPRPYAIKFVRPRSRQIAKLPAVCLPSSDFAGRRSLTRVPGPVGVMEFWFVRLIVDLTGVVKPSNLKGSRCPRG

SEQ ID NO: 57059 - protein, 462 aa, Zea mays
  Coding DNA Sequence Number=SeqID_15280
  Gene Ontology: Mol. function=RNA-directed DNA polymerase activity; Cellular component=mitochondrion; Biological process=RNA-dependent DNA replication
  Homolog annotation: Hit_ID=UPI00004C1731; Match level="QueryCoverage =90%, HitCoverage=33%, E-value=1e-172, Identity=65%"; Hit description= UPI00004C1731 related cluster
  Pfam annotation: Domain name=RnaseH; Domain location=37-153; Score= -14.4; E_value=0.0013; Accession=PF00075.14; Description=RNase H
  Pfam annotation: Domain name=rve; Domain location=212-333; Score =11.6; E_value=0.00064; Accession=PF00665.16; Description=Integrase core domain
  Pfam module annotation: Pfam domain module=RnaseH::rve; Domain location=37-153::212-333
MGETISFAPQKAIKFQVLADFVAEWVDTQLPAAPIQPELWTMFFDGSLMKTGAGTGLLFISPLGKHLRYVLRLHFPTSNNVAEYEALVNGLRIAIELGLVIDQVMKNSHCRDPKMEAYCDEVRRLENKFFGLELNHIARRYKETADELAKIASGRTTVPLDVFSRDLHQPSVKTDDTPEPEKVSALPEAPSARPEAPSAPEAPQALVGNAFRQGFYWPTAVADATRIKAPGGYTHLLVAIDKFSKWIEFTGRNFLDFCEDHRIRVDWAAVAHPMTNGQVERANGMILQGLKTWIYNDLNKFGRRWMKELPSVVWSLRTTPSRATGFTPFFLVYGAKAILPTDLEYGSPRTRAYDDRSNRTNREDSLDQLEEARDMALLHSARYQQSLRRYHAQGVRSRDLQVGDLVLRLRQDARGRHKLTPPLEGPFIIAKILKPGTYKLANSQGEVYSNAWNIRQLRRFYP

SEQ ID NO: 57060 - protein, 257 aa, Zea mays
  Coding DNA Sequence Number=SeqID_15281
  Gene Ontology: Mol. function=pectinesterase activity; Cellular component=cell wall; Biological process=cell wall modification
  Homolog annotation: Hit_ID=Q9M5J0; Match level="QueryCoverage=99%, HitCoverage=98%, E-value=1e-102, Identity=67%"; Hit description =Pectin methylesterase isoform alpha
  Pfam annotation: Domain name=Pectinesterase; Domain location=2-243; Score=538.6; E_value=6.5e-159; Accession=PF01095.10; Description =Pectinesterase
MENVEVGKKHVNLMFVGDGIGKTVIKASRNVVDGYTTFRSATVAVVGNNFLARDLTIENSAGPSKHQAVALRVGADLSAFYRCSFVGYQDTLYVHSLRQFFRDCDVYGTIDFVFGNAAVVLQGCNLGGEDPNQNTGISIQRCKVAAAADLAAAQSSTKTYLGRPWKQYSRTVYLQSELDSLVDPAGWLEWNGSFALDTLYYGEYMNTGPGAGTSGRVKWKGYRVITSAAEASAFTVGNFIDGDLWLAGTSIPFTTGL

SEQ ID NO: 57061 - protein, 157 aa, Zea mays
  Coding DNA Sequence Number=SeqID_15282
MAPPVDVAGLRPRLGRCGGSSEVEVESVFRGRGRVRAPSPSPSPGSGRAEFAVFLGLSPSPSPGSGGAEFRRLPGLSLSPSPGSGGAEFTVFQGLARVRALGRAERSFLWCVRSGLTACQPHSVKWHRSRSGAGGAVFLSDRSVERQSDGGHFGSVG

SEQ ID NO: 57062 - protein, 238 aa, Zea mays
  Coding DNA Sequence Number=SeqID_15283
  Gene Ontology: Cellular component=cell outer membrane
  Homolog annotation: Hit_ID=Q6BTJ4; Match level="QueryCoverage=62%, HitCoverage=30%, E-value=4e-15, Identity=32%"; Hit description =Similar to CA1621|CaIFF6 Candida albicans CaIFF6 unknown function
MEIGFFPTAEMQEFVQSLFHLIHVFPNQVSSSCMKKRMNNLTKWISTRMHDLLLANENSQPLAYRWPRPQTTDSASPDPRARTQPRPRKTNSASPDPRARTQPRPRKTDSASPDPRARTQPRPRKTNSASPDPRDRTQPRPRKTNSASPDPRARTQTRRQTTDSASPDPRARTQPRPRKTNSASPDPRARTQPRRRTTDSASPDPRARTQPRPRRSHRLARPRARTDHVTRGPSLPYP

SEQ ID NO: 57063 - protein, 185 aa, Zea mays
  Coding DNA Sequence Number=SeqID_15284
MVADLVLRAPRALAAVSWRAFLSSPWLRSPCPPPIFSPSRADLAVVLVIDATQSSTCCYPRGHRFTPSLYFHHPWRRSGDVLAAAPTSSTSPQSSMLGLSACYSSALLASTTLSPVSSPVVDAQVEDTPPSIHVFVLWVMLLLGVTTGRVRDPVSLCSLSASCVRIECQDYGERKAPAHQMSGVP

SEQ ID NO: 57064 - protein, 159 aa, Zea mays
  Coding DNA Sequence Number=SeqID_15285
MGGSTVCDGEPGQRCSARSVVAIWRPEPTARWVERKGRSRDPGRLGWATAWADKEMGTEQGEQRRERAPQKNPVTGAPSRASRKPACGLGEQGTRHGRRTELEDAAARREGVEAELSGHGEVGGGRHQSPRAGNPFLGAEQEGSAAMAGTRQAGGRSAA

SEQ ID NO: 57065 - protein, 54 aa, Zea mays
  Coding DNA Sequence Number=SeqID_15286
MPSGELEMCSLSEVGLSQGWKGARRVGKDGRGKLLKGEDGRGTDRTWTDEVGRC

SEQ ID NO: 57066 - protein, 351 aa, Zea mays
  Coding DNA Sequence Number=SeqID_15287
  Homolog annotation: Hit_ID=Q6IEK9; Match level="QueryCoverage=28%, HitCoverage=40%, E-value=4e-46, Identity=90%"; Hit description=WRKY transcription factor 72
  Pfam annotation: Domain name=WRKY; Domain location=246-305; Score =147.3; E_value=4.2e-41; Accession=PF03106.6; Description=WRKY DNA -binding domain
MAEEGKSGELSLVAYYNAAERANVKKITEEILDGLSDDSDDSEDFDFKEDTGDAEVEPMSKSNHVVFCKSTMKKGHIEVMKNNYFYDISIVRLGGEDTISRLEKDEVPQHGVHDTGTQPVYRMRAAAGQREGCTPLQLPAPPAPTTSLPPAALAACGANTTEASTAGTCTPPGGSSSPSSFFVAERLSHNDDSSKDGGGGPGPAAAGSGEKEAEADDRPAAARRKGEKKERRPRFAFQTRSQVDILDDGYRWRKYGQKAVKNNNFPRSYYRCTHQGCNVKKQVQRLSRDEGVVVTTYEGTHTHPIEKSNDNFEHILTQMQIYSGMGSTFSRSSHDMTGIETDVHRPQEFKR

SEQ ID NO: 57067 - protein, 225 aa, Zea mays
  Coding DNA Sequence Number=SeqID_15288
  Gene Ontology: Mol. function=nucleoside-triphosphatase activity; Cellular component=membrane; Biological process=transport
  Homolog annotation: Hit_ID=Q2R434; Match level="QueryCoverage=95%, HitCoverage=82%, E-value=1e-69, Identity=67%"; Hit description=ABC transporter family protein, expressed
  Pfam annotation: Domain name=ABC_tran; Domain location=24-206; Score =78.0; E_value=3.1e-20; Accession=PF00005.17; Description=ABC transporter
  Subcellular localization annotation: CTP_CleavageSite=44; ConfidenceScore=5.13e-01
LVFLNTSNVAYHPLSQIIGHFGFSSFGLIFGRSGSGKTTLLQLLAGLSEPTSGSICIQKYDDTGNPIGLPELLTSQRVGIVFQFPERYFLADTVLEEVTFGWPRQKADLLLKEQLALNLQNAFNSVGLTTISLDENPQALSGGFKRRLALAIQLVQTPDLLLLDEPLAGLDWKARADVVNLLKDLKKHHTILVGTISTSGSLMANGNGGKFEGGSFACLNMCLSV

SEQ ID NO: 57068 - protein, 47 aa, Zea mays
  Coding DNA Sequence Number=SeqID_15289
MAVTVPRAASHCFPANTARKCRTCWSCRAARVEAGHSRLERLPSCGV

SEQ ID NO: 57069 - protein, 110 aa, Zea mays
  Coding DNA Sequence Number=SeqID_15290
MEAATAAGCGEGWAAAPWGNQQEEEARAWAPWLGARWRGRARLQLAVPEGEASQRRGARVQMPREKSRGRRAMDAGELTARARTRGGATPMEERSSTVEIAGRRGVVHME

SEQ ID NO: 57070 - protein, 388 aa, Zea mays
  Coding DNA Sequence Number=SeqID_15291
  Gene Ontology: Mol. function=protein serine/threonine kinase activity; Cellular component=beta-catenin destruction complex; Biological process=protein amino acid phosphorylation
  Homolog annotation: Hit_ID=Q6EUS4; Match level="QueryCoverage=93%, HitCoverage=95%, E-value=0.0, Identity=86%"; Hit description =Putative Shaggy-related protein kinase dzeta
  Pfam annotation: Domain name=Pkinase; Domain location=62-332; Score =285.0; E_value=1.4e-82; Accession=PF00069.15; Description=Protein kinase domain
  Pfam annotation: Domain name=Pkinase_Tyr; Domain location=62-332; Score=-16.6; E_value=1.9e-11; Accession=PF07714.7; Description =Protein tyrosine kinase
  Pfam module annotation: Pfam domain module=Pkinase::Pkinase_Tyr; Domain location=62-332::62-332
MPGGAHGAGAADPMQVDQPLPPAAAGTAHAPADAKGVIRSQAHIISTTIGGKNGEPKRTISYMAERVVGTGSFGIVFQAKCLETGETVAIKKVLQDKRYKNRELQIMRSMDHCNVVSLKHCFFSTTSRDELFLNLVMDNMNQRMPLIYVKLYTYQIFRGLAYIHTVPGVCHRDVKPQNLLVDPLTHQVKICDFGSAKMLVKGEANISYICSRYYRAPELIFGATEYTTSIDIWSAGCVLAELLLGQPLFPGESAVDQLVEIIKVLGTPTREEIRCMNPNYTEFRFPQIKAHPWHKIFHKRMPPEAIDLASRLLQYSPNLRCTALEACAHPFFDDLREPHARLPNGRPFPPLFNFKQELANASPELINRLIPDHARRHLGLTLLPATGP

SEQ ID NO: 57071 - protein, 116 aa, Zea mays
  Coding DNA Sequence Number=SeqID_15292
MGAASQGLPITSLGIVGVAPDCLPLGPVLAHPSNALSPFDVEHERNAVDTLTEQLDEAKHHLLGSSCFTPPSEPHAVLPHSVYKVIVITNLHAQVRYTLDDHILTDTASLTIPSSR

SEQ ID NO: 57072 - protein, 340 aa, Zea mays
  Coding DNA Sequence Number=SeqID_15293
  Gene Ontology: Mol. function=oxidoreductase activity; Cellular component=microsome; Biological process=aromatic compound metabolic process
  Homolog annotation: Hit_ID=Q2R932; Match level="QueryCoverage=63%, HitCoverage=64%, E-value=5e-75, Identity=64%"; Hit description =Flavin-containing monooxygenase, putative
  Pfam annotation: Domain name=FMO-like; Domain location=5-340; Score= -451.8; E_value=0.0068; Accession=PF00743.9; Description=Flavin -binding monooxygenase-like
  Pfam annotation: Domain name=Pyr_redox_2; Domain location=4-216; Score=-41.3; E_value=0.099; Accession=PF07992.4; Description =Pyridine nucleotide-disulphide oxidore
  Pfam module annotation: Pfam domain module=FMO-like::Pyr_redox_2; Domain location=5-340::4-216
MELVVLIVGAGPAGLATAACLSQRSIPYLIVEREDCSASLWRYRTYDRVKLHLSKEFSCLPYMPHEEDTPTYIPKAEFLKYLDCYREHFGIKPRYCTCVVSAAYDEGTGRWVVAARDTVEGTEIRYAARFLVVATGENGAGRIPEIQGLESFCGEAIHSSTYKSGKSYAGRRVLVVGAGNSGMEIAYDLANHGADTSIVVRSPLHNTSKMPASWGGTLNAAGALIRASAPAAARWGRCSPCRPRAILIADEIISCVEDFNIVYAHSHTITCGHISLVPSSSDRLMVTRALSIASLSSVVPTPMLVRSTAVPQPPTIHRARSRKIREHSRQVVPAGASQLA

SEQ ID NO: 57073 - protein, 69 aa, Zea mays
  Coding DNA Sequence Number=SeqID_15294
  Gene Ontology: Mol. function=oxidoreductase activity; Biological process=aromatic compound metabolic process
  Homolog annotation: Hit_ID=Q2R932; Match level="QueryCoverage=81%, HitCoverage=22%, E-value=6e-10, Identity=64%"; Hit description =Flavin-containing monooxygenase, putative
MASYGLELAPYNSNPKQVFKRISKITGNKVQFECGKDCEFDAIVFATGYKSSANLWLKMYNLYFDHFFI

SEQ ID NO: 57074 - protein, 236 aa, Zea mays
  Coding DNA Sequence Number=SeqID_15295
  Gene Ontology: Mol. function=oxidoreductase activity; Cellular component=microsome; Biological process=aromatic compound metabolic process
  Homolog annotation: Hit_ID=Q2R932; Match level="QueryCoverage=99%, HitCoverage=95%, E-value=3e-67, Identity=48%"; Hit description =Flavin-containing monooxygenase, putative
  Pfam annotation: Domain name=Pyr_redox; Domain location=139-226; Score=17.4; E_value=0.00057; Accession=PF00070.17; Description =Pyridine nucleotide-disulphide oxidor
  Pfam annotation: Domain name=Pyr_redox_2; Domain location=4-192; Score=-40.9; E_value=0.094; Accession=PF07992.4; Description =Pyridine nucleotide-disulphide oxidore
  Pfam module annotation: Pfam domain module=Pyr_redox::Pyr_redox_2; Domain location=139-226::4-192
MELVVLIVGAGPAGLATAACLSQRSIPYLIVEREDCSASLWRYRTYDRVKLHLSKEFSCLPYCTSVVSAAYDEGTGRWVVAARDTVEGTEIRYAARFLVVATGENGAGRIPEIQGLESFCGEAIHSSTYKSGRSYAGRRVLVVGAGNSGMEIAYDLANHGADTSIVVRSPFHNLRLSIALEVGRSGSTAGRSCQLVFKRISKITGNKVQFECGKDCEFDAIVFATGYKSSANLWLK

SEQ ID NO: 57075 - protein, 198 aa, Zea mays
  Coding DNA Sequence Number=SeqID_15296
  Subcellular localization annotation: CTP_CleavageSite=67; ConfidenceScore=5.22e-01
MAPAPPTPVIPATMLAFVRRHAHIAQPNPLPHPHLRCTKPHSTPSTTPRRGGRRCEGWPGPSPRRLVARAPRPAGDLASQLSGFLSSIPEIVARGDLTSQCPGSLSSIPETDARSAARGEGKRGRYTNVKPYQGIPPRIGKKGRGSDGVPCGGHWIGGPQILITTTALALIIIARHTPPLGGSSDGAFLASLPLPERR

SEQ ID NO: 57076 - protein, 204 aa, Zea mays
  Coding DNA Sequence Number=SeqID_15297
  Gene Ontology: Mol. function=oxidoreductase activity; Cellular component=mitochondrial outer membrane translocase complex; Biological process=aromatic compound metabolic process
  Homolog annotation: Hit_ID=Q6EST7; Match level="QueryCoverage=73%, HitCoverage=39%, E-value=2e-41, Identity=59%"; Hit description =Putative flavin-containing monooxygenase
MLVRSTAVPQPPTIHRARSRKIREHSRQVVPAGSSWAVEPGAATIIGVVEGDCVHIMPKELIRLGMTFVQYMPVTIVDLFLVKLADFIFGDLSNYGIVRPGVGPLQLKSKTGRSSVIDVGTAGLIKKGVVKVFKRISKITGNKVQFECGKDCEFDAIVFATGYKSSANLWLKADDKCMVNSDGRPNTCRPNIWKGENGLYFSGF

SEQ ID NO: 57077 - protein, 393 aa, Zea mays
  Coding DNA Sequence Number=SeqID_15298
  Gene Ontology: Mol. function=oxidoreductase activity; Cellular component=microsome; Biological process=aromatic compound metabolic process
  Homolog annotation: Hit_ID=Q2R932; Match level="QueryCoverage=95%, HitCoverage=98%, E-value=1e-111, Identity=57%"; Hit description =Flavin-containing monooxygenase, putative
  Pfam annotation: Domain name=DAO; Domain location=4-360; Score=-54.7; E_value=0.026; Accession=PF01266.14; Description=FAD dependent oxidoreductase
  Pfam annotation: Domain name=FMO-like; Domain location=5-383; Score= -428.6; E_value=0.00055; Accession=PF00743.9; Description=Flavin -binding monooxygenase-like
  Pfam module annotation: Pfam domain module=DAO::FMO-like; Domain location=4-360::5-383
MELVVLIVGAGPAGLATAACLSQRSIPYLIVEREDCSASLWRYRTYDRVKLHLSKEFSCLPYMPHEEDTPTYIPKAEFLKYLDCYREHFGIKPRYCTSVVSAAYDEGTGRWVVAARDTVEGTEIRYAARFLVVATGENGAGRIPEIQGLESFCGEAIHSSTYKSGRSYAGRRVLVVGAGNSGMEIAYDLANHGADTSIVVRSPFHNLRLSIALEVGRSGSTAGRSCQLAHLGPWNLVQPPSLVSLREIVHIMPKELIRLGMTFVQYMPVTIVDLFLVKLADFIFGDLSNYGIVRPGVGPLQLKSKTGRSSVIDVGTAGLIKKGVVKVFKRISKITGNKVQFECGKDCEFDAIVFATGYKSSANLWLKADDKRMGLAGICMDAYNIANEIVSVY

SEQ ID NO: 57078 - protein, 286 aa, Zea mays
  Coding DNA Sequence Number=SeqID_15299
  Gene Ontology: Mol. function=oxidoreductase activity; Cellular component=microsome; Biological process=aromatic compound metabolic process
  Homolog annotation: Hit_ID=Q2R932; Match level="QueryCoverage=70%, HitCoverage=59%, E-value=3e-73, Identity=67%"; Hit description =Flavin-containing monooxygenase, putative
  Pfam annotation: Domain name=FMO-like; Domain location=5-286; Score= -461.5; E_value=0.02; Accession=PF00743.9; Description=Flavin-binding monooxygenase-like
  Pfam annotation: Domain name=Pyr_redox; Domain location=172-255; Score=-5.9; E_value=0.045; Accession=PF00070.17; Description =Pyridine nucleotide-disulphide oxidor
  Pfam annotation: Domain name=Shikimate_DH; Domain location=153-265; Score=-28.2; E_value=0.094; Accession=PF01488.10; Description =Shikimate  quinate 5-dehydrogenase
  Pfam module annotation: Pfam domain module=FMO-like::Pyr _redox::Shikimate_DH; Domain location=5-286::172-255::153-265
MELVVLIVGAGPAGLATAACMSQRSIPYLIVEREDCSASLWRYRTYDRVKLHLSKEFSCLPYMPHEEDTPTYIPKAEFLKYLDCYREHFGIKPRYCTCVVSAAYDEGTGRWVVAARDTVEGTEIRYAARFLVVATGENGAGRIPEIQGLESFCGEAIHSSTYKSGKSYAGRRVLVVGAGNSGMEIAYDLANHGADTSIVVRSPDFNIVYAHSHTITCGHISLVPSSSDRLMVTRALSIASLSSVVPTPMLVRSTAVPQPPTIHRARSRKIREHSRQVVPAGASQLA

SEQ ID NO: 57079 - protein, 1014 aa, Zea mays
  Coding DNA Sequence Number=SeqID_15300
  Gene Ontology: Mol. function=phosphotransferase activity, alcohol group as acceptor; Biological process=aggregation during fruiting body development
  Homolog annotation: Hit_ID=Q2R903; Match level="QueryCoverage=99%, HitCoverage=84%, E-value=0.0, Identity=71%"; Hit description =Phosphatidylinositol 4-kinase, putative, expressed
  Pfam annotation: Domain name=Integrin_alpha; Domain location=254-268; Score=3.1; E_value=7.6; Accession=PF00357.10; Description=Integrin alpha cytoplasmic region
  Pfam annotation: Domain name=Integrin_alpha; Domain location=275-291; Score=3.9; E_value=5.7; Accession=PF00357.10; Description=Integrin alpha cytoplasmic region
  Pfam annotation: Domain name=Integrin_alpha; Domain location=296-310; Score=4.1; E_value=5.1; Accession=PF00357.10; Description=Integrin alpha cytoplasmic region
  Pfam annotation: Domain name=Integrin_alpha; Domain location=339-353; Score=7.1; E_value=1.5; Accession=PF00357.10; Description=Integrin alpha cytoplasmic region
  Pfam annotation: Domain name=PI3_PI4_kinase; Domain location=867 -1013; Score=16.9; E_value=7.3e-07; Accession=PF00454.17; Description= Phosphatidylinositol 3- and 4-kinase
  Pfam module annotation: Pfam domain module=Integrin_alpha::Integrin _alpha::Integrin_alpha::Integrin_alpha::PI3_PI4_kinase; Domain location=254-268::275-291::296-310::339-353::867-1013
MVRLLGLRSLSFGPEDSPREIPSTADVAPPVGSSGWLVRFFDSAFFCEWIAVSYLYKHDHAGVRDYLCNRMYTLPLPGLEAYLFQVCYMLVHKPSPSLDRFVIDTCAKSLRIALKVHWLLAAELELEDADDLDGIDKVQEQCQVAATVQGEWPPLVRPSPPSPAASPRGNPMLSRIRSSKQRLLSLASSPSLGLSPPAGGGVNVAEDAMGTGGKQPATPSSEDNKLLKRLSIGPKMRDALLFRRSGEKDEEQDRDGFFKRLLRDSRDKEEEDGDREGFFKRLLSREKDNEEEESDRDGFFRRLLRDSKEEDMELTPSSDGLLKRLFRDKEDRQGEDDEKEGFFRRMFKDKNEERRDSSHARHGNEERLGKSVEDDDREGFFRKIFKDKNEERKDEGHQKPDEREKVGANIEDDKRDGFFRQLFKEKNDEKKEGSTPSKKEEDDKGHKNADDDNFFRRLFKDKNEEKKGIVHDRNEDDKCEEGDKENFFRKLFKDKHEERRTEGPDKNDDYGKGSSGIEEEDNPEFLSFRRLFRVHPEDSKSGHIESSQSNNLSEGSPGSESFFKRLFRDRDRSLEDSEIFGSKMAKEARIWSHALCDTSYGLVDIFPIEDRKIALRESLTEINSQIASAEKNGGVCFPMGKGIYRVVHIPEDESVLLNSREKAPYLICVEVLKAEAPSHSKGSSDGHKLSKGGIPLANGDVQLPKPPPWAYPLWSRHETQNYETDRMLKSTSQVIDQAMAQLWETKVKFVNVSFSIEKLGRSRSIVLSETGRRLRHDATDSHDPPGDSQTVADQPIEWVKVTLSAVPGVNMEDVDDNEPTRKKDHRRVPSTIAIEEVKAAALKGEAPPGLPLKGVAQSTQNLDPKATDGGDPKPTDALADIYQEAGLPLWLRPYEVIVTSAYTALIETIPDTASIHSVKSRFPNISSLRDYYVAKYEENSPNFKLAQRNFVESMAGYSILCYLLQVKDRHNGNLLIDEEGHIIHIDFGFILSNSPGGVNFESAPFKLTRELLEV

SEQ ID NO: 57080 - protein, 87 aa, Zea mays
  Coding DNA Sequence Number=SeqID_15301
  Subcellular localization annotation: CTP_CleavageSite=34; ConfidenceScore=5.31e-01
MQQQPPNPNPCLRTGSRSGASQTLASKSRPDSQRGAAESGEAGAELLRTYFRGWQFSPVCFGFSQLLYHTWLLGTKSESPELLMTVS

SEQ ID NO: 57081 - protein, 246 aa, Zea mays
  Coding DNA Sequence Number=SeqID_15302
  Subcellular localization annotation: CTP_CleavageSite=34; ConfidenceScore=5.56e-01
MGAPASAPASSASAPAPVALASPAPGRPPGRPPRAAPGRPRLGELGPGPSHPRLDRPRPPPTFPAPAPARRPPGRPRHDPPRAPASPALPAPPPGELTPAPLSTPASARPAPVAPSPGAPRSGEPRPSPRPSWPGLGRPAPVALGPGAPRSGEPAPRRAPAAPARPPPREPRSAAPVRAPLGRPVPGSAVPAAPAPASAPCCPGPGRALRPAHAPYLLARPGVPCSRCDGPGVASSSAQRAFSARL

SEQ ID NO: 57082 - protein, 40 aa, Zea mays
  Coding DNA Sequence Number=SeqID_15303
MGNSEEAATAMAGRGEGQCGDGARGPVPHLARGHGTEDFA

SEQ ID NO: 57083 - protein, 191 aa, Zea mays
  Coding DNA Sequence Number=SeqID_15304
MPNTRWESGGPIPSLPGKLAVTLNIPGCDSGGGVRRTKVWGVCIPMDEARTHPGSPQSSGNIDEGGYELRQLRCFGLYTVTPEMVSKQKTAPGLKVIMLLKVTAMESALINVAPPLPSALAVGVCYPTAHHGVTLVMLLGRTASLIVTRWFVRWHDGRNTQACIGSGRARGVTPYVLRGPWYCDEITSCEL

SEQ ID NO: 57084 - protein, 83 aa, Zea mays
  Coding DNA Sequence Number=SeqID_15305
MPTTKWRPRLATSMAPLRRLPYSGERLPMPYCSKMDTTNCYAGRGKMVPSDPGELRLLTVAATSSLSALSDRGEAFGRDALCV

SEQ ID NO: 57085 - protein, 106 aa, Zea mays
  Coding DNA Sequence Number=SeqID_15306
MGDGEVESGPSRAAARVGTVVAAREVVTGDRREREVCVARVLGGGEVVRVVEPREPTREGAGGRQSAPAKDVVLTNILYDVISLFYESAKKELIEDILPIKLPENI

SEQ ID NO: 57086 - protein, 151 aa, Zea mays
  Coding DNA Sequence Number=SeqID_15307
  Subcellular localization annotation: CTP_CleavageSite=53; ConfidenceScore=5.01e-01
MEYGTRLIDAGLIVSAIAAAVVYFLYGSHLPNMPARRRRAVVAVVLLVQVGVLLSADRDLTNIALRLDVEETESKLLRMEEIKHGTENSELTVTMKDAHVDQPLADADLQQPAADEDHTAEETMKDRPKLNDHEVPLSSNGDGIGEEKPNP

SEQ ID NO: 57087 - protein, 133 aa, Zea mays
  Coding DNA Sequence Number=SeqID_15308
  Subcellular localization annotation: CTP_CleavageSite=91; ConfidenceScore=5.39e-01
MTSAKEGRKHSAAKATTLFTSFSPTAEFFSAASAKGQRRQGLRGNKQKEIAEAAAQQSQSKQRANPKHLGSNLHRHRRPNEDNSQKGRKINADSAESKGEELLRRLTAKVSADIKHNASGNQRDYGIDFRNYF

SEQ ID NO: 57088 - protein, 107 aa, Zea mays
  Coding DNA Sequence Number=SeqID_15309
  Gene Ontology: Mol. function=voltage-gated chloride channel activity; Cellular component=membrane; Biological process=chloride transport
  Homolog annotation: Hit_ID=Q6ZKN1; Match level="QueryCoverage=59%, HitCoverage=8%, E-value=9e-25, Identity=85%"; Hit description =Putative CLC-f chloride channel protein
MKSNPPFEMIMVALSTQRSQIIHASYPQLLHQSLELTISYAKYQQASADEAKKRPQWECLFMSIHECADADLSRRGEEAEGVQEAELVDTMVNDVAKLDIEGGPGGP

SEQ ID NO: 57089 - protein, 568 aa, Zea mays
  Coding DNA Sequence Number=SeqID_15310
  Gene Ontology: Mol. function=DNA binding; Cellular component=nucleus
  Homolog annotation: Hit_ID=Q75LX0; Match level="QueryCoverage=97%, HitCoverage=91%, E-value=0.0, Identity=61%"; Hit description =Expressed protein
MEVDDDVEEDDIDFNPFLREGSPSETSSSLTSEAECEEHSSENQPSNHTYQQNTVVNENTSDSALPQNRLSSQDAVNEMFPEETSTQVNIENDGHLNGLEKDVLASEAACSPTVQDPHHLSLEISEEDAICKRTRARYSLANYSLEELETFLQESDDDSGLQNVDEEEEYRKFLAAVLSGVGNDTQTFQGDENQDEDDNDADFELEIEEALESDGDENVENYHNTNPRKEKDVRRPQTRQRRPLTGMSGAGSDHQESNKTHLRPIVPYIPSALVTPAHAFGWQYANQNAFFPSSLVSLTRPPLACGFTYQQLGQLHVLIYEHVQLLIQTFSLCVLDSSKQDVANNVKKMIVELVGARDQALARSSPQRHIFFETQHLSSSFVSSDNLERQWIPLIKSPIISVLDVAPLELVLDYLSDVATAVVKYRKSHVDGTADKTRRKEPLFPSAAINSCKQVNNVSQDRSNGVPTASPPSGQLQQKKSLAATLLENIKKDTIALVPADIARLAQRFFSLFNFALFPHKSPPSPMANRVLFTDAEDRLLALGILEYNNDWAAIQKRFLPCKSKHQA

SEQ ID NO: 57090 - protein, 155 aa, Zea mays
  Coding DNA Sequence Number=SeqID_15311
MPTNAIRWSTVESQCGIDLALSSSSLKEYRRRLAELTKAEVDLRRALFVTVVGSRPAVSTDLVAEVAAMLAIDVDCISMHKSLLEDFLALLPSEVMARSAYNSRAVLHTSSCSLKFKFWSRLAHDVAVSFYLYICIEMRGVPMHAWMLSTAQDLL

SEQ ID NO: 57091 - protein, 210 aa, Zea mays
  Coding DNA Sequence Number=SeqID_15312
  Gene Ontology: Mol. function=protein binding; Cellular component =cytoskeleton; Biological process=phagocytosis
  Homolog annotation: Hit_ID=Q2R485; Match level="QueryCoverage=64%, HitCoverage=48%, E-value=6e-48, Identity=62%"; Hit description =Phagocytosis and cell motility protein ELMO1, putative, expressed
  Pfam annotation: Domain name=ELMO_CED12; Domain location=97-208; Score=125.8; E_value=1.2e-34; Accession=PF04727.4; Description =ELMOCED-12 family
MARSAPLPHLFHPLLSLCLNYLGSIIARTSPDTPSCIPSKNLCVGDSVPKYCGLFSGSGKRRQVSAEKIVLDLTPLQEQRLQSLKERLNVPYDETRTDHQESLRALWNASFPDTELTSLVSEQWKDMGWQGVNPATDFRGCGFVSLENLLFFARTYPASFKRLMLKQQGMRTTWEYPFAVAGVNISYMLIQLLELNSDVESLDLITTVGR

SEQ ID NO: 57092 - protein, 109 aa, Zea mays
  Coding DNA Sequence Number=SeqID_15313
MACTSSPLVSYPQGHLEEEHIPRLYRARVAGRRSWGERLLAIPTAQASAAGQSALDPALKTSPRRQRWTGMRPRRRMRMRGGGHGRQAGGGLHRGGERQGADGCGRSES

SEQ ID NO: 57093 - protein, 54 aa, Zea mays
  Coding DNA Sequence Number=SeqID_15314
MEDGAGRYLSPPGRGVRVLAKYTDTEIMEFSRCKTRSVVDDMVLTNRAHTRIVF

SEQ ID NO: 57094 - protein, 548 aa, Zea mays
  Coding DNA Sequence Number=SeqID_15315
  Gene Ontology: Mol. function=monooxygenase activity; Cellular component=integral to membrane; Biological process=electron transport
  Homolog annotation: Hit_ID=Q5VRI5; Match level="QueryCoverage=89%, HitCoverage=93%, E-value=1e-140, Identity=52%"; Hit description =Putative cytochrome P450
  Pfam annotation: Domain name=p450; Domain location=68-536; Score =277.3; E_value=3.1e-80; Accession=PF00067.12; Description=Cytochrome P450
MGLSNRSDIMTRSFLYALAYNGLTNAKRMIRGFERQDCSRAVLALIAFVTVVALRHLISSWRQHGRLPPGPTSLPVIGHLHLLRPPVHRTLQELASRIGPLMHIRLGSTNCVVASSPEVASELIRGHEGSISARPFTAVARKFSYDSAGFVFEPYNTHWRFMKRLCMSELLGPRTVEQLRPVRRAVTVSLVSDLLASSARGETVDITRHLIRLTNTSIIRMVASTVSGSVTDEAHELAKAVIEVVGAFNVDDYIAVVRGWDFQGLGRKAADVHRRFDALLEDILRHKEEARAARRLDDGHGKQATHSKDLLDILMDKAEDPAAEVKLTRENIKAFVIDVVTSGSDTSAAMAEWMLAELMNHPETLRKVVEEIDAVVGGGRIASEADLPQLPYLMAVYKETLRLHPAGPIAHRQSTEEMVVHGFTVPPQSTVLIHVWAIGRDPAYWEEPLLFRPERFMPGGAAESLEPRGKHFQYIPFGSGRRGCPGMGLAMQSVPAVVAALVQCFYWATVDGGVDKIDMSESDGLVCARKKPLLLRPTSRLTPFPPVV

SEQ ID NO: 57095 - protein, 61 aa, Zea mays
  Coding DNA Sequence Number=SeqID_15316
  Gene Ontology: Mol. function=nucleic acid binding
  Homolog annotation: Hit_ID=Q69UJ1; Match level="QueryCoverage=60%, HitCoverage=12%, E-value=1e-10, Identity=89%"; Hit description =Putative RNA-binding protein RBP37
MYPNYASASDVDRLRADEYLHLDKAESATAALNSSGVVLGSLPIRVNPSKTPVRPRDPRQL

SEQ ID NO: 57096 - protein, 90 aa, Zea mays
  Coding DNA Sequence Number=SeqID_15317
MAPKKATSKATTSIDNTSKAALLAERKGKAALVGDVPHEALKDGAVNSKRHRQENPPTLEGTVRTCNSEGLPRAPPPGFTPKGWQYSRGQ

SEQ ID NO: 57097 - protein, 135 aa, Zea mays
  Coding DNA Sequence Number=SeqID_15318
MTEPIPFAMLSPLRLDLTSLLQSKETASAVKGKARGQKKWRMMNVMQAIEQTPPPASADKEIMLVGAEDTATAEADNHATIMLEIDRLISDVVAEKDVAATPSDKGKRIEETSSEDKNFEEDMSELKEFAISCGY

SEQ ID NO: 57098 - protein, 42 aa, Zea mays
  Coding DNA Sequence Number=SeqID_15319
MASGIELAGAKERGLAGEEIRSQEIRSVSLPKPEANPRFCRV

SEQ ID NO: 57099 - protein, 150 aa, Zea mays
  Coding DNA Sequence Number=SeqID_15320
MAISSVRMMAGMRRSVASKSNLRDLQDAPSGQGIALRLLGPDAYEPLGLLVPDARPRAHGAAGAGRAVPRPPHGRILRRCGARSPGPGQSARPAGGPAYSPPGGHAPSPCPPAAARLRSWHRRRTAQAGSTRRREKCRQGCRRLWERRSG

SEQ ID NO: 57100 - protein, 127 aa, Zea mays
  Coding DNA Sequence Number=SeqID_15321
  Pfam annotation: Domain name=zf-CCHC; Domain location=96-113; Score =13.8; E_value=0.0052; Accession=PF00098.13; Description=Zinc knuckle
MPSIVVGPHPMGSLATTIASVDGSYRIGLLGITSSKLGMKTISEFFGIPETDFGIFRSDSPESWDGQVVRAFKAPNNRTPNFPHPDKKNMLVSLRGKCIRCLAKGHYVIDCRDPLRHLYCGGVGHKA

SEQ ID NO: 57101 - protein, 247 aa, Zea mays
  Coding DNA Sequence Number=SeqID_15322
  Homolog annotation: Hit_ID=Q6QP51; Match level="QueryCoverage=51%, HitCoverage=58%, E-value=4e-07, Identity=54%"; Hit description =Putative growth-regulating factor 1
MVPLVAWLVRAQGRAGGGSSEVEAESEPGGRARRRPSSEVEAESEPGGRARRRPSSEVEGSGEAETVVRGRGLVRARGSGEAETVFRSRGGVRALGSGEAEIPMGARGWTWAAVRPHPGRVATAVGPAQGGAVFLSGQSVEGRSDCGHFGLVDWRARVRIRCQAILALNAPAIRSAGEVIWPRLLLREACPNWASGELKPLTGIAPIRPLQLCADGGYQLRLGALEGTDLSRLHFVPVGARERTRRV

SEQ ID NO: 57102 - protein, 84 aa, Zea mays
  Coding DNA Sequence Number=SeqID_15323
MDKIVPKQNMDPGRKVRAAWRCVTPYVLAKMLRVMGYKVILQSENVESLGGWLDSVFDCSEGVPSGPYIFGRGAIHVDMITTCA

SEQ ID NO: 57103 - protein, 275 aa, Zea mays
  Coding DNA Sequence Number=SeqID_15324
  Subcellular localization annotation: CTP_CleavageSite=63; ConfidenceScore=5.13e-01
MANAAASALRVVTGCRSLQLILDAGRRGRGHVAAAAGPARARRLQPAPRRLRLLQRRHGRHCVAVNVVSDVQCFRAGSDSCLQLLYHQIFEYWLGMLQIFVAVMTKAYPSIERGDLILLQEIASYMIFACGAVYVISAESFHTNTPQNIIMAIHEVPTSCVYYRSVLRLECSIPGFGYLGWMDDWLRSPALDNLQDLELNSHSPQKVAVVRRNRSARRLGGLRAKGLPTVSVKLLALSGVKLSLQALIDVLNCVPNLEKLYIDVIPSFLPSFFFN

SEQ ID NO: 57104 - protein, 324 aa, Zea mays
  Coding DNA Sequence Number=SeqID_15325
  Gene Ontology: Mol. function=DNA binding; Biological process =regulation of transcription
  Homolog annotation: Hit_ID=Q7XIF1; Match level="QueryCoverage=86%, HitCoverage=82%, E-value=3e-60, Identity=52%"; Hit description =Putative cytoskeletal protein-like protein
  Pfam annotation: Domain name=Myb_DNA-binding; Domain location=219 -270; Score=36.3; E_value=1.1e-07; Accession=PF00249.21; Description =Myb-like DNA-binding domain
MGLDVMEIGMGADLSLDLRHFASKAVRQSKDDTPAPDMDACIRRLEEERGKIEMFKRDLPLCARLLADADDEEEEADGATADKSKWMSTAQLWTGDSGREDAESEKQDKGRCSPEARSRGALLPFKADVGSGAPAFAPLFLRTDDKAAAARVGVPDLSSLLSPPATMPPADAGAEESRRQVVGFAQAAARAAAMAPSAPALGLQSQQQQQQQQQARKARRCWSTELHRKFVAALDQLGGPQVATPKQIRELMKVDGLTNDEVKSHLQKYRLHNRRAPGSGVVYLTERAAKKKEISIRKEPDSTIEQPTKRVAPAPLLFTIINST

SEQ ID NO: 57105 - protein, 112 aa, Zea mays
  Coding DNA Sequence Number=SeqID_15326
  Gene Ontology: Mol. function=transferase activity
  Homolog annotation: Hit_ID=Q6ZBI7; Match level="QueryCoverage=62%, HitCoverage=15%, E-value=2e-14, Identity=60%"; Hit description =Putative hydroxyanthranilate hydroxycinnamoyltransferase 2
MANVMDSEAVQVVESSFVVPSEPTPSEGLWLSPLDLILVSRGHTPTVYLYSSSSNAVAAADGFFDVARLKEAMAKTLVALYPLAGRLGVNNDDGRAEITELFGTEVSSRLGF

SEQ ID NO: 57106 - protein, 46 aa, Zea mays
  Coding DNA Sequence Number=SeqID_15327
  Subcellular localization annotation: CTP_CleavageSite=37; ConfidenceScore=5.06e-01
MASSSALSLPALCARRCRSSLPALLRRRYSARLSLVLGGAPSGAEI

SEQ ID NO: 57107 - protein, 413 aa, Zea mays
  Coding DNA Sequence Number=SeqID_15328
  Gene Ontology: Mol. function=transferase activity; Cellular component= nucleus; Biological process=flavonoid biosynthetic process
  Homolog annotation: Hit_ID=Q6ZBI7; Match level="QueryCoverage=90%, HitCoverage=88%, E-value=1e-116, Identity=56%"; Hit description =Putative hydroxyanthranilate hydroxycinnamoyltransferase 2
  Pfam annotation: Domain name=Transferase; Domain location=4-412; Score=209.1; E_value=1e-59; Accession=PF02458.6; Description =Transferase family
MDSEVVHVVESSLVVPSEPTPSEGLSLSPLDLVLPSRGHTPTVYLYSPSDVAAADGFFDVARLKEAMAKTLVAFYPLAGRLGVNNDGRVEITCTGEGALFVVAHADLSVGDIEDDFRPSPELRRLFVPCIEPASIILAIQVTFLKFGGVVLGTALHHTASDASSAFHFFQTWSALCKYGDRATVELPCHDRTLLRARSPPTVHPDALSRFYPKLTFSDDPLGSGPLAVEVFAISKDQVASLKRLCGGTSTFCAMSALPTSAAEMRPPLPNRYFGNALIRLGVTGAVQDIASEALVSVAGRIKDTIDRMDDELVRSAVDYCEMAEMDSRPVKGTLLETELMLISWLGMPMYDTDFGWGKPAVMSRAESIRGGFVYIIDDGPTNGVGSGSGGVRVLMCMEAANMKELERLLYAKL

SEQ ID NO: 57108 - protein, 50 aa, Zea mays
  Coding DNA Sequence Number=SeqID_15329
MSNRHCVPCVRENDRSFHCEDEQQVGNGSGAHLQLYGREKRNGGEVPVRI

SEQ ID NO: 57109 - protein, 87 aa, Zea mays
  Coding DNA Sequence Number=SeqID_15330
MGFLFLLVKNFFFLESNFIPYRLSFEHFGGIIHHKSVEESGLRRLMMAGSNDDTIEVDGNEERWLCGLAKDDDEDDLWEGRYKALWP

SEQ ID NO: 57110 - protein, 528 aa, Zea mays
  Coding DNA Sequence Number=SeqID_15331
  Gene Ontology: Mol. function=transferase activity; Cellular component= nucleus; Biological process=flavonoid biosynthetic process
  Homolog annotation: Hit_ID=Q6ZBI7; Match level="QueryCoverage=76%, HitCoverage=90%, E-value=1e-145, Identity=62%"; Hit description =Putative hydroxyanthranilate hydroxycinnamoyltransferase 2
  Pfam annotation: Domain name=Transferase; Domain location=102-527; Score=282.7; E_value=7.2e-82; Accession=PF02458.6; Description =Transferase family
MRLLRPILSPYLGIENVDDGDGSQIAISMFLNHRYACRIINLIVKEVTTRARLADVYNKYEEKYGSVRLRRVVPPNPSGAVESLNSVRDRVEIRMANVMDSEVVQVVESSFVVPSEPTPSEGLWLSPLDLILANRGHTPTVYLYSSSSNAVAAADGFFDVARLKEAMAKTLVAFYPLAGRLGVNNDGRAEITCTGEGALFVVAHADLTVGDIEDDFRPSPELRRLFVPRIEPASVVLAIQVTFLKSGGVVLGTALHHAAIDASSAFHFFQTWSALCKHGDRATVELPCHDRTLLRARSPPTVHPDALSRFHPKLTFSDPSGPLAFQVFAISKDQVTSLKRLCGGTSTFCAIGALVWQCALVARRLPPDSEARLTFPANVRRRVRPSLPIRYFGNALVRLGATAAVRDIASEVLASVAGRIKDAVDRVDDELVRSAVDYYEMTEMDSRPVKGTLAETDLQIISWLGMPMYDADFGWGKPAVMSRAESVRGGFVYLMSDGPTDGGGGVRVLMCMEAANMKELERLLYAKL

SEQ ID NO: 57111 - protein, 477 aa, Zea mays
  Coding DNA Sequence Number=SeqID_15332
  Gene Ontology: Mol. function=phosphatidylcholine-sterol O -acyltransferase activity; Biological process=lipid metabolic process
  Homolog annotation: Hit_ID=Q71LX7; Match level="QueryCoverage=93%, HitCoverage=78%, E-value=1e-152, Identity=56%"; Hit description =Lecithine cholesterol acyltransferase-like protein
  Pfam annotation: Domain name=LACT; Domain location=7-362; Score= -92.2; E_value=1.8e-06; Accession=PF02450.6; Description =Lecithin:cholesterol acyltransferase
MEARREGQIGVGRLRSREPSKLGSRGEIIGDDTVYYYHDMIVEMIKWGYQEGKTLFGFGYDFRQSNRLSETLDRFSKKLESVYTASGGKKINLITHSMGGLLVKCFISLHSDVSTSCILDLWLRFAIFNVLRSRAILKTFEKYVKSWIAIAAPFQGAPGYITTSLLNGMSFVEGWESRFFISKWCMQQLLLECPSIYELLANPNFQWKDIPLLQIWRENLDNSGKKSALLESYEPEEAIMMIKEALSSNEIIADGMHIPVPLNLDILNWAKETYDLLCSTKLPESVKFYNIYGIDYDTPHTVCYGSEQHPVSSLSSLLYAQGKYVYVDGDGSVPAESAKADGFNAVARVGVAADHRGIVCSRRVFRIVQHWLHAGEPDPFYDPLSDYVILPTLYEIEKHREKHGDVTSVAEDWEIISPNDGKTLRPGELPPMVSTLTTSREGKEGALEEAQATVVVHPEKKGRQHVQVRAVGVSHGG

SEQ ID NO: 57112 - protein, 489 aa, Zea mays
  Coding DNA Sequence Number=SeqID_15333
  Homolog annotation: Hit_ID=Q10ML4; Match level="QueryCoverage=36%, HitCoverage=27%, E-value=7e-23, Identity=40%"; Hit description=TPR Domain containing protein, expressed
  Subcellular localization annotation: CTP_CleavageSite=51; ConfidenceScore=5.65e-01
MQAVADQATGPSASRRTGSSRASSPRRCTWRRMVVTVSRRRWRENGEGRIRAVHTTGNSGQMPTGPGGGVAEVERRWLETAGPDGGKAEVLLRPTVEGVRTQRRGGRSGGEREPEGRELGRRPREGRETGVRDGGDKEEGQTKHPISLQGTISVCIAVSAVAATPISGELSPSLFFLNNGIMIDSSPRQAMAKGCDSTLRHVSSTLLKWRTASSGRPASSAATAAVEDELHVRRQLRHGLRPCIGGRQQVRRGREPVLRPAHALAPEHHGGEAVVGLEKHQRVLHQAEVEASLAQDQVPPLVGVDAGEGGDQATLEAGHVEAAQEAASVGAVVSANNIHVLLERLCSQCYWANLGGVQPLDNDHEPPSSTLRFSSVQRSARGSGGTVCAALVEEEEVGAAADHLAAEVGVETEEGEVQEGGLERRIEKVLFDCVLFFVQLEGVLGVGVGGAGQGSSGGTATRAVMALKTGTVAALIDPHGGGLITVERV

SEQ ID NO: 57113 - protein, 505 aa, Zea mays
  Coding DNA Sequence Number=SeqID_15334
  Gene Ontology: Mol. function=translation initiation factor activity; Cellular component=chloroplast; Biological process=translational initiation
  Homolog annotation: Hit_ID=Q9XIR4; Match level="QueryCoverage=71%, HitCoverage=83%, E-value=1e-137, Identity=62%"; Hit description=APO protein 1, chloroplast precursor
  Pfam annotation: Domain name=DUF794; Domain location=121-505; Score =714.5; E_value=7.2e-212; Accession=PF05634.2; Description =Arabidopsis thaliana protein of unknown function (DUF794)
  Subcellular localization annotation: CTP_CleavageSite=21; ConfidenceScore=5.04e-01
MHSGCKLLLQGGSPTKGTPAVAVAVADFTCAPLLEHLLAVFSSLFTSSGRAGLPQPYSPAAQVSVGPFDGNEHPPYQWTRAIAMEIVNSVSFSSIGVGRIVINKTVKVGCQTHRIGWKLTRTCCEYSPGASRKKQEKYEQQPQNVDLPELHPKNKKKPFPVPIKKMLQASRREKRLAQMHIEKPLEPPKNGLLVPELVPVAHEVLDNWKVLIRGLSQLLNVVSVYGCRKCPQVHVGPVGHQIQDCYGSGSQRRNSHHSWARGSINDVLIPIESYHLFDPFGRRVKHDTRFDYDRIPAIVELCIQAGVDLPQYPSRRRTAPVRMIGKKVIDRGEFVDEPKPQRSEHCVSLLAELDTFSNQQVQSPSPSNMKELAKRTLKAYLNVRRGVEQLMSKYTVKACGYCSEVHVGPWGHNVKLCGAFKHQWRDGKHGWQDAVVDEVIPPNYVWHVPDPSGSPLRSSLRSFYGKAPAVVELCVQAGAEIPDEYRAMMRTDIVIPDSVEARMAA

SEQ ID NO: 57114 - protein, 278 aa, Zea mays
  Coding DNA Sequence Number=SeqID_15335
  Pfam annotation: Domain name=HMA; Domain location=11-71; Score=25.2; E_value=0.00024; Accession=PF00403.16; Description=Heavy-metal -associated domain
MAREEELKRIDLKVNVSCCDGCRRKVMKAMSLKGVLRTEIQPSHDRVTVVGDVDVNVLVKKLAKVGKIAEALPPAPAEQGKKQRDDGDRAVPAQAQPQAEEKCKGKDDAGGKAAAKAAPGKHEGCKKCAREAAARAVGDSGDHCSGKKAPSKKDNNAGGGWGGEEGGDADADGLDAEPLAVAPHHHYAQAQTQQHYHRAEPAMVVPVHVPPTYYYPPPAAAAMPYYGYYGMPPPPPPTMAMTMGVAPPSQRHPQARPQPSRFDEDFFDDDNTVGCSVM

SEQ ID NO: 57115 - protein, 538 aa, Zea mays
  Coding DNA Sequence Number=SeqID_15336
  Homolog annotation: Hit_ID=Q8S8Q2; Match level="QueryCoverage=95%, HitCoverage=97%, E-value=1e-152, Identity=52%"; Hit description =Expressed protein
MRPSDGRTQLSGFAQSDESTLDVEGHCYHQQSFPSSPSMQPIASGCTHTENSAAYFLWPTSNLQHCAAEGRANYFANLSKGLLPKSGRLPKGQQANSLLDLMTIRAFHSKGPGGIWCDVDVVEFSYYGAPAQNPKVQMFTELVDKLCGSDECIGSGSQVASQDTFGTLGAIVKRRTGNKQIGFLTNRHVAVDLDYPNQKMYHPLPPNLGPGVYLGAVERATSFITDDVWYGIYAGTNPETFVRADGAFIPFAHDFDISTVTTTVRGVGDIGDVKVIDLQSPLNSLIGRQVCKIGRSSGHTTGTVVAYALEYNDEKGISFFTDLLVVGENRQTFDLEGDSGSLIILTGQDNEKPCPIGIIWGGTANRGRLKLRCDHGPENWTSGVDLGRLLDRLELDLIITNESLKEFILDKDAVQQQRLALVAAANSAVGESSTAAVPAPEEKVEIFEPLGIKIEQLPRHDVSATTEGDEAAVINVEERQFISNFVGMSPVRDDQDAPRQIANLNNPSEEELAMSLHLGDREAKRLRTDTESELDLEK

SEQ ID NO: 57116 - protein, 719 aa, Zea mays
  Coding DNA Sequence Number=SeqID_15337
  Gene Ontology: Mol. function=RNA-directed DNA polymerase activity; Cellular component=intracellular; Biological process=RNA-dependent DNA replication
  Homolog annotation: Hit_ID=UPI00004C1731; Match level="QueryCoverage =96%, HitCoverage=52%, E-value=0.0, Identity=84%"; Hit description =UPI00004C1731 related cluster
  Pfam annotation: Domain name=RnaseH; Domain location=312-439; Score =5.8; E_value=1.7e-05; Accession=PF00075.14; Description=RNase H
  Pfam annotation: Domain name=rve; Domain location=452-609; Score =99.2; E_value=1.3e-26; Accession=PF00665.16; Description=Integrase core domain
  Pfam module annotation: Pfam domain module=RnaseH::rve; Domain location=312-439::452-609
MPFGLRNAGATYQRCMNHVFGEHIGRTVEAYVDDIVVKTRKASDLLSDLEATFRCLKAKGIKLNPEKCVFGVPQGMLLGFIVSERGIEANPEKIAAITSMGPIKDLKGVQRVMGCLAALSRFITRLGERGLPLYRLLRKAECFTWTPEAEEALGNLKALLTKAPILVPPAAGEALLVYVAATTQVVSAAIVVERQEEGHALPVQRPVYFVSEVLSETKIRYPQVQKLLYAVILTRRKLRHYFESHPVTVVSSFPLGEIIQCREASGRIAKWAVEIMGETISFAPQKAIKSKVLADFVAEWVDTQLPTAPIQPELWTMFFDGSLMKTGAGAGLLFISPLEKHLRYVLRLHFPVSNNVAEYEALVNGLRIAIELGVRRLDARGDSQLVIDQVMKNSHCRDPKMEAYCDEVRRLEDKFYRLELNHIARRYNETADELAKIASGRTTVPPDVFSRDLHQPSVKIDDTSEPEKAPGGYTHLLVAIDKFSKWIEVRPLNSIRSEQAVAFFTNIIHRFGVPNSIITDNDTQFTGRKFLDFCEDHHIRVDWAAVAHPMTNGQVERANGMILQGLKPRIYNDLNKFGKRWMKELPSVVWSLRTTPSRATGFTPFFLVYGAEAILPTDLEYGSPRTRAYTDQSNQVSREDSLDQLEEARDKALLHSARYQQSLRRYHARGVRSRDLQVGDLVLRLRQDARGRHKPTPPWEGSFVIAKVLKPGTYKLANS

SEQ ID NO: 57117 - protein, 312 aa, Zea mays
  Coding DNA Sequence Number=SeqID_15338
  Pfam annotation: Domain name=TPR_1; Domain location=173-206; Score =15.0; E_value=0.086; Accession=PF00515.18; Description =Tetratricopeptide repeat
  Pfam annotation: Domain name=TPR_1; Domain location=9-42; Score=3.3; E_value=2.2; Accession=PF00515.18; Description=Tetratricopeptide repeat
  Pfam annotation: Domain name=TPR_2; Domain location=173-206; Score =20.1; E_value=0.0078; Accession=PF07719.7; Description =Tetratricopeptide repeat
  Pfam annotation: Domain name=TPR_2; Domain location=9-42; Score=11.2; E_value=1.7; Accession=PF07719.7; Description=Tetratricopeptide repeat
  Pfam module annotation: Pfam domain module=TPR_1::TPR_1::TPR_2::TPR _2; Domain location=173-206::9-42::173-206::9-42
MAGAAEGAGAEAVERAHGLYRGGRHREALELYSAALAAARGPAQRIALHSNRAACYLKLHDFHKVPLPAPSALGGFGLLSCTDCVVAFGPHLASVVTSGKGRSFGASKCQFWSKYSCPVPGSGFRGSCDFGLVDCVFCSSYNNMHAQFVLGICAHGLAAQECTSVLELDTEHAGALMLRAQTLVTLKDYQSALFDVNRLVEINPSSEVYRNLQARLKTQLSLAPIPECEEESLCREEEDEELPPRVQKTDTSSIAKPDQPATKLVLENKPSAGPILHRKPATEPLKAVVPSTSPSKPQGLGSHPKTEESFRP

SEQ ID NO: 57118 - protein, 593 aa, Zea mays
  Coding DNA Sequence Number=SeqID_15339
  Gene Ontology: Mol. function=oxidoreductase activity; Cellular component=soluble fraction; Biological process=amino acid metabolic process
  Homolog annotation: Hit_ID=Q5JKR7; Match level="QueryCoverage=99%, HitCoverage=100%, E-value=1e-149, Identity=71%"; Hit description =Putative NADP-specific glutamate dehydrogenase
  Pfam annotation: Domain name=ELFV_dehydrog; Domain location=315-591; Score=188.5; E_value=1.6e-53; Accession=PF00208.11; Description =GlutamateLeucinePhenylalanineValine
  Pfam annotation: Domain name=ELFV_dehydrog_N; Domain location=192 -299; Score=68.7; E_value=1.9e-17; Accession=PF02812.8; Description =GluLeuPheVal dehydrogenase, dimeri
  Pfam module annotation: Pfam domain module=ELFV_dehydrog::ELFV _dehydrog_N; Domain location=315-591::192-299
MDEINLLRQAQRQHQHHLMVRGIGEEIDLEIGPVDDPSFSGASLVAVTSTHDTVVHADDHKSLLIPCSQPGAADGLAPQQHLSQGEEHDGMLRSPSGHTKKKKKVVKKWREEWADTYKWAYVAVHDTTTRIFCSVCKEYGRKHRRNPYGNEGSRNMQMSALEEHNNSLLHKEALRLQMASKEKLQPPEIEGPVYVKALSKTAASILECVLRRDPHEAEYIQSIQETLKNALSLYKLGGAAGGSDFDPKGKSDNEIMRFCQSFMDELYRYLGPDQDFPAEDIGVGPREMGYLFGQYRRLSGHFQGNFTGPKIFWSGSSFRTEATGYGLVFFARLLLAEMNKELKGLRCVISGSGKIAMHVLEKLLPCGAIPITVSDSKGYLLDEDGFDYMKYSLLRDIKAQQKSLKEYLKSYPHAKYIDDAKPWSQRCDVAFPCASHNEIDQGEAVAISNSGCRVLVECSNMSCTVQAVDILRKAKVIVAPAKATAAGGVALGEIELNPEFNLMQLSVEDFENRIQVNSAAPDHLAVIFPFCFPIVIPWEFSLFSVEFNQDAIKQTYESREADPSVSPCRFLVHGANICAFLNIAQAMTDQGCV

SEQ ID NO: 57119 - protein, 78 aa, Zea mays
  Coding DNA Sequence Number=SeqID_15340
MASFDNQVVAPLATKLVLPIMGGKSSKELKSIGEENDLEPYVWVHRAFYRTGPVVHQTCYWTGPVVHRTCYSTGPVHE

SEQ ID NO: 57120 - protein, 120 aa, Zea mays
  Coding DNA Sequence Number=SeqID_15341
MAPGRAFLRARSESPSMATAPPPRQIREYFHPWHETVAPPPRLPQHSIHGAPSALVPALCCPPPPPPFSSLAPPLSVVRSLASSTESWASGSTVMDWVSPVVAEMQCDDGFSLLIYAWKS

SEQ ID NO: 57121 - protein, 215 aa, Zea mays
  Coding DNA Sequence Number=SeqID_15342
MKRDMLTAHGEKVILRALEIEKSRLPHSKISGFVTPIGPLSEENHTIDKNLLPLECEGTMECHTRDNDAVGLDARAEGVVCELTDLQNNIQVYDIELTVLGNYTGHGLPLDFLESKTTGGPIKGYPVVVDVLEDCSSVSIHDHLPVARRVGKKRQRRRHDGRWTKRTPLRFPAASTAVRAISTTVQTKKNSNKDPVLEECSLLLALAAKASLLHT

SEQ ID NO: 57122 - protein, 207 aa, Zea mays
  Coding DNA Sequence Number=SeqID_15343
  Gene Ontology: Mol. function=kinase activity
  Homolog annotation: Hit_ID=UPI0000DA43ED; Match level="QueryCoverage =49%, HitCoverage=77%, E-value=4e-10, Identity=36%"; Hit description =PREDICTED: similar to keratinocytes proline-rich protein
MTLQQDQERVKNTKDDKKEKKAKGVPGPTSKLSPRAPAQMGRRETEREGGKKPEGDRRAKGKPAAFMFVPRPGRGNDGASCDVVGPSPGLAEVEAPPRSRSSLSSKAEVESEPLGRARRRPSAEARAESEPWGRAKRSSSSSGAEPESEPWGRGKRSSSSSRAEPESEPWGRAKRSSSSSGAEPESEPWGRAKRSSSSSGAEPKSEP

SEQ ID NO: 57123 - protein, 78 aa, Zea mays
  Coding DNA Sequence Number=SeqID_15344
  Subcellular localization annotation: CTP_CleavageSite=34; ConfidenceScore=5.32e-01
MDPILLSHPHQLSVSSIQRALFRRHRPTPRNTLRGNPGSSDYNDFCFGGPNSSSDDLRADAAAIRPSLMPSLERQGRA

SEQ ID NO: 57124 - protein, 477 aa, Zea mays
  Coding DNA Sequence Number=SeqID_15345
  Gene Ontology: Mol. function=nucleic acid binding; Cellular component= chromatin; Biological process=DNA integration
  Homolog annotation: Hit_ID=Q8H6I0; Match level="QueryCoverage=99%, HitCoverage=30%, E-value=0.0, Identity=83%"; Hit description =Putative gag-pol polyprotein
  Pfam annotation: Domain name=rve; Domain location=129-276; Score =137.9; E_value=2.8e-38; Accession=PF00665.16; Description=Integrase core domain
MTGEKKMFSSYEKNQDSQRAITFGDGNQGVTVFRRSDDSIAFKGVLEGQLYLVNFDRAELDTCLIAKTNMGWLWHRRLAHVGMKNLHKLLKGEHILGLTNVHFEKDRICSACQAGKQVGAHHPHKNIMTTNRPLELLHMDLFGPIAYISIGGSKYCLEKSHTQETLKGFLRRAQNEFGLRIKKIRSDNETEFKNSQIEGFLEEEGIKHEFSSPYTPQQNGVVERKNRTLLDMARTMFDEYKTSDRFWAEAVNTACYAINRLYLHRILKKTSYKLLTGKRPNISYFRVFGSKCFILVKRGRKSKFAPKTVEGFLLGYDSNTRAYRVFNKSSRQVEVSCDVVFDETNGSQVEQVDLDEIGEETPCIALRNMSIGDVCPKESKEPPNAQDQPSSSTQAYPPTQNEDEAQVDEGKNQQDEPPQDDGNDQGGDTNAQDKEDEEASPPHPRVHQAIQRDHPVDTILGDIHKGVNTRSRVCTFL

SEQ ID NO: 57125 - protein, 526 aa, Zea mays
  Coding DNA Sequence Number=SeqID_15346
  Homolog annotation: Hit_ID=Q5JKR6; Match level="QueryCoverage=21%, HitCoverage=47%, E-value=2e-49, Identity=83%"; Hit description=RWD domain containing 1-like protein
  Pfam annotation: Domain name=AUX_IAA; Domain location=49-171; Score= -102.7; E_value=0.04; Accession=PF02309.7; Description=AUXIAA family
  Pfam annotation: Domain name=RWD; Domain location=375-480; Score =65.4; E_value=1.9e-16; Accession=PF05773.12; Description=RWD domain
  Pfam module annotation: Pfam domain module=AUX_IAA::RWD; Domain location=49-171::375-480
ELHQLDLQGAPATLAMADLHFSLGRRCPPLVRARAGELAPWPRLLASRLGYEDTTLALTLRLPGSDSGRSSSLAAPSAAPSPKARVVGWPPVRSYRKNALADSSKANRAANFVKVVVSRRSSASAPPAPGSHRRSLPQRVFFPSRAVPSCFLRTRRAELAPDLCSSLARRVLPCTCPWRPSSQPARPPVLCVARCSSSHGAQPPSRLTGSPSAAPSFFLPQLPWFSLHLPPFSVACPAELPCAPGFSPSLLEFGQARAAPWRPASSVLSLDAHSVPSNSCAVPCSGSMAAPNSLRALAYNSTAHLPTCHGHRALLPDFCSPRALISLFASAHNSPSSMAGSLLAGDAPAPAQPRLRYRPHHPRRKPKYSQKRRHNSQALIMAEIDPSESGIATTARCFQILLSPQDDDFDESAYVPVQLALIFAHTEKYPDEPPVLNVKSVRGIKPHDLASLKEKLQREATENLGMAMVYTLVSSAKEWLSEKYGQNGGDEEPEESEAEKEEKGASTVADEDEEEEEDIDFDDDFE

SEQ ID NO: 57126 - protein, 1016 aa, Zea mays
  Coding DNA Sequence Number=SeqID_15347
  Gene Ontology: Mol. function=RNA-directed DNA polymerase activity; Cellular component=mitochondrion; Biological process=RNA-dependent DNA replication
  Homolog annotation: Hit_ID=UPI00005A975E; Match level="QueryCoverage =99%, HitCoverage=58%, E-value=0.0, Identity=86%"; Hit description =PREDICTED: similar to Retrovirus-related Pol polyprotein from transposon 297
  Pfam annotation: Domain name=RVT_1; Domain location=56-225; Score =149.9; E_value=6.6e-42; Accession=PF00078.17; Description=Reverse transcriptase (RNA-dependent
  Pfam annotation: Domain name=RnaseH; Domain location=455-582; Score =6.7; E_value=1.4e-05; Accession=PF00075.14; Description=RNase H
  Pfam annotation: Domain name=rve; Domain location=793-952; Score =117.9; E_value=2.9e-32; Accession=PF00665.16; Description=Integrase core domain
  Pfam module annotation: Pfam domain module=RVT_1::RnaseH::rve; Domain location=56-225::455-582::793-952
MLDITRDVAEHSLDIRAGARPVKQPLRRFDEEKRRAIGEEIHKLMAAGFIKEVFHPEWLANPVLVRKKGGKWRMCVDYTGLNKACPKVPYPLPRIDQIVDSTAGCETLSFLDAYSGYHQIRMKESDQLATSFITPFGMYCYVTMPFGLRNAGATYQRCMNHVFGEHIGRTVEAYVDDIIVKTRKASDLLSDLEVTFRCLKAKGVKLNPEKCVFGVPRGMLLGFIVSERGIEANPEKIMTITSMGPIKDLKGVQRVMGCLAALSRFISRLSERGLPLYRLLRKAECFAWTPEAEEALRNLKALLTNAPILVPPAAGEALLIYVATTTHVVSAAIVVERREEGHALPVQRPVYFISEVLSETKICYPQIQKLLYAVILTRRKLRHYFESHPVTVVSSFPLGEIIQCREASGRIAKWAVEIMGEAISFAPRKAIKSQVLADFVAEWVDTQLPTAPIQPELWTMFFDGSLMKTGAGAGLLFISPLRKHLRYVLRLHFPTSNNVAEYETLVNGLRIAIELGVRRLDACGDSQLVIDQVMKNSHCHDPEMEAYCDEVRRLEDKFYGLELNHIARRYNETADELAKIASGQTTVPPDVFSRDLHQPSVKTDDTPEPEKASAEREAPSAQSEAPSVRPEAPSVRPEVPSAHEVPSAPKGETLRIEEERSGVTPNRNWQTPYLQYLHRGELPLDRAEARRLARRAKSFVLLGDGKELYHRSPSGILQRCSPIAEGQKLLQEIHLGACGHHTAPRALVGNAFRQGFYWPTAVADATRIVRTCEGCQYYAMQTHLTAQALQTIPITWPFVVWGLDLVGPLQKAPGGYTDLLVAIDKFSKWIEVRPLNSIRSEQAVAFFTNIIHRFGVPNSIITDNGAQFTGRKFLDFCKDHHIRVDWAAVAHPMTNGQVERANGMILQGLKPRIYNDLNKFGKRWMKELPSVIWSLRTTPSRATGFTPFFLVYGAEAVLPIDLEYGSPRTRAYADQSNQANREDSLDQLEEARDMALLHSARYQQSLRRYHARGVRS

SEQ ID NO: 57127 - protein, 130 aa, Zea mays
  Coding DNA Sequence Number=SeqID_15348
  Subcellular localization annotation: CTP_CleavageSite=62; ConfidenceScore=5.42e-01
MTVGTQGRRILVFQVTSSTLMAQSSVFVGGKTFASRSHITFGSPDFLATATGELHLVDSDVSAAVGVGGPTCSATRSNADKQCLKRHDVILKRRLNRLAAAIRQNAEGALPSTFVAVIGHHPLPFLTCST

SEQ ID NO: 57128 - protein, 46 aa, Zea mays
  Coding DNA Sequence Number=SeqID_15349
MEIINYRLLEFKFVYILSPSLFEVRGQVEAKMSKEDVLKVQVLDST

SEQ ID NO: 57129 - protein, 80 aa, Zea mays
  Coding DNA Sequence Number=SeqID_15350
  Gene Ontology: Mol. function=nucleic acid binding; Cellular component= intracellular; Biological process=transport
  Homolog annotation: Hit_ID=Q6ZG86; Match level="QueryCoverage=65%, HitCoverage=10%, E-value=1e-17, Identity=81%"; Hit description =Putative Ras-GTPase activating protein SH3 domain-binding protein 2
MASAATQVGTYFLRNYYNLLQQTPDVVHQFYIEASTMVRVDDLTGTTAAANNMMKQKRNREEPSLDQTEELDAVDAFKTC

SEQ ID NO: 57130 - protein, 44 aa, Zea mays
  Coding DNA Sequence Number=SeqID_15351
MALVVASLCTAWRGTLINHMMRKTSQVNPKHGLLRMVMLMDEPA

SEQ ID NO: 57131 - protein, 97 aa, Zea mays
  Coding DNA Sequence Number=SeqID_15352
MTSTCKQTRGSVGFGVGIGLGARCCHRPNREVEDGPMAGDPGALGVHVASWWLQLVSAPWRPGVAPGKETASCYRSVCRKKTLCPAIDRPMDGRIRS

SEQ ID NO: 57132 - protein, 88 aa, Zea mays
  Coding DNA Sequence Number=SeqID_15353
MAEQAAESLLHTADYHGRIPDHGEPRPIDARGALVSNSRPAEEHFPPSRDTTLRGLANENNGSSHTYDGALIELAHCARRNRGDVELR

SEQ ID NO: 57133 - protein, 104 aa, Zea mays
  Coding DNA Sequence Number=SeqID_15354
MSNFPPLWDTTLRGLANENDESGHTCGGAVIVPTQSAWRNRGDVELRGEAGWLKLVPGGFKDKGKLQPRGPGVAGCRPGVCYARSAMTIWVHLSARDQGKHRVT

SEQ ID NO: 57134 - protein, 69 aa, Zea mays
  Coding DNA Sequence Number=SeqID_15355
MAMEEWSCCVASWTWTSPRSAQGAPARWGRRLPAAAAHQEEQGGRSTIGGVWLLELNRRSGSLCARTGE

SEQ ID NO: 57135 - protein, 185 aa, Zea mays
  Coding DNA Sequence Number=SeqID_15356
  Subcellular localization annotation: CTP_CleavageSite=62; ConfidenceScore=5.51e-01
MSGPCLCKSPTFTIKAYGLGLSLGLGRRSPPCPSLGLVLSLGLGRRSPPRPTPGLGLSLGLRRSYEGTRLVSHLRSLRQQGSRHFSDGHVSSCTGLKTLLRQPWARSNKFTGRLTDLAGPKHRQLARQPGTVLRSGSLEFMFRDSGYDMKRNTRVRPATLLVVGGGDGATVARQEEAPRRLSDQS

SEQ ID NO: 57136 - protein, 196 aa, Zea mays
  Coding DNA Sequence Number=SeqID_15357
MAVGGPPLVLVVWLCGMSRLAGRRALPLLNRVGLDKAAWLAAMPPANGPGRHKVVVTATVFYSFFPSIIPFRPRMVSSAGKAWAALGPGMMDLMPWWLDLVPLGLDAVPVVSAMLGATALAYPGFPSSWPDPGSIGRRAMVVVCARARDVFGTWQCDARGKVIPGSMGPTGGGVAIEVRLGHSVTFAIDAFASQCP

SEQ ID NO: 57137 - protein, 959 aa, Zea mays
  Coding DNA Sequence Number=SeqID_15358
  Gene Ontology: Mol. function=ionotropic glutamate receptor activity; Cellular component=membrane; Biological process=ion transport
  Homolog annotation: Hit_ID=Q8GXJ4; Match level="QueryCoverage=94%, HitCoverage=93%, E-value=0.0, Identity=51%"; Hit description =Glutamate receptor 3.4 precursor
  Pfam annotation: Domain name=ANF_receptor; Domain location=58-420; Score=266.5; E_value=5.3e-77; Accession=PF01094.18; Description =Receptor family ligand binding region
  Pfam annotation: Domain name=Lig_chan; Domain location=608-872; Score= 329.1; E_value=7.6e-96; Accession=PF00060.17; Description=Ligand -gated ion channel
  Pfam annotation: Domain name=SBP_bac_3; Domain location=488-830; Score=-10.4; E_value=2.2e-07; Accession=PF00497.10; Description =Bacterial extracellular solute-binding proteins, family 3
  Pfam module annotation: Pfam domain module=ANF_receptor::Lig _chan::SBP_bac_3; Domain location=58-420::608-872::488-830
  Subcellular localization annotation: CTP_CleavageSite=34; ConfidenceScore=5.56e-01
MASPLSSSSSSTSTSTSTLLRLICLCTALPVALQAAAARPPNVTVGALFTFDSVIGRSARTAIQLAVDDVNRDPAVLRDTNLSVIFQDTKCSGFVGTIQALELMERHVVAVVGPQSSGIAHVVSHVANQLRVPLLSFAATDPALASSQYPYFVRATHDDRFQMAAVADVVAHHGWREVTAVYVDNDYGRGGVVALGDALEALRARVSYRAAFPPGADRAALADLLVRANMMESRVFVVHASPDSGLDVFAAARSLDMMATGYVWIATDWLAAAIDAAGAGAAAAAGNIQGVLMLRQYTPDSDAKASLVSRFAAKQYINAYGLFAYDSVWMAARAIDQFLDDNASGGNVSFSADRNIRDANGSALGLSALRVFDQGEQLLRKVMLANFTGVTGSVRFQLDADGSGGATLINPAYEILNVGGTGVRRVAYWSNYTRLSVEAPRLLADGGPPPNSNNTTTQQQQQMYSVIWPGDTTAKPRGWVFPNNGKPLRIGVPYRTTYKQFVSKDRSSPDGVSGYCVDVFNAAVALLPYPVPASFVLFGDGVKNPSYNDLVQRVADGFFDAAVGDISIVTNRTRVVDFTQPYVESGLVIVSTVKAKNSNEWAFLKPFTPGMWAIIGAFFLFVGAVVWILEHRFNPEFRGSPRRQMVTIFWFSFSTMFFAHRENTVSTLGRFVLIIWLFVVLIINSSYTASLTSILTVQQLSTGIQGLDSLLSSNDPIGYQVGSFARSYMMDELGVPASRLRELAIDGYAGSLQRGPSNGGVAAIVDELPYVELFLSTNCQFRTVGQEFTKSGWGFAFQRDSPLAVDLSTAILTLSENGDLQRIHDKWLSPGTCASQSTDGVGADRLNLGSFWGLFLICGVACFVALLIYFARILCQFCKYHGHGTTDGAGPFPVPERSLRRPARLTSIRDLMSFVDMKEAEVKRAIRSRSDRRLDGSMGGRSYTSEGPSLSRPSSMSPV

SEQ ID NO: 57138 - protein, 190 aa, Zea mays
  Coding DNA Sequence Number=SeqID_15359
MAIQGTTGSPAPNREHGGGALGRERRRGRRGSWSRGVGWRHGGPAPARWGEGLPAAECRGERGAEVGGEDTWGSLRSSGVRAEGSRAPWEEHTRLEEEEGEITLVPVEKKGAAPALGFKGNREEGGEAWSSSNGARVPSAIGGARLGREMAGRCSTAGRWERLSREDARSCFCALRKKDSVPGVREEPSG

SEQ ID NO: 57139 - protein, 102 aa, Zea mays
  Coding DNA Sequence Number=SeqID_15360
MEEHLRRSSASAVQALLELGQRRSLRARCLEEGISSRSSRRDPAPWGLLRRTENMYEGRSVELGAGGIEEAGAEGWGGAMEALLLHAGEKGSLLPNAMEKGG

SEQ ID NO: 57140 - protein, 113 aa, Zea mays
  Coding DNA Sequence Number=SeqID_15361
MGIRHRAQRAEVRLEMWRHGSREKLLMCLWRRRARLPALGFKGNKEEGGEAWSSSNGARVSSAMGGARLGREMARRCSTARRWERLSREDAKRSFCALRKKDSLPGVREEPGS

SEQ ID NO: 57141 - protein, 100 aa, Zea mays
  Coding DNA Sequence Number=SeqID_15362
MDPSLAPTRSEKMALSSKGHKSPSGGDACMTKNRQITRRTGGYIILMRLRAIKPCSDGHYLWATPYGIIKVSFLANVVLLVFTLVMFTTASLARSQLKGN

SEQ ID NO: 57142 - protein, 155 aa, Zea mays
  Coding DNA Sequence Number=SeqID_15363
  Subcellular localization annotation: CTP_CleavageSite=59; ConfidenceScore=5.04e-01
MAEGIVRRAIQSSPAHDLASEGYHHEQLAPVNPTVPTTASRQRRPSVPVVAVLTNPSLLSSEVFNEAVARRENGGRGLWVRSAFINCAHGVEDVAQHARRKGESLCPALRLLPRRRDDTRAALPSETSAYTLAEADSGGPRRRILRRATCRRLTP

SEQ ID NO: 57143 - protein, 54 aa, Zea mays
  Coding DNA Sequence Number=SeqID_15364
MTSTRNRHRASDYRVEVVWGTLINHVMRKTTQDDPKRWLLRIVHRMDEPEDGMI

SEQ ID NO: 57144 - protein, 114 aa, Zea mays
  Coding DNA Sequence Number=SeqID_15365
  Subcellular localization annotation: CTP_CleavageSite=54; ConfidenceScore=5.35e-01
MPSRGNSRLGKQWPRKSAMGGNWGSRHRSRRAHGVRRRPPWKNLKERRRWRQLRQGGRSAEGASREKDAVEEKREEQGLDQDRAPWGARDCAASTSELREERGRRDCHCTIYVC

SEQ ID NO: 57145 - protein, 122 aa, Zea mays
  Coding DNA Sequence Number=SeqID_15366
MPRLAELKEARTRDRVGTTGEFTATDTLDDHRRSRITKNTATAKNRLGDDDRHGREELDTEARHAIASRELCAHNRFAHTTEELDTCRGEAGRELQQGPSDRAELAAVRRERNAIQGELETI

SEQ ID NO: 57146 - protein, 137 aa, Zea mays
  Coding DNA Sequence Number=SeqID_15367
  Gene Ontology: Mol. function=double-stranded RNA binding; Cellular component=intracellular
  Homolog annotation: Hit_ID=Q9AV50; Match level="QueryCoverage=59%, HitCoverage=15%, E-value=1e-31, Identity=81%"; Hit description =Putative extensin
  Pfam annotation: Domain name=dsrm; Domain location=2-68; Score=66.1; E_value=1.1e-16; Accession=PF00035.15; Description=Double-stranded RNA binding motif
MYKNQLQELAQRSCFNLPSYTCLREGPDHAPRFKAAVNFNGEQFESPGFFTTLRQAEHAAAEVALAALARRGPSYSLAARILVVESGDLRVFLVRVLLIVNRSLEPFATATHHGILVGYSLSRASRLRLLGAKNGVS

SEQ ID NO: 57147 - protein, 288 aa, Zea mays
  Coding DNA Sequence Number=SeqID_15368
  Gene Ontology: Mol. function=protein serine/threonine kinase activity; Cellular component=membrane; Biological process=protein amino acid phosphorylation
  Homolog annotation: Hit_ID=Q10SF5; Match level="QueryCoverage=83%, HitCoverage=77%, E-value=2e-17, Identity=68%"; Hit description =Protein kinase domain containing protein, expressed
MACCASMTAEETFGIITHGRFGFIETEDTYDVLSSSLPPSAGVVKEFFVPAGGSGDFRVTFTPAAGSAAFVNAVELFPAPEELLWNASVTPPNTYRDYAASAPISRNLTVTVGMSDKSSPSEGGFLKLRPSGSGSRSSSRRVLIIALSAVLGASVLASVVLCLCFVARRKGGWRDRRHWRRRAASSCRGPIAKVADFGLCARPVIDQALEREQINLAEWAVGWQRRGQLERIADPRILGEVNENSLRKFAETAERRRPWPTCCGTIHELFRGLDNWSPPLPRNSTGTG

SEQ ID NO: 57148 - protein, 68 aa, Zea mays
  Coding DNA Sequence Number=SeqID_15369
MGIKAERAERACWRAGNSDRRNSREMGASGERRATKRNPRWANSKLGRAAGAAGGEAGCAHRKQARAR

SEQ ID NO: 57149 - protein, 183 aa, Zea mays
  Coding DNA Sequence Number=SeqID_15370
MNLLRGLSSRYHHLKALIKRTVPFLSFHDVRNELLLEELTLDTKSPASTTTLYGTPSGAQAPSALTRSSATQGRPRERRLHSGWPRSWRWPGVAVILQPVDRDHRHVDGHDHGCYSTASTSAGSATLRYPPPPTTPTSPLLSHSRTTTPTHWSPMAGGWDQASLAAAFRTMAMTPPHQLGGGL

SEQ ID NO: 57150 - protein, 187 aa, Zea mays
  Coding DNA Sequence Number=SeqID_15371
  Gene Ontology: Mol. function=nucleic acid binding; Cellular component= nucleus
  Homolog annotation: Hit_ID=Q2R4J4; Match level="QueryCoverage=52%, HitCoverage=57%, E-value=8e-46, Identity=79%"; Hit description=Zinc finger CCCH type domain containing protein ZFN, putative, expressed
  Pfam annotation: Domain name=zf-CCCH; Domain location=63-89; Score =46.4; E_value=9.7e-11; Accession=PF00642.15; Description=Zinc finger C-x8-C-x5-C-x3-H type (and similar)
MAQIGSSSSEDQQRTPGAAQYYTGSRQSGTSIGDQGMFSSYQAGSVPVGLYAVQRENLFPERPDQPECQFYMKTGDCKFGAVCKFHHPRERIIPTPNCALSPLGLPLRPLLLTLGRLEEQRSLSGDCYMQIEHHGPIVDVHLTTPFKLKVDRGILKRDSISGSVGRSYKRRSIGAATNTRNEQQDHG

SEQ ID NO: 57151 - protein, 69 aa, Zea mays
  Coding DNA Sequence Number=SeqID_15372
  Gene Ontology: Mol. function=nucleic acid binding; Cellular component= nucleus
  Homolog annotation: Hit_ID=Q2R4J4; Match level="QueryCoverage=70%, HitCoverage=11%, E-value=2e-22, Identity=89%"; Hit description=Zinc finger CCCH type domain containing protein ZFN, putative, expressed
  Pfam annotation: Domain name=zf-CCCH; Domain location=19-45; Score =37.2; E_value=5.5e-08; Accession=PF00642.15; Description=Zinc finger C-x8-C-x5-C-x3-H type (and similar)
MWQMNLEEAMELGPYPERVGEPDCSYYMRTGMCRFGMTCKFNHPADRKLFHTVFISEASRMGSQFWVYS

SEQ ID NO: 57152 - protein, 62 aa, Zea mays
  Coding DNA Sequence Number=SeqID_15373
MAAPSGGGGGGAGEGSSSAAAAATIGVHGVDQGEQPLLLLLGLRLFTFGVECCLFTLSNYMI

SEQ ID NO: 57153 - protein, 162 aa, Zea mays
  Coding DNA Sequence Number=SeqID_15374
MGRSKRGQDGLAALTYQGLDSIRFTLLLLVRRVDGGTAGGVELSIAVRAYWRSIELAGLGGSNDSEETSSEEVEDSSDSEEWSGGKDDGSSGDDDGKGGGEGDDEDGDDKGDGDDDSKGDDSGKGDDKGDDGDGKADGDSKGDNSGKGDDGNGKADGIMLLA

SEQ ID NO: 57154 - protein, 158 aa, Zea mays
  Coding DNA Sequence Number=SeqID_15375
MSGAPEDSNSNSSPSGICRGNSAIIHRTVRCTPDSVRCSKEEWPQELASFGKLQRLLRYNSPDMSDVHRTVWCNSGATATCSAFIARQRAQKSGVPILAHQTLYSACPVRHRTSRRAQKTELQWSEPNGFGYVAGAPDMSGVHRTVRCTIRQSAPPNG

SEQ ID NO: 57155 - protein, 87 aa, Zea mays
  Coding DNA Sequence Number=SeqID_15376
MGFDIKDELDSDDGVAVRAGRGNQMVWRWRSGWFRRTILRERGRRDKRERAQLWENGREFGVQFIEGREGERAVGVLGGHQWRRFME

SEQ ID NO: 57156 - protein, 175 aa, Zea mays
  Coding DNA Sequence Number=SeqID_15377
  Homolog annotation: Hit_ID=Q6QP51; Match level="QueryCoverage=27%, HitCoverage=22%, E-value=1e-14, Identity=75%"; Hit description =Putative growth-regulating factor 1
MQAACNRTKGAHPFDFDASSMEAQAHTSCNRRAGYYVRETAPPLAPVPRLLDCGTGAATQGDPAHDPTVPTEHIGHGSVSRGRRRDGRYGQKWAGSNGGGRDRERGYSERDPSLRRKRAPSPPTDQRFEGWPLGRVQQPPQSTRAPRPLLVRGSKAGPSEGFNGRLRPLGLRAHY

SEQ ID NO: 57157 - protein, 211 aa, Zea mays
  Coding DNA Sequence Number=SeqID_15378
  Gene Ontology: Mol. function=protein binding; Cellular component =spliceosome; Biological process=mRNA processing
  Homolog annotation: Hit_ID=Q6QP54; Match level="QueryCoverage=49%, HitCoverage=37%, E-value=2e-22, Identity=83%"; Hit description =Putative kinase
MAPPVDVVGPSPRLSEVEAPPRSRSSLSFEAEVESEPLGRARRRPSAEAKAESEPWGRAKRSSPSSVAEPESEPWGRAKRSSSSSGAEPESEPWGRAKRSSSSSRAEPESEPWGWARRSSLSSRAEPKSEPWGRAKRSSLSSGAEPESEPWGRAKRSSSSSGAEPESEPWGRAKWSFLWRLRPDLAAVSLTLPSGTAVGAAQAVLSSCQTG

SEQ ID NO: 57158 - protein, 255 aa, Zea mays
  Coding DNA Sequence Number=SeqID_15379
  Gene Ontology: Mol. function=double-stranded RNA binding; Cellular component=intracellular
  Homolog annotation: Hit_ID=Q5N8Z0; Match level="QueryCoverage=85%, HitCoverage=53%, E-value=2e-53, Identity=45%"; Hit description =Putative dsRNA-binding protein ODB1
  Pfam annotation: Domain name=dsrm; Domain location=102-168; Score =47.9; E_value=3.5e-11; Accession=PF00035.15; Description=Double -stranded RNA binding motif
  Pfam annotation: Domain name=dsrm; Domain location=11-78; Score=61.3; E_value=3.2e-15; Accession=PF00035.15; Description=Double-stranded RNA binding motif
  Pfam annotation: Domain name=dsrm; Domain location=174-225; Score =6.6; E_value=0.38; Accession=PF00035.15; Description=Double-stranded RNA binding motif
  Pfam module annotation: Pfam domain module=dsrm::dsrm::dsrm; Domain location=102-168::11-78::174-225
MDLLNQLQGMYKSRLQELCQKRRWASSLYEPTREGPAHAPLFHATVIVNGERFSSRDEGEKSLKEAYNLTAMAAFDNLIPLPAVALAPAAPAPPPSETQLPYKSQLQIYAQKRGKLLPSYRLIRVGSLGAPLFKSEVTIDGQTFESPEYCHTIKEAETVAAKVALMSLPQEANPTQQLLVGLDVSNYSAGFVSTVEIQGSSFHGKRGNSKKQAEMNAAKSAFEHLKTDAGLVSLSRGDGKRRHNMRAAAQAALGA

SEQ ID NO: 57159 - protein, 141 aa, Zea mays
  Coding DNA Sequence Number=SeqID_15380
  Homolog annotation: Hit_ID=Q5N8Z0; Match level="QueryCoverage=45%, HitCoverage=14%, E-value=2e-12, Identity=56%"; Hit description =Putative dsRNA-binding protein ODB1
  Pfam annotation: Domain name=dsrm; Domain location=31-98; Score=43.6; E_value=6.5e-10; Accession=PF00035.15; Description=Double-stranded RNA binding motif
  Subcellular localization annotation: CTP_CleavageSite=39; ConfidenceScore=5.44e-01
MRLLMSTPNSPSSSPHVMSSPRLRLTRTTSYKMRNTELCQKRLWAPPLYEPTREGPAHAPLFRDTVVVNGKRFSFWDEGEKSLKEAYNLAAMAAFYNLIALSVAALAPAAPTPSPSGRNHSKVQASAYLLKLILPDELKKS

SEQ ID NO: 57160 - protein, 75 aa, Zea mays
  Coding DNA Sequence Number=SeqID_15381
  Subcellular localization annotation: CTP_CleavageSite=43; ConfidenceScore=5.16e-01
MAALKTSVAGGGVWFLCGEKAGRSAWRSGGSYPQTSGLHMSARCTERRRTRVWQSGPMCQRQGERARDAELGWAR

SEQ ID NO: 57161 - protein, 221 aa, Zea mays
  Coding DNA Sequence Number=SeqID_15382
  Homolog annotation: Hit_ID=Q6QP51; Match level="QueryCoverage=83%, HitCoverage=96%, E-value=4e-18, Identity=48%"; Hit description =Putative growth-regulating factor 1
  Subcellular localization annotation: CTP_CleavageSite=34; ConfidenceScore=5.46e-01
MMVTFAKTPMMMMVMTGGTFGRRSRRRFTSAIITASKKAGPSEGFNSRLRALGLRAHYWSEVQRPAPQKGSTAASGHSGFAPTTDQGFVGWPRRPSPASGAIGNSASPDPRAQNRPRLRKTTNSASPDPRARTQPRLRKTTNSASSDPRARTRPRLRKTTNSASPDPRARTQPWPRTTVSASPDPGLGLDLDLERQTRPRPRRSLRLARPRARADHVAGGP

SEQ ID NO: 57162 - protein, 98 aa, Zea mays
  Coding DNA Sequence Number=SeqID_15383
  Pfam annotation: Domain name=GATA; Domain location=60-92; Score=24.4; E_value=0.00025; Accession=PF00320.17; Description=GATA zinc finger
  Subcellular localization annotation: CTP_CleavageSite=64; ConfidenceScore=5.09e-01
TRPRTPAEKNQNSPSNPIANPATDRGCRLLPPALAPTPMGSADRSKIDGIVVPEKGARSCVECRATTTPMWRSGPTGPRANCELGFGLLLMRYETRPR

SEQ ID NO: 57163 - protein, 180 aa, Zea mays
  Coding DNA Sequence Number=SeqID_15384
  Subcellular localization annotation: CTP_CleavageSite=55; ConfidenceScore=5.32e-01
MTLDTRRGSQFRLLALNGYTRMNPWQRRTRIGTRRPPGFFNFPGSTWISRWGRVCWAVYKYSGRTSPTGSFLARESRKARRGSRRTPSYSQLRLGEEEDRANKVTPRVSGSTGQERYGARTRPDGPTPQWPREEITRVRATLTELWYFHEVVDEPARWDPFVGHTREGGTRKQAAPWRRV

SEQ ID NO: 57164 - protein, 210 aa, Zea mays
  Coding DNA Sequence Number=SeqID_15385
  Subcellular localization annotation: CTP_CleavageSite=28; ConfidenceScore=5.20e-01
MQSACNRAKWAHPFDSNAPSMEAQAHTSCNRRAGCYVRATTPPLAPLPRLLDCGTSTATRGNPAYDPTVPARHVGHESVSWGRRRYSQYGQKWADRTGKGDSPKGILPRKGNGPRAPLLIRGSKAGPSEGFNSRLRALRLRAHYWSEVRRPAPRKGSTAASGHSGSAPTTDQGFVGWPSKGSQPPQTKSEGGPWVRSTHNQGSGYAPEVP

SEQ ID NO: 57165 - protein, 446 aa, Zea mays
  Coding DNA Sequence Number=SeqID_15386
  Gene Ontology: Mol. function=zinc ion binding
  Homolog annotation: Hit_ID=UPI0000DB7962; Match level="QueryCoverage =14%, HitCoverage=5%, E-value=1e-08, Identity=38%"; Hit description =PREDICTED: similar to remodeling and spacing factor 1
  Pfam annotation: Domain name=PHD; Domain location=212-260; Score =20.0; E_value=0.00057; Accession=PF00628.19; Description=PHD-finger
MTPKWSACSSNSYRELPSHENGECKSTLTESVPSPTSCFGLHTANTMCSLSSQKKDGNVYKRRKMDKDSNSPITFEDAKEMATQSCTISDDHSSLLLPIISSEALLLNSTASMAGPILDCEEPADVPLEPNSGTDDRCFISNMSPTSMTPDKKNAAECSSSNIGPTESITEHISPRDLCIAILMKDGLINESRTRMAHKEEFTDNDANPLLACNNCGCLEHSLKMLICDSCEAGFHLSCCIPCIKELPTDEWYCAPCLCKKPKSLYGKLSEGRINPSRNTNTRPHGMSHIEYMLKDAEPYVTGVRLGRDFQAEVPEWSGPSSSSDVYFDEPCAIDSAELTTFNLCKMSNQSHSSIGNWIQCRETLNPGDSDKQVVCGKWRRWFGYIQRKPLEAPMRSGILRRDINGKRGHPYMLYSQIIGIVFVVFFGIQSMLIVLFHSQLSNVSW

SEQ ID NO: 57166 - protein, 671 aa, Zea mays
  Coding DNA Sequence Number=SeqID_15387
  Gene Ontology: Mol. function=protein kinase activity; Cellular component=integral to membrane; Biological process=protein amino acid phosphorylation
  Homolog annotation: Hit_ID=Q8L4U4; Match level="QueryCoverage=99%, HitCoverage=83%, E-value=1e-169, Identity=50%"; Hit description =Putative receptor-like protein kinase
  Pfam annotation: Domain name=LRR_1; Domain location=120-143; Score =13.4; E_value=0.81; Accession=PF00560.23; Description=Leucine Rich Repeat
  Pfam annotation: Domain name=LRR_1; Domain location=145-167; Score =7.9; E_value=9.6; Accession=PF00560.23; Description=Leucine Rich Repeat
  Pfam annotation: Domain name=LRR_1; Domain location=169-191; Score =13.1; E_value=1; Accession=PF00560.23; Description=Leucine Rich Repeat
  Pfam annotation: Domain name=LRR_1; Domain location=193-215; Score =11.0; E_value=2.5; Accession=PF00560.23; Description=Leucine Rich Repeat
  Pfam annotation: Domain name=LRR_1; Domain location=217-239; Score =19.2; E_value=0.014; Accession=PF00560.23; Description=Leucine Rich Repeat
  Pfam annotation: Domain name=LRR_1; Domain location=24-44; Score=1.2; E_value=1.7e+02; Accession=PF00560.23; Description=Leucine Rich Repeat
  Pfam annotation: Domain name=LRR_1; Domain location=241-262; Score =10.6; E_value=2.9; Accession=PF00560.23; Description=Leucine Rich Repeat
  Pfam annotation: Domain name=LRR_1; Domain location=48-69; Score=8.6; E_value=7.1; Accession=PF00560.23; Description=Leucine Rich Repeat
  Pfam annotation: Domain name=LRR_1; Domain location=72-94; Score=9.1; E_value=5.7; Accession=PF00560.23; Description=Leucine Rich Repeat
  Pfam annotation: Domain name=LRR_1; Domain location=96-118; Score =6.5; E_value=17; Accession=PF00560.23; Description=Leucine Rich Repeat
  Pfam annotation: Domain name=Pkinase; Domain location=382-664; Score =69.8; E_value=8.8e-18; Accession=PF00069.15; Description=Protein kinase domain
  Pfam annotation: Domain name=Pkinase_Tyr; Domain location=382-664; Score=54.3; E_value=8.4e-16; Accession=PF07714.7; Description =Protein tyrosine kinase
  Pfam module annotation: Pfam domain module=LRR_1::LRR_1::LRR_1::LRR _1::LRR_1::LRR_1::LRR_1::LRR_1::LRR_1::LRR_1::Pkinase::Pkinase_Ty ; Domain location=120-143::145-167::169-191::193-215::217-239::24
  Pfam module annotation: Domain location=72-94::96-118::382-664::382 -664
  Subcellular localization annotation: CTP_CleavageSite=55; ConfidenceScore=5.12e-01
MNYISVRSNALSGQISNKLTSCGGIDLFDVGSNNFSGAAPFALLGSVNITYFNVSSNAFEGEIPSIATCGTKFSRLDASGNRLTGPVPESVVNCRGLRFLDLGANALGGAVPPVIGTLRSLSFLRLAGNPGISGSIPPELGGIEMLVTLDLAGLALTGEIPGSLSQCRFLLELNLSGNKLQGAIPDTLNNITYLKVLDLHRNQLDGGIPVTLGQLTNLVLLDLSENQLTGAIPPQLGNLSNLTHFNMSFNNLSGMIPPEPVLQKFDYTAYMGNQFLCGSPLPNNCGTGMKHRKRVGVPVIIAIVAAALILIGICIVCALNIKAYTRKSTDEDMKEEEEVLVSESTPPIASPGSNAIIGKLVLFSKSLPSRYEDWETGTKALLDKDCLIGGGSIGTVYKATFENGMSIAVKKLETLGSVRGQDEFEHEMSQLGNLSHPNLVAFQGYYWSSSMQLLLSEFVASGSLYDHLHGSHPHAFSESSSRGAGGELSWEQRFNVALGAARALAYLHHDCRPQILHLNIKSSNIMLDGKYEAKLSDYGLGKLLPILGSIELSRIHTAIGYIAPELSSPTLRYSDKSDVFSFGVVLLETVTGRKPVDSPGVATAVVLRDYVREVLEDGTASDCFDRSLRGIVEAELVQVLKLGLVCTSNTPSSRPSMAEVVQFLESVRISS

SEQ ID NO: 57167 - protein, 342 aa, Zea mays
  Coding DNA Sequence Number=SeqID_15388
  Gene Ontology: Mol. function=protein dimerization activity; Cellular component=nucleus; Biological process=regulation of transcription, DNA-dependent
  Homolog annotation: Hit_ID=Q8S5V5; Match level="QueryCoverage=76%, HitCoverage=59%, E-value=7e-84, Identity=67%"; Hit description =Putative bZIP transcription factor
  Pfam annotation: Domain name=bZIP_1; Domain location=190-253; Score =17.3; E_value=0.002; Accession=PF00170.11; Description=bZIP transcription factor
  Pfam annotation: Domain name=bZIP_2; Domain location=193-243; Score =12.8; E_value=0.035; Accession=PF07716.5; Description=Basic region leucine zipper
  Pfam module annotation: Pfam domain module=bZIP_1::bZIP_2; Domain location=190-253::193-243
  Subcellular localization annotation: CTP_CleavageSite=58; ConfidenceScore=5.14e-01
MAAFVPEQGSANRLTRPPGLPPLPQAFAAQQRGDVCMEAVDPAAGPRKAHRRSRSDVRSATSRRRATTSSRRPSSENESEECAADSRAGIRLCAAAADRREGLKRAAAAPVARHARSLSMDSLIGKLNFSAGATGAASGVIPGPNRFSLEFGTGEFSPVEMKKIMADEKLAEMALADPKRVKSFGLIELRCGSSLARVLANRQSAARSKERKMRYIGELEHKVQILQTEATTLSAQLTLLQRDSAGIATQNNELKFRLQAMEQQAQLRDALNEALTAEVQRLKVATAELGDSCSSSNLAQQIQISVQDQMFQLHQQQATPIPFYQLQQAQQNGAGKKHEPTE

SEQ ID NO: 57168 - protein, 395 aa, Zea mays
  Coding DNA Sequence Number=SeqID_15389
  Gene Ontology: Mol. function=DNA binding; Cellular component=nucleus; Biological process=regulation of transcription
  Homolog annotation: Hit_ID=Q8S5V6; Match level="QueryCoverage=99%, HitCoverage=100%, E-value=1e-104, Identity=55%"; Hit description =Putative NAM-like protein
  Pfam annotation: Domain name=NAM; Domain location=5-134; Score=307.8; E_value=2e-89; Accession=PF02365.6; Description=No apical meristem (NAM) protein
MESCVPPGFRFHPTDEELVGYYLRKKVAAQKIDLHVIRDIDLYRIEPWDLQGHCGIGYEEQNEWYFFSYKDRKYPTGTRTNRATMAGFWKATGRDKAVHDKSRIIGMRKTLVFYKGRAPNGHKTDWIMHEYRLETDENAPPQASSISFTVIYLKLPIFIRPRCVYDEALSYTDEEPSGRRLGGVPSVQEETAYPAKDGMGGPQLRLPRDQRHGARRRRRSWTLTRASYAQIRRQQSNKSARFKQEAELDGGAAAALLQYSSSHLVELPQLESPSAPANKSQAASASDEVVDAADSGRRPGKKARADEVATDWRALDKFVASQLSPAAECGLEAAAASSTAAASNVGSQLDHVEDDDMAALLFLNSDGRDEAERWTGLLGPAAGDDGDFGLCVFDK

SEQ ID NO: 57169 - protein, 124 aa, Zea mays
  Coding DNA Sequence Number=SeqID_15390
MAQREARAADKAVAAGGGETRDASHVALEMGGGVGELRAGQSATATAWACGAAAAGVGLAGAGALVWWALAFRPARQQTWMVPVGLVLLGTPLLAWLSLSASGACRWLSRLRGHQPPVRPTPER

SEQ ID NO: 57170 - protein, 142 aa, Zea mays
  Coding DNA Sequence Number=SeqID_15391
  Subcellular localization annotation: CTP_CleavageSite=34; ConfidenceScore=5.29e-01
MANGGGYVWALAAGLQTPRSPPSPPNSSPLCSLVCTLLSGPLHAYSENEPLKYGTVILFNVTMWGCYVNSLKALSSLQATVTNFAANFLSSGLAGYFLFEEPLPSKSFLPGRRTKHSTISQEGVKKHFLCDDEPHDKKIFSI

SEQ ID NO: 57171 - protein, 128 aa, Zea mays
  Coding DNA Sequence Number=SeqID_15392
MSSWCREPAAEQSLTQVREIAAFSGSASTEDKYVVMHNGKASRKNDVLELEQDQDREALVEFEHKDETETKRHAGVKELGDVNLSTTARSAHATEFASIGRNLGSARVEGRRVEEDEQGLDTRRQGSA

SEQ ID NO: 57172 - protein, 85 aa, Zea mays
  Coding DNA Sequence Number=SeqID_15393
MAPTTGAHVPASPRRHLQEGPLSQLFDLTMLVPIALRIFAKAQLKGRGSQLDLALFKSEQSILQRMDKIAYRFTKGYNLFLALQN

SEQ ID NO: 57173 - protein, 134 aa, Zea mays
  Coding DNA Sequence Number=SeqID_15394
MTKSGAARMEHDTTGQRLGHRRASRAPRRLCGYRSAHATEFTREGRNLGWVRTQGSFAAEKNLTDPAEQGARPSGIRAESTAARTRELLGWTRVAWRKMSRDSTHDVEGARRDGRGELKLSRTRPRHGDKRSRS

SEQ ID NO: 57174 - protein, 172 aa, Zea mays
  Coding DNA Sequence Number=SeqID_15395
  Subcellular localization annotation: CTP_CleavageSite=60; ConfidenceScore=5.74e-01
MGAIKLSPASGAIRSSASPDPRARTQPRLQKTTNSTSPDPKARTQPRLRKTTNSASPDPRARTQRRLWKTTNSASPDPRARTQPRLRRRRTPPRPTPGLGSRLSLGRRSPPRPTPGLGHSLGLGRRSPPHPTRGSDSTSEDRLDLDLRGASASPDLGLEPTTSQGAPSLPYP

SEQ ID NO: 57175 - protein, 112 aa, Zea mays
  Coding DNA Sequence Number=SeqID_15396
MVIGNHLTSTVLSQPKQLSILNLTRCGGQNPLGPLEGKNPAWGHKPVAPQGRRVMGWAKTAVEMVRPRKAMGSHLDYSRLGRDPVEASRFSRARCPQTPGIAPNGGAKFSSG

SEQ ID NO: 57176 - protein, 117 aa, Zea mays
  Coding DNA Sequence Number=SeqID_15397
MPDTKFALTGPSRHGRCRSWTAGLDTPGCPASPVSTCIHTCPYLCSENAAPEENVGSCIFRVYHFRLILWKVQKVQGNAGAACSASDPTQPKAAAAAGTFFSAMHGMERRPPTAGAA

SEQ ID NO: 57177 - protein, 170 aa, Zea mays
  Coding DNA Sequence Number=SeqID_15398
MEAIFGSEVATGRFAMGSNEPLGIHVNVDTIDMDADTLVQVEEDALCDDIKNVAETSKKEKKKVPYEEASLMLVLTDSSRACLHPAILGLYKAIMGFLVPLGRHLWQFLGIYLRNDRACLQLNHNQSFPLNFEMGHIQTCETRVINLSFSQLKSFKLHHSHSDMNSMADK

SEQ ID NO: 57178 - protein, 109 aa, Zea mays
  Coding DNA Sequence Number=SeqID_15399
  Gene Ontology: Mol. function=transferase activity; Cellular component= endoplasmic reticulum; Biological process=biosynthetic process
  Homolog annotation: Hit_ID=Q2QN13; Match level="QueryCoverage=64%, HitCoverage=15%, E-value=2e-21, Identity=69%"; Hit description =Glycosyl transferase, group 1 family protein, expressed
MAILVGLVAVLSALFAAALRRLLISCRHPAYAAGFFHPYTNDGGGGERVLWCAVRAVQELCPDLPCAVYTGDADAAPEALAARALDRFGVRLLRPPQLSIVPLWKSASY

SEQ ID NO: 57179 - protein, 332 aa, Zea mays
  Coding DNA Sequence Number=SeqID_15400
  Gene Ontology: Biological process=DNA repair
  Homolog annotation: Hit_ID=Q6JDV7; Match level="QueryCoverage=19%, HitCoverage=7%, E-value=1e-08, Identity=51%"; Hit description=DNA -directed polymerase kappa
  Subcellular localization annotation: CTP_CleavageSite=52; ConfidenceScore=5.34e-01
MSQLHDEKDDPSTSTQKTLDIFFHSSNSNSNGNGTNVQRTTNSPGQDNDSISLTSKEEYLAPDAGTSVSTGQQDFFLHDEICFIPEQQRSLDNDTKEAVLSDPLGGTKSDDVSYSAKHVKLAFHKVTPTTKLDEPDPLVSPKVVSSSSKPDQQSWIDGYICSICGFELPSGFEEERLEHSDFHLAETLQQEEEVDGTRHISNERSAGSSSPMAPPTSRSILLPIHDSLGSRCDRSLRVLVNMLDIIIHRLNKCLPVDGTCLIKQPGDTYDDFASSKPDSECHYVVFDLDLNNFYACGSSGVSLSAFAFLFSELVQYNQTQVDNITELERRLE

SEQ ID NO: 57180 - protein, 106 aa, Zea mays
  Coding DNA Sequence Number=SeqID_15401
MDGGNIWRCRGWRQAQRGSCGGGRGQAWSCISAAQGEAATAADPGHHGVRRRRVGGEWEVAHDSRMRLAMLDMCGMWRMRMGREVGLRDIRPPAADADGARRTDDG

SEQ ID NO: 57181 - protein, 131 aa, Zea mays
  Coding DNA Sequence Number=SeqID_15402
MGRRKEHLERVRVEAYCLDVFKPVEMVEIDSMEKLDDAFSCSFKKIGIKVILESCGSIAASLGKHSEMKLKQSKRETHRGHSLSKGKKPLCVFCGLAPTKVLLFANLYRSVSPFKKCLDEREKVTIQKVLG

SEQ ID NO: 57182 - protein, 218 aa, Zea mays
  Coding DNA Sequence Number=SeqID_15403
  Gene Ontology: Mol. function=transferase activity; Cellular component= endoplasmic reticulum; Biological process=biosynthetic process
  Homolog annotation: Hit_ID=Q2QN13; Match level="QueryCoverage=87%, HitCoverage=42%, E-value=1e-87, Identity=83%"; Hit description =Glycosyl transferase, group 1 family protein, expressed
  Pfam annotation: Domain name=Glycos_transf_1; Domain location=3-192; Score=79.0; E_value=1.5e-20; Accession=PF00534.10; Description =Glycosyl transferases group 1
VYQDKRVPLEKTNNHFLVLNFSGTVPPQKRESSPFLAHGLQLEAFALALQKLDPDFPKPKIQFVGSCRNKEDLDRLQKLKDRSTELHIDELVEFHKDISYRDLVQFLGGAIAGLHSMTDEHFGISVVEYMAAGAIPIAHKSAGPMMDIVLDEDGHQTGFLASEKEEFTEAIIKVLRMPESGRQEMAAAARKRAQRFSDQRFHQDFTETVRPILSAREG

SEQ ID NO: 57183 - protein, 498 aa, Zea mays
  Coding DNA Sequence Number=SeqID_15404
  Gene Ontology: Cellular component=membrane
  Homolog annotation: Hit_ID=Q2QN15; Match level="QueryCoverage=95%, HitCoverage=82%, E-value=1e-153, Identity=63%"; Hit description =Early-responsive to dehydration protein, putative, expressed
  Pfam annotation: Domain name=ALG3; Domain location=235-496; Score= -285.5; E_value=0.093; Accession=PF05208.4; Description=ALG3 protein
  Pfam annotation: Domain name=DUF221; Domain location=162-496; Score =227.4; E_value=3.1e-65; Accession=PF02714.6; Description=Domain of unknown function DUF221
  Pfam module annotation: Pfam domain module=ALG3::DUF221; Domain location=235-496::162-496
MARVQKKSGSSCSFYRNLTKQLWLHFSAVYIITGITCYLLYHEYKYISGKRLEYFMISKPLPQHFTVLVRAIPVSDGVSVGDAVDKFFKEYHASTYLSHTIVRQTGKLRRLLNDAESICTKLTNLNHVRRSTGDPPRKLGLFSRNDLVGEYQKRLEDLEENVRMEQSDATRRQEIPAAFVSFRSRYSAANAVYIRQSDNPTEWQTEEAPDPHDVYWPFFSTSFMERWIAKFVVFVASVLLILVFLLVVAFVQGLTYLEQLEKWLPFLRNILEIAVVSQLVTGYLPSVILHVLSSCVPSIMKLFSTMQGFVSVSGIEQSACNKMLRFTIWTAFFANVLTGSALVQFEIFLNPKELPSKLAVLVPAQLFNVYAPKYDTGGKFWPVVHNTTIFSLVVLHIIAIGVFGIKKLPLASSLLLPLPPLTLLFNEFCRNRFLPIFEAYSTESLLKKDREEQSKPDMAEFFSNLVTAYCDPALKPFQRASNSDERTAPLLASLSSSR

SEQ ID NO: 57184 - protein, 62 aa, Zea mays
  Coding DNA Sequence Number=SeqID_15405
MGYRFAHARPVSGPTCRSPVPLAPGPADNEQSVVPECVAEDVPEQQPGEGKCPLTYYVLLTL

SEQ ID NO: 57185 - protein, 261 aa, Zea mays
  Coding DNA Sequence Number=SeqID_15406
MTRPIRPVTSRARLNSGEAEVGRRQGIIEGTGHGNGCLTLGRSSGSLGAASGGLGDRYGERGSPARPSGERQSARDSGTVRNGMGKRVRVQAVLKRELGAWASDVAGDPGERARVRTCWSTMGRGEGGADRASHGVARESRRAVKRVSELTRQALRGREEEGCAGEGDWCRESGPTGQRERRGHAGGTAADRWSPPVRRHGRTVQLPLPPATPAPKFTLAMRFVPTGARITPRDEKIFTADELETLFRPGRRVRLTHGQFR

SEQ ID NO: 57186 - protein, 90 aa, Zea mays
  Coding DNA Sequence Number=SeqID_15407
  Subcellular localization annotation: CTP_CleavageSite=53; ConfidenceScore=5.01e-01
MDGLATQVHCDVLSFQDAWRTIVKRLTPVRIIPASRSPSGFVVAKNVIGQGPRAVLRMDQKSIDEERGSTGHQTENEVNFFQKGDTWYPD

SEQ ID NO: 57187 - protein, 447 aa, Zea mays
  Coding DNA Sequence Number=SeqID_15408
  Gene Ontology: Mol. function=pepsin A activity; Cellular component =cellulose and pectin-containing cell wall; Biological process =proteolysis
  Homolog annotation: Hit_ID=Q6ZC30; Match level="QueryCoverage=91%, HitCoverage=93%, E-value=2e-81, Identity=43%"; Hit description =Putative nucleoid DNA-binding protein
  Pfam annotation: Domain name=Asp; Domain location=92-442; Score= -120.7; E_value=1.8e-06; Accession=PF00026.14; Description=Eukaryotic aspartyl protease
  Subcellular localization annotation: CTP_CleavageSite=56; ConfidenceScore=5.14e-01
MITIIRCMGAMEVLTTLLLSVASLHSSAASPPLGYRSTLTHVDSHGSFTKTELMRRAAHRSRHRASMMLSRYFTMSTSSDAGPARLRSGQAEYLMELAIGTPPVPFVALADTGSDLTWTQCQPCKLCFPQDTPIYDTAVSSSFSPVPCASATCLPIWSSRNCTASSSPCRYRYAYGDGAYSAGVLGTETLTFPGAPGVSVGGIAFGCGVDNGGLSYNSTGTVGLGRGSLSLVAQLGVGKFSYCLTDFFNTSLGSPVLFGALAELAAPSTGAAVQSTPLVQSPYVPTWYYVSLEGISLGDARLPIPNGTFDLRDDGSGGMIVDSGTTFTFLVESAFRVVVDHVAGVLRQPVVNASSLDSPCFPAATGEQQLPAMPDMVLHFAGGADMRLHRDNYMSFNQEESSFCLNIAGSPSADVSILGNFQQQNIQMLFDITVGQLSFMPTDCGKL

SEQ ID NO: 57188 - protein, 129 aa, Zea mays
  Coding DNA Sequence Number=SeqID_15409
MGGDRAASIGRSPGQPTAGGVVDVDAVIGGWGRGLSVSSEATGEDRVANVGRSRGSRLRASCPLKLERRKRTLRDISVLYVLGCPQPNTEAWGGTKIEATLTINILRLYTVATIIHHESYQQNYNTKII

SEQ ID NO: 57189 - protein, 231 aa, Zea mays
  Coding DNA Sequence Number=SeqID_15410
  Subcellular localization annotation: CTP_CleavageSite=49; ConfidenceScore=5.42e-01
GLPRATQAVTSKPRGLPQASWDARGRATPQRRGRAAQAGRRAGRGYAPRRSHDGAMAARQQPGRACAGHRGPAPGATAELRPPWPSRAIRPNRAGANRGRARGDRATTGAPSWARAPDRAERGRAMSPRHGRALAEPRRARSQAEVARPRPGRCTHAGPRHGMGHSPREQGEVEATPGLGHPRATEKKGGEKGKGRGKMGTSSPRRIPNGRRDIGRTAELDDRRDGDFAWA

SEQ ID NO: 57190 - protein, 72 aa, Zea mays
  Coding DNA Sequence Number=SeqID_15411
MEMVDRTTTLMQRDDDVAKESLEIIYPKHHMSGVLNMTLMVPIRSGSVNLTADDRRAVIHDDRRDSCAVDCG

SEQ ID NO: 57191 - protein, 151 aa, Zea mays
  Coding DNA Sequence Number=SeqID_15412
MAPASVPALPTAMDTKDEGDGGSKNQNSVVVVKSEVVCTNGGPLVVGTELVKYEGGDTTECSSSFGDTCSGFEGEADNGEPEVNSSLSAHANGVGPSKPPRSIMNLQLCLFNQDFVSATSLYLEKKFPAWDSNPSQQQQQQYSILVTSMLG

SEQ ID NO: 57192 - protein, 457 aa, Zea mays
  Coding DNA Sequence Number=SeqID_15413
  Homolog annotation: Hit_ID=Q84YD6; Match level="QueryCoverage=77%, HitCoverage=73%, E-value=4e-89, Identity=46%"; Hit description =Hypothetical protein 19
DGSISGGLDSNTLLDSEDYDMICEQHGLQDILLTIDGLQSRVHLLQDRLSKAHSEGENLAFSGADTDVRVAGKRQRTQKHSFSNTKSRHTKPQKRKNLNILLKDDDDGQALAGGPALADGETDVHMIGASRSTEERSGECNHSRDKAITVDLLLGTGNSITNSDIGDLYNVNTDDVLIANQAAVEACQQFHEAKHLPSGSPSKDKIISAPAEMKNNSPPVEVKNTCGPVKIESLCSPVEGENTSDPALEQESFLEKSPSRQPVSPGNKQELKPKKRRKKKGSLFTKKQRKVDSRTPDAKEKTEGTPSDVAEETESPLSGATGPGTMRSCCAGKKRKSGNEPADANKTGKPSSAVKKQKTENPTAAANATKKRATEKKLESASASQKLQVEKAVLVAVNSRRSQRLNSLRNLNLDCKWFLCRCSIEAVDTMNEWIQLLPRCLLCQPSHQIVPYMNAYY

SEQ ID NO: 57193 - protein, 114 aa, Zea mays
  Coding DNA Sequence Number=SeqID_15414
  Subcellular localization annotation: CTP_CleavageSite=42; ConfidenceScore=5.13e-01
MVSNPSKASYCYPLPITAFGSEFRNRNRSLGGRDHGLRRGSRAAAGLTVVGGILSVRPWDPRWRVWIRSVYGLDVGVGVSSWSLDPAMDDCDLITSYRFDCVIGTVDLCEHGED

SEQ ID NO: 57194 - protein, 122 aa, Zea mays
  Coding DNA Sequence Number=SeqID_15415
  Subcellular localization annotation: CTP_CleavageSite=60; ConfidenceScore=5.78e-01
MARAALPRPVSSPVALRPDSSPSLLASSPLWASSPATVTAPHSSPAVSHFTGSLQLPSLRSSAPGAPRRASPLAHHPVLTEPAWADLAPLPASSALVAALATIQEVVAASLALEHEHAMAPL

SEQ ID NO: 57195 - protein, 256 aa, Zea mays
  Coding DNA Sequence Number=SeqID_15416
KIEQSTKDECREVFSLWIKLVCLFSYLKIFLSATFHLEGHDLLKQEYDRSKGASSTPDSGVQPGATTNEESAVEVAVPVASILETRFGLPAGSCSPICDHHSSTNKTPPGPNGSSWDLDGQFRVQQRKHRVGAEAPQLTKRGDAARGGTHGDDEARVCLAQVLPGETAEDAGQHMTAARVHGTGARVRYANSEVYTNTIQYNPEVVFSVSSVVTDGTDANRERWIVVCRGICRKAELQDPGIAFDVNSWSFPIALG

SEQ ID NO: 57196 - protein, 182 aa, Zea mays
  Coding DNA Sequence Number=SeqID_15417
  Homolog annotation: Hit_ID=Q2R179; Match level="QueryCoverage=27%, HitCoverage=12%, E-value=1e-10, Identity=66%"; Hit description =Expressed protein
  Subcellular localization annotation: CTP_CleavageSite=21; ConfidenceScore=5.07e-01
MSSNAIPFPTRCTTRAITVARATRAVTILPPCLAPPSRVQRCPSPRDPLTHELCHHVVHQRDAMKPRSVPTGTAPLAPRVVERSSHDPPPAQPRPPLLLLFACVCLPVAPIHSLRVLKQFFREKDTMLADMVIGELVKVLKITPVPIVFASFLGGSKGCRYKVLQVRRKALTLNQNNFSHWS

SEQ ID NO: 57197 - protein, 442 aa, Zea mays
  Coding DNA Sequence Number=SeqID_15418
  Gene Ontology: Mol. function=structural constituent of ribosome; Cellular component=integral to membrane; Biological process=apoptosis
  Homolog annotation: Hit_ID=Q017M3; Match level="QueryCoverage=80%, HitCoverage=39%, E-value=5e-36, Identity=30%"; Hit description=[S] KOG1032 Uncharacterized conserved protein
  Pfam annotation: Domain name=GRAM; Domain location=70-146; Score =68.7; E_value=1.8e-17; Accession=PF02893.10; Description=GRAM domain
  Subcellular localization annotation: CTP_CleavageSite=65; ConfidenceScore=5.82e-01
MAAPAVASPSRATPTDIPTAAPSPASPPRRLASAPPAVDASGSSSPASAHSGDQLSAPDASSPLLASRSEEYRLLFRLPPDEVLVQDFNCAVQENILLQGHMYLFLHHICFYSNIFGYETKKCPDIVPVFQKTIPLQEVTDVRKAKTAAIFHNAIEIVAGSRRHFFGSFLSRDEAYRIIVDGWEQHVSDARLLLERQETKSASSSEENGYVVLEGTKESKQDGDLSLPDRSVNSTAVSSSNADGGDSNINISKRFSEVEENGLEDNIVALNPFNLEPVDAPPSVPESYTMISESKFQVPVEVLFNFLLSDGAFGFVDDFHTKCGDKEFSCSKWRTDEQGGLVRDVSFLHPIKIYLGAKFGTCQEVQKLRLYKNRRLVIQTSQSIGDAPYGDHFTVEGIWDVEQDSLDENCCDLRIYINVAFSKKTIFRELTPTNSSLCKKVC

SEQ ID NO: 57198 - protein, 88 aa, Zea mays
  Coding DNA Sequence Number=SeqID_15419
MGASTAMGALEQAHLAAVACACDDDEQNDYIDLLSGDTAVTGLHRGANGYLQIPKQKVICTLTNCVECIKQAHNHTYLYGTLAILFPF

SEQ ID NO: 57199 - protein, 192 aa, Zea mays
  Coding DNA Sequence Number=SeqID_15420
MGERRWSEAQVPADAARLEIDKDENGGRDGRCVWVSRGVGGVSSTNLMSVFSFLLTRSPQVLAPYLRRALPACFAAARPRCMRCLRRRRPLVVALGTAFTDDVEVVTRMGGCGSPASRTRAAWGEQGRGLGDGGLRIPSITDARGVGEQGRGLGDGGLRIPGITDARGVGGAGAGRGLDGSYAQGTPVSWTR

SEQ ID NO: 57200 - protein, 224 aa, Zea mays
  Coding DNA Sequence Number=SeqID_15421
  Gene Ontology: Mol. function=nucleoside diphosphate kinase activity; Cellular component=lamellipodium; Biological process=pyrimidine ribonucleoside triphosphate biosynthetic process
  Homolog annotation: Hit_ID=Q07661; Match level="QueryCoverage=99%, HitCoverage=100%, E-value=3e-61, Identity=84%"; Hit description =Nucleoside diphosphate kinase 1
  Pfam annotation: Domain name=NDK; Domain location=2-210; Score=255.3; E_value=1.3e-73; Accession=PF00334.9; Description=Nucleoside diphosphate kinase
MEQTFIMIKPDGVQRGLFLAQIGDIISRFEKKGFYLKVIRMNFSAVEARFDVQILSNREVDKNHRSALLLEKKRKKRILGHGFQKQIFLPTVCAFHQVSNIPFPFQRQGMKFMNVERSFAQQHYADLSDKPFFPGLVEYIISGPVVAMVWEGKDVVLTGRRIIGATRPWEAAPGTIRGDYAVEVGRNVIHGSDSVENGKKEIALWFPEGVAQWKSNLHPWIYEA

SEQ ID NO: 57201 - protein, 165 aa, Zea mays
  Coding DNA Sequence Number=SeqID_15422
  Gene Ontology: Mol. function=oxidoreductase activity; Biological process=electron transport
  Homolog annotation: Hit_ID=Q6ZHK4; Match level="QueryCoverage=70%, HitCoverage=27%, E-value=6e-31, Identity=63%"; Hit description =Putative monooxygenase 2
MPAPRPRSGHRGRLGDAAVGAGHRHRRRGRRGAGHGGGAARLGVGAAVLEQGDALRAGGTSLTLFKNGWRVLDAIGVADELRPKYLRIQGCVPLPLVAFHFQQDAVRGSSLQEVRAVERRALLETLASKLPPGAISFSSKLKSISEQGRAGTLLELEDGRQILAK

SEQ ID NO: 57202 - protein, 191 aa, Zea mays
  Coding DNA Sequence Number=SeqID_15423
  Gene Ontology: Biological process=regulation of GTPase activity
  Homolog annotation: Hit_ID=Q69RN2; Match level="QueryCoverage=98%, HitCoverage=98%, E-value=2e-53, Identity=60%"; Hit description =Chitinase III-like protein
  Pfam annotation: Domain name=C2; Domain location=13-114; Score=9.7; E_ value=0.031; Accession=PF00168.20; Description=C2 domain
MASASKEEVIGKLNVRVVRGNNLVIADPLTHTSDPYVVLQYGAQVHVHPTIPAPLAFSLFLCHLVSFFSPAALPGWTSAIDGDSFAVDDPCRAWSTEVFDEDKFTADDSMGVAEINITDIYDAAKLDLKHASDGTRIKTIYPVGVNYLGGESHVQWKDGKVVQDLILKLRKVESGLIVVQLEWVHVPGVKL

SEQ ID NO: 57203 - protein, 80 aa, Zea mays
  Coding DNA Sequence Number=SeqID_15424
MSPEAGAVRVRSAAAAANGRQNNVLQEVARMRGQDLSWHAGHLRLSWLGRSEVAARVTSGKAGELLVVDSSHSQTAAAAV

SEQ ID NO: 57204 - protein, 201 aa, Zea mays
  Coding DNA Sequence Number=SeqID_15425
  Homolog annotation: Hit_ID=Q338W3; Match level="QueryCoverage=51%, HitCoverage=14%, E-value=4e-48, Identity=89%"; Hit description =Expressed protein
MSRRLGIEEPQLMKIVRTTIHTHTEWFKLQMCKDRFEHLLKIDSLKEVDPSLGSHRKSKVLTDECANGSSQMTTCSSGKVPDEGSSPQVSSEVACDENAILKVMAQPSRTPSPFLYSSLFTANDERETRWEETGGYTCAIVVDRAVAKLAAVTLTSEWGFLGEVTTALGFADVIWWAASPGRDADRVRQIVSVGCAVYGSD

SEQ ID NO: 57205 - protein, 135 aa, Zea mays
  Coding DNA Sequence Number=SeqID_15426
MELRRAIPVNPAIVLARDVDEDHRCELAKTRGRGDEAGGHVYVGGGSAMSWNRSLEPDEDLRPELRRLGVRAWRAPSAMVEERNHRRIQEGEDGPDVTGPPCGETNPAQLGAQAQAESSLELTGGARGWGYWAAR

SEQ ID NO: 57206 - protein, 79 aa, Zea mays
  Coding DNA Sequence Number=SeqID_15427
MDMLLFTALCTGKVTIHCPVHQKETTDQAKHGGKKSFEVSSAQKKVKETRNPKPGVKKKTCKVKVDRVTKNYGASRITT

SEQ ID NO: 57207 - protein, 97 aa, Zea mays
  Coding DNA Sequence Number=SeqID_15428
  Homolog annotation: Hit_ID=Q8SA97; Match level="QueryCoverage=51%, HitCoverage=9%, E-value=9e-07, Identity=54%"; Hit description =Ornithine carbamoyltransferase
MAPPVDVAGPCPRLGDVEAPPKPRSSLSSVAEVESEPLLCADGGYQLRIRSLEGTPNYGPRQIPLACSKSMPKLMEASALAIAASRRDLRLKELRQK

SEQ ID NO: 57208 - protein, 117 aa, Zea mays
  Coding DNA Sequence Number=SeqID_15429
  Subcellular localization annotation: CTP_CleavageSite=24; ConfidenceScore=5.24e-01
MDNVVNLRIHKAAPTTPLFSSQLAASMRDYPVTSRWQGRVCGEHRGRSLLPTPTWISWRDSRRVAEVATIIVLIGTWRTTWENSATTRVEWYALGHVIRKARERLPYPKGASGEASL

SEQ ID NO: 57209 - protein, 223 aa, Zea mays
  Coding DNA Sequence Number=SeqID_15430
MVLKTRVIDDGPKLSRFILSGFPDWKIELTTWGSPGRDRPRHVRWCGWLESGPGLTVREGKSEVECCADGWDPSVGADPSNRLRGSGKPNAGIPHVTAIAAKLARGPPYTNHSPSALAPFGAFLPSAPPPKHRPPPRRLLHRHRYTAQGRLAAASPPNPVLGSPPRRQTSPRCRPAANANRAAASTSPPQGRPSSFSAIVLRGPPRSLVILRRKAAQARLASV

SEQ ID NO: 57210 - protein, 71 aa, Zea mays
  Coding DNA Sequence Number=SeqID_15431
MAKDSMINWQPRLPIHKNVIYKIKLPGNAILGEGKPENQNHGGTWKHIVLCMVELAAIIHCKSFMVAMVIG

SEQ ID NO: 57211 - protein, 102 aa, Zea mays
  Coding DNA Sequence Number=SeqID_15432
  Subcellular localization annotation: CTP_CleavageSite=86; ConfidenceScore=5.42e-01
MPGARRMGTQTATPGLRCRPSRKPCRGTPTAGRAVLEQAARAPGARPRHAGSMASRAKTLCARRGRAGQPVHHARGRAVPGPGVASCAGARAPGRADQGREG

SEQ ID NO: 57212 - protein, 761 aa, Zea mays
  Coding DNA Sequence Number=SeqID_15433
  Gene Ontology: Mol. function=glycerophosphodiester phosphodiesterase activity; Cellular component=anchored to membrane; Biological process=glycerol metabolic process
  Homolog annotation: Hit_ID=Q6ZIM5; Match level="QueryCoverage=89%, HitCoverage=88%, E-value=0.0, Identity=67%"; Hit description =Glycerophosphoryl diester phosphodiesterase 2-like protein
  Pfam annotation: Domain name=GDPD; Domain location=369-657; Score =58.4; E_value=2.4e-14; Accession=PF03009.8; Description =Glycerophosphoryl diester phosphodiesterase family
MQGAPPDQMGASYPHMFLILLLLRGANAALKSPAGPKWQTLSGGPPLVIARGGFSGVFPDSSQFAYQFALTASLPDVVLLCDLQFSSDHIGFCKTGLTLDNSTTVSERFPKMERTYKLLGEDVHGWFSLDFTAEQLVQNITLIQNIFSRPSTFDDSLGMYTLDDVVELHPPQIWLNVQYNSFFLEHKLSSEDYILELPKDSLSYISSPEVEFLKSLAGKLKKAKTKLIFRFLNENVEEPSTKKTYGELLKDLKSIKAFAAGILVPKTYIWPLKKDQYLAPSTSLVKDAHALGLEVYASGFANDIVLSYNYSYDPSEEYLQFMDNPDFSVDGVLTDFPSTASGAVACLAHSKGNPLPPPGKDTRPLIITHNGASGVFPGSTDLAYQQAIKDAADIIDCTVQMSKDGTAFCKHSADISSSTTASVAFASKASTVHEIQNKSGIFSFDLSWSEIATLKPSIISPFAQAGMLRNPAAKNAGKLMTLPEFLDLAKASNITGILIEIEHASYLAKRGIGVVEAVSSALTKAGYDKETKQQVFIQSDDSSVLAAFKKFARFRRVLNIEAKISGASKPSVDDIKKYADTVRVNRNSVAQINGYFLTHFTDTVSSLQDANITVFVGVLKNEFMNLGFDYFADPTVEIATYTLAVLADGLVTDNPATAASYFRSPCSDMKLNLSYTILPAQPGALVNLASPGALAPAGAPAPLLQPADVVDPPLPPVKAVIAADAPAPGAADNTSSAFSSSAGNGLLWAGIAALLSLTFLH

SEQ ID NO: 57213 - protein, 145 aa, Zea mays
  Coding DNA Sequence Number=SeqID_15434
MARIRSKYRYEPALCATANPDSWTQGRNYGELLSTATTALIFSSSPTLYATLRPRRGEGGEKNGELVLMHEAGEELTKGGHQSAQQEMGAELAKRAQQSSGHYPRGHTCWHCGTCAPDHARHDRGPPGEEQVPPKEDYYDEFNEI

SEQ ID NO: 57214 - protein, 137 aa, Zea mays
  Coding DNA Sequence Number=SeqID_15435
MVAAVHAEMQTTTEGESRRAIATDFRPQELNENSRYDPPESAKLSLLQVPPERRWSLVHPRRYSAFSLLSVHGAGSGMEGRAMAEAPGGYLRTTRASREEDRGLLERDPCTNVATAADFYGEDGGGRWIARYLRGAG

SEQ ID NO: 57215 - protein, 100 aa, Zea mays
  Coding DNA Sequence Number=SeqID_15436
MDDERRRVGYNDTRGLEAAFGRAVALRDEQRAAALELGQGRWPTGVGGLGGGVPASDGAAAWWPSDTGAWQRGGSGGQRRLDDLSGERRKNESARGRWWL

SEQ ID NO: 57216 - protein, 55 aa, Zea mays
  Coding DNA Sequence Number=SeqID_15437
MEEKDMIVVQFPHMLINLMQLASRLMSQNKTPWLITPMSLETWLSSFEARKPLRD

SEQ ID NO: 57217 - protein, 83 aa, Zea mays
  Coding DNA Sequence Number=SeqID_15438
  Subcellular localization annotation: CTP_CleavageSite=57; ConfidenceScore=5.49e-01
MATPTPDPKRPSTDLWTDFNVAKRYRSSNPRRPPTDLRSIVSLTQIKSQPPATDPAVAASSSHTANRHGGAPKAAADPSPASR

SEQ ID NO: 57218 - protein, 127 aa, Zea mays
  Coding DNA Sequence Number=SeqID_15439
MTLHKSDLKGSQRMQGQPVGAFLAWRTLLSTLPTKEWAWITQRKEVNIPYRGRKTQGRNLPSVMPDDRETDAGMCGDITMPENGTQHNPYLRMNPQKWEKHLMNEHIEKDATPAAAIADSLKNESGN

SEQ ID NO: 57219 - protein, 53 aa, Zea mays
  Coding DNA Sequence Number=SeqID_15440
MVRAPTGAELVRAPWISEGGERQPDLGRCSCRGEEEREEEVRVGEESAGWSRQ

SEQ ID NO: 57220 - protein, 186 aa, Zea mays
  Coding DNA Sequence Number=SeqID_15441
  Homolog annotation: Hit_ID=Q6QP51; Match level="QueryCoverage=34%, HitCoverage=29%, E-value=1e-14, Identity=74%"; Hit description =Putative growth-regulating factor 1
MRALDLPFIDAMRRSRCTMEGNDVSPMVRSVRAQGWVRRRLLLRPRLGSGEDAIHPEVEVEAELWGRARRRPPSEVEVEAEPWGRARRRPPSEAEAGAEPWGRARRRPPPEAEAQGRAGRSFLLCLRLDSTAVSLTLAGGTAVGEGRAALFSCQVGQWKGEVIAVTSTLRLRHACQDKVSGDPCIE

SEQ ID NO: 57221 - protein, 132 aa, Zea mays
  Coding DNA Sequence Number=SeqID_15442
MGRGKRGKGWPHRADGKRQHPLGPLSEDFGDSEYSEEVSSNARGLGELDDSEEASLEEVEDSSDSKEWSDNDGGEGSGEGGSCGGDGGEGGGSGGDDDGKGSDDEGDNDHGKGGGSDGDGGDGKAVGIMLSI

SEQ ID NO: 57222 - protein, 90 aa, Zea mays
  Coding DNA Sequence Number=SeqID_15443
MATPTPDPKRPSTDLRTDFNVAKRAYKLTPPRITVGRCAYPRAAEHADTVTIPPDAMTEVAHRSAQPGSGCNGLHKELEMGRFCKFQPMR

SEQ ID NO: 57223 - protein, 192 aa, Zea mays
  Coding DNA Sequence Number=SeqID_15444
MGCEGHEEDHIIGEVCPSSIRQKRLSSTTTRKRSCTRTLLKSLIQDIIGYSRKLSSVIIRGTLKTRLRRFSVSGEADSSRVQPQAQQEAPPRPTLGLGLRRRSPPRSTPGARPPPGPRKVVSASPDPQGSASTSTSEGGLRLARPQGSASTSTSGGIVSSPDPGLGLRRSLRLAQPWAKTDRTIGDTSLPYP

SEQ ID NO: 57224 - protein, 65 aa, Zea mays
  Coding DNA Sequence Number=SeqID_15445
MATALSQSTRGRGSSRRIQGPPAGGSYFHGDGERAEPQRWHRFSLPYSLYPHDADAHGGGKCYST

SEQ ID NO: 57225 - protein, 96 aa, Zea mays
  Coding DNA Sequence Number=SeqID_15446
MAPLPRSLPHTVALAFRLGQRGAREEWPQTGSHIAQGSPEWSERAGLIAQVVELMPRDNGGEGLTGGLANGAHPPVWVAKESWRGVTTPWTSDAVT

SEQ ID NO: 57226 - protein, 349 aa, Zea mays
  Coding DNA Sequence Number=SeqID_15447
  Gene Ontology: Mol. function=metal ion binding
  Homolog annotation: Hit_ID=Q2QXI6; Match level="QueryCoverage=76%, HitCoverage=81%, E-value=2e-54, Identity=39%"; Hit description =Expressed protein
MGNTDQAGNSHGPLVQGGKDHKASDASTDHEKGRLFQQASLQNAGAPGSYVPPGVVPHPSGPDKMLPQHMTNHGHMHGFSENIRPPLQQPYGVFHSGTITRPFGENQIQMPMPQPGGIRPGDGMLNSNDFGGEGFNASGGAAYPERHDNTEDSRKHFPAPAPLDDQGLRRDPRHFERALGRPDGFLDSVPGRPPFANHRSAGLHEDFPRKQNATASHPDFLSHGAEFDHHRAIGMPNFRNPGPFAQGTSGGPGGPPKHQLGSGNLPGNLHSFEGLDFPPAPFNLGDSFPCTSLHGQCGEPHGDMHPGDPHLVAEYAQHGFPKTAAHFGLGANGNMLKLLSVPENCASFA

SEQ ID NO: 57227 - protein, 350 aa, Zea mays
  Coding DNA Sequence Number=SeqID_15448
MTSISNGETALMPSVPRRPAIATRQEEPTVATRSAMVTRNTHAAWILWLGWCPGPWFLMRKSRGHPYLNPRRCPSPRPQLVSRVCCEFVHVPEKISGRKKALTSIPHLSEAEQPVAGMLPRWAHATATYNAFLVEGTGREQLAEEGLGDLGPRKVESAQMTNDEEVEDFGGLESSGTRAEDARTRVGEQPTPPASPGEDPMAATVPAGEDTPAVPAQAAEDPAVPAAPSQVPTSGPTQAAPTDDINFMAAANAMPVNENMSGSETGSWSSDVGEFGSLFLWTEESPDEDLDYFAALDVAAAEAVPLLEVREASDPPAGARSVEHRHRRVVLKHSDGEMSRSGRRHQMGME

SEQ ID NO: 57228 - protein, 146 aa, Zea mays
  Coding DNA Sequence Number=SeqID_15449
  Homolog annotation: Hit_ID=Q9ZTS1; Match level="QueryCoverage=25%, HitCoverage=4%, E-value=3e-08, Identity=76%"; Hit description =Probable methionyl-tRNA synthetase
  Subcellular localization annotation: CTP_CleavageSite=44; ConfidenceScore=5.05e-01
MWEAHRFRQDLCLATREQRGLHWSSFGRRLRLVMMCSVNVAFVCAMRRQSRRAKGSEFAFAPTPEATLGLETEVLMTNIHKGRFFAILMTDILHVLVPCKFNGLNEVCCRLWGYNPIYIGRTDEYGTTTEMKAMEEKCIHKEIYDK

SEQ ID NO: 57229 - protein, 419 aa, Zea mays
  Coding DNA Sequence Number=SeqID_15450
  Gene Ontology: Mol. function=DNA binding
  Homolog annotation: Hit_ID=Q1S5N2; Match level="QueryCoverage=46%, HitCoverage=41%, E-value=2e-29, Identity=36%"; Hit description=Viral capsid/hemagglutinin protein
  Pfam annotation: Domain name=DUF659; Domain location=140-259; Score =99.3; E_value=1.1e-26; Accession=PF04937.6; Description=Protein of unknown function (DUF 659)
MSGAHAKEMVTGEKPATSHGKAPSGESGNKREESPPRVKSHRSGDKKKMKKVVYYETDSSSPSTSGSATKLCKSLEVVAERHSNKASQSTLEHCTKKGKETKQIVDDHVADILYENKISLDMVNSRSWEIVLESIGQYSPEYHDIHGQILEDDISSTFSQKSPIGTYFFCSIDASSEIANANMLANLLEKQIDKIDRENIVQVITDNGANFKSARRLLMESIPHLFWTLCAAHCLDLLLEDIGKIKSFITCMNQAKKVSRFLYKHGRLHSLMRDKIGGDLVRPGITRFATSFLTLASMHKLKNGLKSLFLSDEWQLAAEQVLHQSRISDGDETPAAPEIMAAMDKAKATVKEAIKISQDYLQNSSGLAVLQQGDNGDSHNKDDHQESTSNEKDVAEKAIDDEEESGAVGDKFKLDDDRI

SEQ ID NO: 57230 - protein, 413 aa, Zea mays
  Coding DNA Sequence Number=SeqID_15451
  Gene Ontology: Mol. function=ATP binding
  Homolog annotation: Hit_ID=Q6K8H1; Match level="QueryCoverage=52%, HitCoverage=27%, E-value=6e-89, Identity=76%"; Hit description=ATP -binding region, ATPase-like domain-containing protein-like
  Pfam annotation: Domain name=HATPase_c; Domain location=140-243; Score=7.5; E_value=0.014; Accession=PF02518.16; Description =Histidine kinase-, DNA gyrase B-, and HSP90-like ATPase
MVKTEAAEEREPLSRTPAAAVAVEGSGRRTATAVIDLSSSDSDSDGEGAVGSGKRVRGVGGDGSATKRARVSAVVDLPPGFLEPIPPPPVPVPLAACATKQFWKAGDYDGKPLGDGVAQQSVSGMDHVRVHPRFLHSNATSHKWALGALAELLDNSLDEVINGATYVNIDVLENDKDIDKKKSRMLLVEDDGGGMDPDKMRQCMSLGYSAKSKVASTIGQYGNGFKTSTMRLGADVLVFSRSPGKSGKRPTQSIGMLSYTFLRSTGKEDIIVPMIDYEYKQGWERMVRTTLDDWSTSFQTIITWSPYSTEAELLEQHLHDPVQPEPHAPILAPRACASACYNVAPNAVRQSGTAQLATSATPDPTHASSSPCLAPASRPPASSCPCLVALLNFEGEAKRRFKDALKTMGRGRD

SEQ ID NO: 57231 - protein, 238 aa, Zea mays
  Coding DNA Sequence Number=SeqID_15452
  Subcellular localization annotation: CTP_CleavageSite=24; ConfidenceScore=5.04e-01
MSFLTPKPTSTSKASGQVLLDRPTCSLGRSMALQWRDSYVILLLCGRGSAIVQPLIQGRSSGGYSLGHCIDELRRLCPPGCPNLPHLQCDWALLSFLPTLSSSSATSCPAPSWYGQTNAEDLEQALVINVMMGNPVDAEAPILSCFARRLDIEVVTMSLRRLGPTTVLLCLPSVEASTRAFGDGKPVTVSPTIRIHVMRWSRFQNSSAATLSHPIEVELRGIPAHAWDIGTAETLLCE

SEQ ID NO: 57232 - protein, 302 aa, Zea mays
  Coding DNA Sequence Number=SeqID_15453
MVCAGISRTSFAGVPHDDATLPVQTSQLDDPSVVSPTLESFEVELSPLTTDDLPLTPSPSDVENLCQFSCVENEVDKDFLPKSTHLQTLPVGIPEPTHPDLIVYTRRRFHKKKAIGGNEDGGIVPDTALATVEASGGHSLKVIDGCTDMVDIHHQAKTINIAQEDLETSQRSDATSLATAQTEFFSKLAKKVAGILSNPAELSTQRCKQAPAATPHHSRRNARVGVEFDKQELYLRSTKMAMKALKVIGEAEGVTQQAKEDYTEVFSENLPMAHVEALATLFGWTVPEELKMGLSSAVVSAC

SEQ ID NO: 57233 - protein, 116 aa, Zea mays
  Coding DNA Sequence Number=SeqID_15454
  Gene Ontology: Mol. function=nucleotide binding
  Homolog annotation: Hit_ID=UPI000034F110; Match level="QueryCoverage =58%, HitCoverage=9%, E-value=4e-19, Identity=65%"; Hit description =ATP binding
MAAGDGWGGGVALGRGGGKEGKPFWRVWTAAGSGGRGVIGVLEANFIEPAHDKQDFERTTLLARLEARLVQMQKDYWSGNAHRIGYVAPRFGRNTEAGDGGELRTISLREEKSLGD

SEQ ID NO: 57234 - protein, 205 aa, Zea mays
  Coding DNA Sequence Number=SeqID_15455
  Gene Ontology: Mol. function=ATP binding
  Homolog annotation: Hit_ID=Q6K8H1; Match level="QueryCoverage=56%, HitCoverage=14%, E-value=5e-34, Identity=66%"; Hit description=ATP -binding region, ATPase-like domain-containing protein-like
  Subcellular localization annotation: CTP_CleavageSite=57; ConfidenceScore=5.17e-01
MAAPPAPLLGLLVSSGLSVDRQSVCIDSFMSMPGRGSSWGRELGEGRLGRSGCAGPRPARAWGRAARPLVLRGAEAGRCRAGLLDPKATSNGDLHTMDEYQSVIMQLRDENSSLKERLSKMEESMSQELVVECDKNKSLTERVEDLQRQLESATKEQEALIDIFSEERNRRDQEEESLRKKLKDASSTIQDLLEQLNAARKGRKV

SEQ ID NO: 57235 - protein, 124 aa, Zea mays
  Coding DNA Sequence Number=SeqID_15456
MARLIRSTPRLSSVPDRDGATVFYSTYGGREKIKGGWILELAARITVSMGCSRGLLQKIHADSQNTAIKGDDYPWKKEGVRVERTVADFSTDDISAMHESGYFCSFLSQPPLYFTVGHDRGRKY

SEQ ID NO: 57236 - protein, 234 aa, Zea mays
  Coding DNA Sequence Number=SeqID_15457
MVKYNSYPEEGTSDVGDIDDHKRNGVVTRGGVNEGCSKGKAVVMVVRKNRRVEDKKKGLAKTSRVAGASDRFVEELAEMCAEPGEVMTSSDLREASSLMLKGAEAQVARERVVTLELETKNARTYHDKVEAATRAGAVNALSPEGCRYFKAFNQGNEGLDREVFQVEDAILKRSAGAALRDKEIEDLAGLEGTLATLDGGVAETGVEEQSSCARAGHVNPNAVGTLRHSANKKM

SEQ ID NO: 57237 - protein, 869 aa, Zea mays
  Coding DNA Sequence Number=SeqID_15458
  Homolog annotation: Hit_ID=Q6K2T0; Match level="QueryCoverage=92%, HitCoverage=95%, E-value=0.0, Identity=67%"; Hit description=Extra -large G-protein-like
MEGEEDSSGSVVQRPPPPQQQIRVVRCPKCDKLLPELPNYSVYVCGGCGATLQAKKSSGSDTSSDKSDTEHVKYLEVLESLPDKKGAASEASCAVREADTNKIEARSEERFAPNRMVAAAHSQSGFSFDDNHATCAPNCTMKLEPALRDDSREVKEAKYRRIRLEEKGEAKQPARASDRSPRPVVSNIPSNAYPLEGPSECHKKPGFIYASGEKGHLSDKNLDVPSTRAGGLEKDRTELLRMLDELRDQVQRSYEIADKSSVNASTNRMVDPASSYNPHERLSRLRYGSPQLQRNGSQCSPSLNGQAPVVPPAYPSVSVQQDLHGYGQSVAHMGAPIYPAAPYPWRNFDNYFHGQYDPDPLISYHHDGFYHQPACSCLHCYHRELLPVHGAPLGFNHRRAPYLMNNPVEGPVVFGAQNYNPRGINGLMRHNHLRDTLSKKPAQTCEPIANGAPFTICYNCYEVLHLPKNSLMLGKDEYKLRCGSCSHAIVVRLDGNRLDVSAPTPVSHLSPGSKNYSNNGQGSNGQNADERLLPSYSFSAGSHFSQEKDLPSNSSEADKMQCISSSASISEDDNSRASSNSQKNSGSRDLPPDAEVVIRVPSLPLRDHFGYSPSEMVVDGSGKGSRSTRSEHEKGVLTESFKPNKVKDVPVASVLDPSDDEFDDPEYNQDPGDGAQCVDHPRATKSGDSFFSSLIKKSFKINGGMGNGRAKVFINGYPISDRAVRKAEKIAGPIYPGEYWYDYRAGFWGVIGQPCLGMIPPYIAEFNYPMPKNCAGGNTGVFINSRELHQKDLDLLVGRGLPDSPDRSYRVEISGKVSDEVSGEELYCLGKLAPTFLVLVEGGEDEAWVRDASPKDHSVKLVHIEKQRL

SEQ ID NO: 57238 - protein, 100 aa, Zea mays
  Coding DNA Sequence Number=SeqID_15459
MTCDLIALLGIPKQIIEASVSGYPYVIGLKIVSKFACHTWFWKITIEGCTLYPRAVIPFEPGFARPDLHYRGEWLGIHCVAFTKIPPSVGDRYPLGPLKK

SEQ ID NO: 57239 - protein, 46 aa, Zea mays
  Coding DNA Sequence Number=SeqID_15460
MASAVGWHAGIACERELGDDEQATVESEVQQVETAEQELVEGKLCP

SEQ ID NO: 57240 - protein, 1166 aa, Zea mays
  Coding DNA Sequence Number=SeqID_15461
  Gene Ontology: Mol. function=structural constituent of ribosome; Cellular component=intracellular; Biological process=translation
  Pfam annotation: Domain name=DUF1666; Domain location=898-1166; Score= 336.6; E_value=4.3e-98; Accession=PF07891.2; Description=Protein of unknown function (DUF1666)
  Pfam annotation: Domain name=SPT2; Domain location=682-780; Score= -28.0; E_value=0.1; Accession=PF08243.2; Description=SPT2 chromatin protein
  Pfam module annotation: Pfam domain module=DUF1666::SPT2; Domain location=898-1166::682-780
  Subcellular localization annotation: CTP_CleavageSite=10; ConfidenceScore=5.42e-01
MDAGGRAGVSGPAAANGSFGLVRTVVGYSTSPLFFWLLTVALVAAIHIVSGSSSKPARNNETEERKKARRDRFLPAAEEREASGRGDDRVLEMMRSFSFMQATEEDFMEGMTAYEHNGVGDGTAHGPVAPEPPALTATSLSFRFQHQMPEVPTETALVSREFTAARQETAVVSRELTAARDDDGRQREEEKEPHFPLEPFAPLQTAADMQEHRHDEAEETEFLAEEPAEERSGEVAQEEAAPPKTVAATHNYQFLTERDFRGFVREPEAVTVRVQESFVPSPPPAHQPEERRVVDVSSRSGRFLTARDFRPANEPDVCESVASSGKWTPPPPRPRPKPKPKPASSPSAASMGGGGGFTSEFSGFGDSDSESSASDGYSVKDLVVDSDSDWFLSEKEFPASALGSGNLKTYKAKVLRAIEAMEAASNLEPSYQEDSATTVSPSSVRQRSPDTVPDGSPKFPEDVWSRSPSPDVEYKEDEEEVTREAEAQYDEDIEQRSTGEEEEGKGIDMSDDEHSSGGKEVESAPIYDLAPVADDCMDHSEKGIITLNDHSGGQAASDAQRSPEAVSARQLAAVPSDQVAGPVKRSPEPPEQEFVGMVDHSLEHSSYDRKQTASESDQSYEIVFDDKRRPQRAETGFLVWEEIVTRNDQPPLGPHADEQGLDTAEEEYVGTGDQPHGAVSDEKSGAETPEQEFSLTDHRNVAVPDARNISETREDEEQASADDHSDNAVTGKAKVYDEDGEDREARWKDLTDEEEDELESLWEHQDLVEQLKLELKKVRSSVGLPTILEESDTPKAPVEDLKPWSMDAKFLREDPMDELNKFYKSYRERMRKLDILCYQKMYAIDFLQLRGSQQSNNNNNNSVKSLSPTVASILSHNFRSSRRRSPEDPSERFLRELRYDLETVYVGQMCLSWEFLRWQYEQARDLPESDSYHSHQYNQVAGEFQQFQVVVQRFVEDESFKGPRLSNYINNRCVLRNLLQVPVIKDALTVAMHALPGCCVEDSLKDRMEDQRKGNYVITSEELEDVMEEAMHVLWEFIKADRAETTTTAAAASVLKGLSSSNVELQDPLDHGLMAHIHSALQKKEKRLKDLLRTGNCIAKKFKKPKEDRSNQNLFFSQVDMKLVARVLRMPRITSEQLQWCRAKLDKIVLVDRKIHREASFLLFPC

SEQ ID NO: 57241 - protein, 143 aa, Zea mays
  Coding DNA Sequence Number=SeqID_15462
MNGSKVPAAAYVAGGATGWDDLPMDPTTPRSLSTTRRGRGEGEENNLAPVVPARIERAVESGDERRKKRDRVATGCLGRLWLQKKDRVALQGFATYTFDVTRTRRAEPLHRRRRATALAGRTPPDPDQTDSFSLYATLVSRVG

SEQ ID NO: 57242 - protein, 297 aa, Zea mays
  Coding DNA Sequence Number=SeqID_15463
  Gene Ontology: Mol. function=zinc ion binding
  Homolog annotation: Hit_ID=Q6Z542; Match level="QueryCoverage=84%, HitCoverage=63%, E-value=6e-46, Identity=61%"; Hit description=Zinc finger protein-like
  Pfam annotation: Domain name=zf-C3HC4; Domain location=152-182; Score= 6.5; E_value=0.033; Accession=PF00097.15; Description=Zinc finger, C3HC4 type (RING finger)
  Pfam annotation: Domain name=zf-C3HC4; Domain location=63-100; Score =1.6; E_value=0.11; Accession=PF00097.15; Description=Zinc finger, C3HC4 type (RING finger)
  Pfam module annotation: Pfam domain module=zf-C3HC4::zf-C3HC4; Domain location=152-182::63-100
MKEHLMLNIDDLSILEPNEVIGTVKNKSSGETIAHPPSMAHAILAVGESMVSEAEPLLQVVECRICQEEDSIKNLESPCACTGSLKVVEWEVTSDLSQLTTNGRVAPKVVKRVAISSVESSGHLTSLHTLIFMDAGWGPEEMINCQAISVAGGGEENPRQYAHRTCVQRWCNEKGDVTCEICHEPYEHGYTAPPRGHPDETTIDISGGWTITGTAFDLRDPRILAVAQNHIMEAEYDDYSATNASTAAFCRSAALVEAAALAAAEVAFILQSGQGRGVHFTIAPDSPATPQHEPPQP

SEQ ID NO: 57243 - protein, 87 aa, Zea mays
  Coding DNA Sequence Number=SeqID_15464
MCPGGGRRSGAAPGQEEKRQPYVSLSGPAHRCLFPHLPFLPLLCKPLFSCRTLMGGGRSAMCNGGKGGNGKGAKRKRPPTPSLDPFG

SEQ ID NO: 57244 - protein, 67 aa, Zea mays
  Coding DNA Sequence Number=SeqID_15465
MWPEKTIHSRMPTVGLGPHGKVPDLCTCRPDLRGKVQDPRECDPDLWDGSWTPLRGVRTTHSRVPGL

SEQ ID NO: 57245 - protein, 48 aa, Zea mays
  Coding DNA Sequence Number=SeqID_15466
MAGGFGNRKESEFRCAKKRVERSALTGLYPPDEFDCFSDNRSEGGADV

SEQ ID NO: 57246 - protein, 151 aa, Zea mays
  Coding DNA Sequence Number=SeqID_15467
  Gene Ontology: Mol. function=kinase activity
  Homolog annotation: Hit_ID=Q6QP54; Match level="QueryCoverage=50%, HitCoverage=27%, E-value=2e-19, Identity=63%"; Hit description =Putative kinase
MGIEGLEVGLDGWGSLGRPVSVAACPSPDGSSARASAKGKSEAAGDRRERGGNPAAFVFVPRPGRMGRRSGSLWPESARGRVMMAPPVDVAGLRPRLGDAEAPPKPRSSLSSVAEAESEPLGRARRRSSAEARAESEPWGRAKRSSSSSGT

SEQ ID NO: 57247 - protein, 378 aa, Zea mays
  Coding DNA Sequence Number=SeqID_15468
  Gene Ontology: Mol. function=nucleoside-triphosphatase activity; Cellular component=membrane
  Homolog annotation: Hit_ID=Q6ETX1; Match level="QueryCoverage=99%, HitCoverage=99%, E-value=1e-169, Identity=66%"; Hit description =Putative CbxX protein
  Pfam annotation: Domain name=Ank; Domain location=49-85; Score=24.9; E_value=0.00028; Accession=PF00023.20; Description=Ankyrin repeat
  Pfam annotation: Domain name=Ank; Domain location=86-118; Score=13.0; E_value=0.42; Accession=PF00023.20; Description=Ankyrin repeat
  Pfam module annotation: Pfam domain module=Ank::Ank; Domain location =49-85::86-118
MPGSQNGGPRPRPVKVETIHDLARAGDLAGVQRKLLENPSLLNDKNPVMCQTPLHVAAGYNNTEIVKFLLNQQGTETVDLEAKNMYGETPLHMAVKNSSCGSTNLLLEHGGAGSEKLLKLLTHHMEEQRKRKALMSCLEGKAMSEFEEAMSQIVGLQELKMQLRRWARGMFFDEKRRAMGLGIAKRRAPHMAFLGNPGTEGGILFVDEAYRLIPMQKSDDKDYGLEALEEIMSVMDSGKIVVVFAGYCEPMKRVIASNDGFCRRVTKFFYFDDFSTTELAEILHMKMKSPSDCSLLYGFKLHPSCSIEAIGELIAREITEEQRKQMNGGLVDTLLINARENLDSRLDFSCNDADTMITITLEDLEAGLRQISRQRHLQ

SEQ ID NO: 57248 - protein, 172 aa, Zea mays
  Coding DNA Sequence Number=SeqID_15469
  Homolog annotation: Hit_ID=Q6K241; Match level="QueryCoverage=41%, HitCoverage=49%, E-value=1e-22, Identity=58%"; Hit description =Putative 50S ribosomal protein L21, chloroplast
  Pfam annotation: Domain name=Ribosomal_L21p; Domain location=88-150; Score=53.4; E_value=7.3e-13; Accession=PF00829.11; Description =Ribosomal prokaryotic L21 protein
  Subcellular localization annotation: CTP_CleavageSite=42; ConfidenceScore=5.33e-01
MATATTLPLGLLPSKTLTLSPLPSARRSLSIAAVEPRRWLLRAAAEEAPEAVEVEFVEPDAEAEEEPAVPEPVEAQLAAAGAGKDADIFAVVMIGSRQYIVMPGRYIYTQRLKGANVNDQGRDDKVIVFKYKKKKKYQRKLGHRQPNTRLRITGISGYEEYPADPILDPAAA

SEQ ID NO: 57249 - protein, 71 aa, Zea mays
  Coding DNA Sequence Number=SeqID_15470
MAPPKQTPHMRVGPRGVPKHQMASRVVETDSSGRAPQSQVEQLQQSLDVSFNERCLDAAHILELLAEKKQL

SEQ ID NO: 57250 - protein, 251 aa, Zea mays
  Coding DNA Sequence Number=SeqID_15471
  Gene Ontology: Mol. function=protein dimerization activity
  Homolog annotation: Hit_ID=Q7XED8; Match level="QueryCoverage=67%, HitCoverage=31%, E-value=1e-31, Identity=36%"; Hit description=HAT family dimerisation domain containing protein
MDESHTGDAIANHILEVVRDFAIDAGITIANKYLNNIRAAIRFITSTPQMISRFAEYCKAQDMRPRKFGLDMKIRWNSTYHMLKSLEGYEELITVFVNANAKDLDLILTDVDWFITRQFREFLMTFYAATHVLSGVYYPTTCLVIDYIWLMVESFSKFRSDSLVNTIVAPMEMLLIMQKMTCSVSLATITKKYGESEIDSHVTECDAEISDTSLTAHLWKRAKWKENANFSQRWNLNAEFERELGFHLVPN

SEQ ID NO: 57251 - protein, 93 aa, Zea mays
  Coding DNA Sequence Number=SeqID_15472
  Homolog annotation: Hit_ID=Q6ZCF0; Match level="QueryCoverage=40%, HitCoverage=7%, E-value=1e-10, Identity=81%"; Hit description =Putative gamma-aminobutyrate transaminase subunit isozyme 3
MEPGRIPWRANLQWIHGLKVSSPLEDPRYEALNQRRDCHAEGSIFGVECEKCGMLIRVAGNSIMLSPPLIMTPNEVEEVRPFYCHFCLSDTII

SEQ ID NO: 57252 - protein, 108 aa, Zea mays
  Coding DNA Sequence Number=SeqID_15473
  Gene Ontology: Mol. function=4-coumarate-CoA ligase activity; Biological process=metabolic process
  Homolog annotation: Hit_ID=Q06JG7; Match level="QueryCoverage=41%, HitCoverage=15%, E-value=3e-12, Identity=73%"; Hit description=4 -coumarate:CoA ligase
MEDNLPVNVQEYQELAKKLILKKSLHDKKNNVQATEFTIKQGWLHTGDIGYFDEGGQLFVVDRLKELIKYKGFQCVHVTTSLELDSLFSLAWLTNKYKSAMPSIGLNI

SEQ ID NO: 57253 - protein, 158 aa, Zea mays
  Coding DNA Sequence Number=SeqID_15474
  Homolog annotation: Hit_ID=P17847; Match level="QueryCoverage=18%, HitCoverage=5%, E-value=2e-08, Identity=90%"; Hit description =Ferredoxin--nitrite reductase, chloroplast precursor
MEEIDAAKLTKDNVDVRLKWLGLFHRYKHQCTPTDSTPPAMVVVAVGRSDPASVTRTKQPSVSVDLCIDIICSLHKDANDRSSTQALLDHPFLSVYDLHAVSETTDQAKDGGKKSFEVSSAREKVKETRNPKPGVKKKTCKVKVDRVKKTYGASRITT

SEQ ID NO: 57254 - protein, 236 aa, Zea mays
  Coding DNA Sequence Number=SeqID_15475
  Gene Ontology: Mol. function=transcription regulator activity; Cellular component=nucleus; Biological process=regulation of transcription
  Homolog annotation: Hit_ID=Q10D98; Match level="QueryCoverage=89%, HitCoverage=72%, E-value=2e-46, Identity=63%"; Hit description =NOT2/NOT3/NOT5 family protein, expressed
  Subcellular localization annotation: CTP_CleavageSite=5; ConfidenceScore=5.51e-01
MSGLPSSGVQQPGGSIPGRFPSNNLPVGMPQIPHAHSGVSGRGMNFGAGPAFSSSMNIGGNIQGLSSGLGSGGNRNSVHGMPVSSSIGNSGQRISSVGNMQYQQPQPQNHFRLQQMSSAAHSYRDQIQKIQAGPTPPDPYGLLGFLGVIRMNDADLASLALGIDLTALGLNLNSPDNLYKTFGSPWSNDPAKGDTDFRIPACYLFDKTPPLQDNFVLHYEMVEKRPVLPSTSPNLR

SEQ ID NO: 57255 - protein, 89 aa, Zea mays
  Coding DNA Sequence Number=SeqID_15476
MRPVDVGKERRDLALANWVVPKIQVGEHRVVVDHRCCPRSSLALQIVLSATLGIIVCSGDITSSSWIGDDGLGYMYLMDHFFCTLSRKE

SEQ ID NO: 57256 - protein, 260 aa, Zea mays
  Coding DNA Sequence Number=SeqID_15477
MAVQAQHVINPAFQPHDMGHAFRALEGATIGGGSAFLDENGFGGCAPAPIEVALVRDGETMQLLLACGHLFHVEEAVVELNKKLINDIPTSKFPCGRAGLLAAAVPGWAVERAALRAWLGAWAWPLERRHGTGAGEEALRWRGGEDRSSRAGGARRRSAGELAAALELRRCGRAVPRQARRLELGLGAGRERDYGPLVGRDFRSGLQPRQPRVEIRPCLWLRSHATCLAKAPPSAQTVLNEDGRGKVEGSLHRVKVVAHG

SEQ ID NO: 57257 - protein, 80 aa, Zea mays
  Coding DNA Sequence Number=SeqID_15478
MDRAADHSLRRRSRPRHATEAHTELRGRRTGGAAETVAVLGSAASSVRTKVLLKQYRAILGPPPMKSLNYKRKYLANVRG

SEQ ID NO: 57258 - protein, 82 aa, Zea mays
  Coding DNA Sequence Number=SeqID_15479
MVNRAGITDVRHYLARLCASTLYQVAINFKYYLEALGKIWYDLNHVWYLEPKTLTPCAMNFTIDSKNPSFLEIREGKLYSRH

SEQ ID NO: 57259 - protein, 355 aa, Zea mays
  Coding DNA Sequence Number=SeqID_15480
  Gene Ontology: Mol. function=polygalacturonase activity; Biological process=carbohydrate metabolic process
  Homolog annotation: Hit_ID=Q6K829; Match level="QueryCoverage=54%, HitCoverage=70%, E-value=7e-82, Identity=77%"; Hit description =Putative polygalacturonase
  Pfam annotation: Domain name=Glyco_hydro_28; Domain location=52-327; Score=-106.7; E_value=0.00075; Accession=PF00295.8; Description =Glycosyl hydrolases family 28
MVDTGGGRLYQRRGAVAFVAANKALLAAAWVVGFALVFLWQSASMSFGSAGGGGYLRLLSVPPPPPRPAPRLRPTAYNITDFGAVGDGRAVNTAAFERAVEAIAALAERGGGQLNVPPGRWLTAPFNLTSHMTLFLAEGAEILGITDEKYWPLMPALPSYGYGRERKGPRFGSLIHGQNLRDVVITGSEMSGGVANVTVENVRIWESRRGVRIKTATGRGGYIRNISYRNITFDNVRAGIVIKVDYNEHADDGYDRTAFPDITSISFKGIHGQGVRVPVRAHGSDVIPIKDISFQDMSVGISYKKKHIFQCSYLEGRVIRPVFPKPCENLDVYDEQGQLVKRAVALNSTELDYDI

SEQ ID NO: 57260 - protein, 149 aa, Zea mays
  Coding DNA Sequence Number=SeqID_15481
MANARPYSCLHNRRRPGLSSELLHALAMAGGGRVRQHRGPPLLLPWHVRISRPRSHARLLATLAPGRGPCGSPLFPRVAAMNPLLRRILSPPLLRPAPGQLTVATLGTSTAAATMGAYLPASALGTVTVASLVGFPCGSPPGDLQLRWA

SEQ ID NO: 57261 - protein, 75 aa, Zea mays
  Coding DNA Sequence Number=SeqID_15482
MEVVSGSKEGSCVLGSREGVWWCEVPGKGRESGGWGGGRPREERMSLPGTTAQEQMVDVGGRRKGGSCWRYNYDN

SEQ ID NO: 57262 - protein, 171 aa, Zea mays
  Coding DNA Sequence Number=SeqID_15483
  Homolog annotation: Hit_ID=Q3LRV2; Match level="QueryCoverage=63%, HitCoverage=62%, E-value=2e-15, Identity=36%"; Hit description=Gag
MHEGKTSSKEVKVSGDKHKEDKEESAGSIESHKEKGDKKKKKMKKMVYYETNSSAPSTSNAKKPPYFDEDYSMWSDKMRPHLTLLHESIWDIVEFGAQAAQVGDEDNGFDEAAQWLRWTAGVRGHWHKIIVIIVVISYYIRVDIEGHWHKIIVIIMVLTYHIGVDDVGALV

SEQ ID NO: 57263 - protein, 192 aa, Zea mays
  Coding DNA Sequence Number=SeqID_15484
  Pfam annotation: Domain name=TPP_enzyme_N; Domain location=77-185; Score=-87.4; E_value=0.035; Accession=PF02776.8; Description =Thiamine pyrophosphate enzyme, N-term
  Subcellular localization annotation: CTP_CleavageSite=31; ConfidenceScore=5.40e-01
MDGGRPPPHRAPARNFGPSARLPPARESRLRASPSPPGIPPAPGTPARHDSRPRARRHLPPTPDTPPPLSRRVVTPAPARTATWPACTKMELWPRDGPMGSPSDASATTVTPSTCVVMPEIGSGGLAPTTAATKPFAKLAVKATTIADIPHLVFQALAAAMSGRPGRCYLDIPSDVLHQTLPEGPNPRPRLS

SEQ ID NO: 57264 - protein, 469 aa, Zea mays
  Coding DNA Sequence Number=SeqID_15485
  Gene Ontology: Mol. function=triacylglycerol lipase activity; Biological process=lipid metabolic process
  Homolog annotation: Hit_ID=Q5NAI4; Match level="QueryCoverage=85%, HitCoverage=86%, E-value=1e-168, Identity=73%"; Hit description =Lipase-like
  Pfam annotation: Domain name=Lipase_3; Domain location=147-309; Score= 161.2; E_value=2.7e-45; Accession=PF01764.16; Description=Lipase (class 3)
MDASQGVLLSSSLVGGAKGSASWPELLGSAHWEGLLDPLDLTLRRLILLCGDLCQVTYDSFNSDTHSKYCGSCRYSRSTLFARTLFPAAADIFPAAYLYATSQSSFPGGIMVFSLSREAWNKESNWIGYVSVSTDAAAAATGQRVIYVAWRGTIRTLEWVDVLKPELVSPDAILPEGDPARGHARVMEGWYLIYTSSDERSPFSKYSAREQLLAAVRELVARYKGESLSIVCTGHSLGASLATLSAFDFAVNGVSRVGGADIPVTAIVFGSPQIGNPEFKKRFEELPNLRALHVRNMPDVIPLYPSGLLGYANAGDLLAVDSKKSPYVKHDSTNVGDYHNLQGILHTVAGWNGKDGEFKLQVHRSVALVNKSSAFLTDDNLVPESWWVERNKGMVIGETGLWQLEPPGEEPVPPFVTGKVIDDDDHVAATTTTTATASKETKTPVKDKNRLGTQLFSACFRGVNQSVDN

SEQ ID NO: 57265 - protein, 355 aa, Zea mays
  Coding DNA Sequence Number=SeqID_15486
MPRRYNWRIWLKETVMNIEAVWDKSTTESKSRCLLEKVDSLEKENEDLGRQVVGLKDMMAKTWVKAQGTQERATMLESELLAVKAYHEKLEVDTRAGVDRVHSLFVEAYHDLGAVTMPNDMSGGEMDTRFLALRDEDVEDLDSLGTLGTRTADVESRDARTSHWLIAEEQTLTLGLVPAQVPMTVPMQGNFDSSGKGKDILDVAACVTLLSCWSPSFSNDGGGFSDFDSLCSEKGLEFFEGMDNESSKEDLNFFVALYIASMSKAATGEGSSGGAPPAKGKQKKTRARIPKRRVPSSGVFACDRGGGCRRRCMGMQGPTSRILLSEVLGMVPSHINEGESVELSMGPCHAVLTRS

SEQ ID NO: 57266 - protein, 153 aa, Zea mays
  Coding DNA Sequence Number=SeqID_15487
MGKNNKRKREPTPPSEDFGDTKYSEEEFSSESEGSPAPASPPASSDDSDDSQGIAAEVWTYIRAVERSGLEGSDESEYSSDEEDSPEEDGEGDDDDDDGGDDSDDGDGGSRGGNGGSRSGNGGSRGSDGGSSRGSGGGGSNKASGEMPLVFRY

SEQ ID NO: 57267 - protein, 764 aa, Zea mays
  Coding DNA Sequence Number=SeqID_15488
  Gene Ontology: Mol. function=transcription coactivator activity; Cellular component=chromatin; Biological process=negative regulation of transcription from RNA polymerase II promoter
  Homolog annotation: Hit_ID=Q9LKX9; Match level="QueryCoverage=97%, HitCoverage=95%, E-value=0.0, Identity=85%"; Hit description =Retinoblastoma related protein RBR1
  Pfam annotation: Domain name=RB_A; Domain location=215-416; Score =423.5; E_value=3e-124; Accession=PF01858.7; Description =Retinoblastoma-associated protein A domain
  Pfam annotation: Domain name=RB_B; Domain location=535-662; Score =245.1; E_value=1.5e-70; Accession=PF01857.10; Description =Retinoblastoma-associated protein B domain
  Pfam module annotation: Pfam domain module=RB_A::RB_B; Domain location=215-416::535-662
  Subcellular localization annotation: CTP_CleavageSite=44; ConfidenceScore=5.01e-01
MSSLDPSPATSTQQQKQLESLVNLLTQGSRFYRKAYNELFSGVTTEQDPDSSTNIPEYMLFGWHLFLMLHLRSPELFKDLVSCIHGLVAVLAILLIHVPAKFRSFTIEGSSHLNDLMYFKGLIDMECFQSNLEKMEKLCNSNSCKGELDFKSILINNDYIPYDENSTGDSTNLGHSKCAFETLASPTKTIKNMLTVPSSPLSPATGGSVKIVQMTPVTSAMTTAKWLREVISSLPDKPSSKLQQFLSSCDRDLTNAVTERVSIVLEAIFPTKSSANRGVSLGLNCANAFDIPWAEARKVEASKLYYRVLEAICRAELQNSNVNNLTPLLSNERFHRCLIACSADLVLATHKTVIMMFPAVLESTGLTAFDLSKIIENFVRHEETLPRELKRHLNSLEEQLLESMAWEKGSSLYNSLIVARPSVASEINRLGLLAEPMPSLDDLVSRQNVRIEGLPATPSKKRAAGPDDNADPRSPKRSCNESRNTVVERNLQTPPPKQSHMVSTSLKAKCHPLQSTFASPTVCNPVGGNEKCADVTIHIFFSKILKLAAIRIRNLCERVQCVEQTERVYNVFKQILEQQTTLFFNRHIDQLILCCLYGVAKVCQLELTFREILNNYKREAQCKPEVFSSIYIGSTNRNGVLVSRHVGIITFYNEVFVPAAKPFLVSLISSGTHPEDKKNASGQIPGSPKPSPFPNLPDMSPKKVSASHNVYVSPLRQTKVFLLIIRFTFFIFALNNGRKVNSRLNFDMLLHQTDDPIFSVLQVI

SEQ ID NO: 57268 - protein, 234 aa, Zea mays
  Coding DNA Sequence Number=SeqID_15489
MQRVSDDWVLVRASNGDPEAPRRARGGGTPMEGGQAATHPQARAAVAHPNPRTTVPTHPPMRVVTTSHEVRTASRKARAFVGLNGLMGLYPTADPTRAAADPSPPDAIAPNRRRARPGAAIARTQEPPEPNAVGRPPPPSRYAAGPLLPPPPPPKSSPPAIASLVPPPPSYEQVVRVGGGRREEDDDEGAGAVIRAHLLSDFKVAVRAGKVLVSDPSSGRSPLASSSDSIANFG

SEQ ID NO: 57269 - protein, 193 aa, Zea mays
  Coding DNA Sequence Number=SeqID_15490
MVGRSRTRRSLTVEPSHTGRFLKEARTEVAGEEKLAPGAEGATSPLGPVDFEISDMDLAVKSPLKIVSSVATLAKARIEAAVAKAESSALHDKLKEKKKEAVVFEQEAKSAKAEIVFSDFSPVYEELGATRLHIVIQGLMFFSALITYESGFESLVRGGFDHMARLSSADFEASENLYTNVGEVDGGSGGQLA

SEQ ID NO: 57270 - protein, 397 aa, Zea mays
  Coding DNA Sequence Number=SeqID_15491
  Subcellular localization annotation: CTP_CleavageSite=55; ConfidenceScore=5.08e-01
MVEQLPRRASACLLLGFHAPVLRKSKVQLHQLTPNVVVALSTFVWATTTFGGGPSNEAFAEHYCLHWQKRSLGRVVDQFGSCTFTAKPGKTKEKVIELAPYAKNKWGWMKIWFYVCCSRGKGWPLASTLSVFQFEAFPHNAVEEGDHDDRTSILLLLYVAVEIRLSSTWSVGFGRLIEARLWAQLPIGISMVSIGRFWALPSQLSFGSVLGTRLLQRQKGRRKSSSILLLNWKLKGQLNFVMGMCERIVCLARWGLLMKSTWYVQRRGGRHWWGPAQSHTLIVITSTCSVRTEAACFEVFDADLTETCGHVDVEAGSMGDFAELVTRGKLGRDFISSDASRFQERKTMGCKGDDYGVRLRGRCAGSLGEGVSYIPLHNIPYVIVAPMDLKGKAPALS

SEQ ID NO: 57271 - protein, 93 aa, Zea mays
  Coding DNA Sequence Number=SeqID_15492
MAPSEAGVDGRRGVDCGEDGSIGVEGSLGKGARIWGEDGSSGGAVLMGGATAALMARALLEVAALMARAQLEASHNGGGQAGFSGSTRSLQEQ

SEQ ID NO: 57272 - protein, 80 aa, Zea mays
  Coding DNA Sequence Number=SeqID_15493
MVSPITTAYDEGLLPSLCVANFKNYQQCVSHIEAAWGLAYSIGSYVFSSGSDPKSQPRDFCVIKQEWTVVRIQFASLHSW

SEQ ID NO: 57273 - protein, 85 aa, Zea mays
  Coding DNA Sequence Number=SeqID_15494
MEIATSAAQPFQLKEVFSTSSYYSPYIPHYVQPQDPLYGRHPLLSSQSHLFMVKFLLAIIPSSHCKLCNKGEGKPLKPVRSTVWS

SEQ ID NO: 57274 - protein, 105 aa, Zea mays
  Coding DNA Sequence Number=SeqID_15495
  Gene Ontology: Mol. function=porin activity; Cellular component =integral to membrane; Biological process=transport
  Homolog annotation: Hit_ID=Q10LH9; Match level="QueryCoverage=94%, HitCoverage=11%, E-value=4e-44, Identity=86%"; Hit description =Nucleoporin interacting component, putative, expressed
HSREDLISEQQTVLRHLEAILHIYRLARAGQTVDALRETIRLPFLHLDPKAPNVTVDIFRNLSPHVQACVPDLLMVALNCIDNVRDTDGTLRAVKTKVVQLMSFS

SEQ ID NO: 57275 - protein, 225 aa, Zea mays
  Coding DNA Sequence Number=SeqID_15496
MKYVHTADREGIMCIQELDQKIKLVQHLQKAWVNVYGTEPETDFYPTSDKKEGDDDDSKDEEFDGFDDFQSNRDATTEDAAIDDVSGNNADNPPTVNHSTTSSDCSHYVSMANLNEGFISHINPSSSDCSKVPYAGRIVLPQIMAQVIPFGQKADSGLGEPGEFFTTLSSDAAQQLLAASTGIGSNTMADAARPVAVISKAVLNSVPDQLLSTKFEHAQFSDCCK

SEQ ID NO: 57276 - protein, 92 aa, Zea mays
  Coding DNA Sequence Number=SeqID_15497
MKTGLLAPDPLMETLMPAEHPVRVRDITDVLQRDDQRECLCKIAGRSLENLNQCVPLKITCIIDDQSEFNHWQPSKGDSVLQLVDGRLWDLC

SEQ ID NO: 57277 - protein, 66 aa, Zea mays
  Coding DNA Sequence Number=SeqID_15498
MEVACFDQGSWLNIVLGNFLNESLDDCDAHRLYDGVGGGSRLEVSLVKNQSCLAWDVSRLGNDDAS

SEQ ID NO: 57278 - protein, 63 aa, Zea mays
  Coding DNA Sequence Number=SeqID_15499
MARKLLRGYEISHVPICLFVLESRFQRNAGLVASGVAKNLNRVGTYIKDTVSDMMQPHRKRPK

SEQ ID NO: 57279 - protein, 424 aa, Zea mays
  Coding DNA Sequence Number=SeqID_15500
  Gene Ontology: Mol. function=protein serine/threonine kinase activity; Cellular component=integral to membrane; Biological process=detection of brassinosteroid stimulus
  Homolog annotation: Hit_ID=Q942F3; Match level="QueryCoverage=76%, HitCoverage=46%, E-value=1e-118, Identity=44%"; Hit description =Extra sporogenous cells-like
  Pfam annotation: Domain name=LRR_1; Domain location=103-123; Score =15.1; E_value=0.26; Accession=PF00560.23; Description=Leucine Rich Repeat
  Pfam annotation: Domain name=LRR_1; Domain location=125-148; Score =13.0; E_value=1.1; Accession=PF00560.23; Description=Leucine Rich Repeat
  Pfam annotation: Domain name=LRR_1; Domain location=150-172; Score =16.3; E_value=0.11; Accession=PF00560.23; Description=Leucine Rich Repeat
  Pfam annotation: Domain name=LRR_1; Domain location=174-197; Score =11.9; E_value=1.7; Accession=PF00560.23; Description=Leucine Rich Repeat
  Pfam annotation: Domain name=LRR_1; Domain location=217-239; Score =13.5; E_value=0.78; Accession=PF00560.23; Description=Leucine Rich Repeat
  Pfam annotation: Domain name=LRR_1; Domain location=241-263; Score =16.8; E_value=0.08; Accession=PF00560.23; Description=Leucine Rich Repeat
  Pfam annotation: Domain name=LRR_1; Domain location=265-287; Score =9.4; E_value=5; Accession=PF00560.23; Description=Leucine Rich Repeat
  Pfam annotation: Domain name=LRR_1; Domain location=289-311; Score =13.6; E_value=0.71; Accession=PF00560.23; Description=Leucine Rich Repeat
  Pfam annotation: Domain name=LRR_1; Domain location=313-335; Score =12.0; E_value=1.6; Accession=PF00560.23; Description=Leucine Rich Repeat
  Pfam annotation: Domain name=LRR_1; Domain location=337-359; Score =12.6; E_value=1.2; Accession=PF00560.23; Description=Leucine Rich Repeat
  Pfam annotation: Domain name=LRR_1; Domain location=361-383; Score =11.3; E_value=2.2; Accession=PF00560.23; Description=Leucine Rich Repeat
  Pfam annotation: Domain name=LRR_1; Domain location=76-99; Score=9.4; E_value=4.9; Accession=PF00560.23; Description=Leucine Rich Repeat
  Pfam module annotation: Pfam domain module=LRR_1::LRR_1::LRR_1::LRR _1::LRR_1::LRR_1::LRR_1::LRR_1::LRR_1::LRR_1::LRR_1::LRR_1; Domain
  Pfam module annotation: Domain location=313-335::337-359::361-383::76- 99
MAAAGGSTGSLPGGSPREKEGEALVAGGEGVEVMGGFLRAGQALVAACAGLSALNLSGGLIGGPRSAGVVASGFVRLEALDLSGNKISGDGDLRWIVGAGVRAVRQLDLSGNKISSLPEFTNCSGLEYLDLSGNLIAGEVAGRTLADCRGLRTLNLSGNHLVGPFPPDVAALTSLAALNLSNNNFSNDLSADAFTELHQLKVVALSFNHFNGSPNSSLCMLYLQNNYLSGAIPESISNCTRLESLDLSLNNINGTLPASLGKLGELRDLILWQNFLEGEIRASLENLDKLEHLILDYNGLIGIIPSELSKCKELNWISLARNQLSGPIPAWLGQLSNLAILKLSNNSFSGPILAELGNCQSLVWLDLNINQLNGSIPAELAKQSGKMNIGLVIGRRRKRIGEKNGGCYDVSINGFNHRRYLVMA

SEQ ID NO: 57280 - protein, 93 aa, Zea mays
  Coding DNA Sequence Number=SeqID_15501
MGSWNTTQFETPHRYDTWSDGEEMVEKNERGEIGKEQCDNGVLLELGDASSLSLAHSRHRWVLQQGKGQGGVAIGLKGQGQSPTTKYEERRLE

SEQ ID NO: 57281 - protein, 130 aa, Zea mays
  Coding DNA Sequence Number=SeqID_15502
  Subcellular localization annotation: CTP_CleavageSite=56; ConfidenceScore=5.39e-01
MKQCTFSSPSALVFVYNLTSELLINWRLRRRPGFCHRIATSTASTVNGLTPCWCPSSSSKPGVEQHSPEFAAAQPNSSARGYSPGSRSASGSTARVGGPYSGLTTDHYVNGNMENHPGKQCYHKGIMGRP

SEQ ID NO: 57282 - protein, 74 aa, Zea mays
  Coding DNA Sequence Number=SeqID_15503
MEGAAGEEGASTPAARGGAEAGAGAGAGGGMLKGRSCKGCLYYSSKLRSRARGPVCVGVTRALPQDLVVNYESS

SEQ ID NO: 57283 - protein, 84 aa, Zea mays
  Coding DNA Sequence Number=SeqID_15504
  Homolog annotation: Hit_ID=Q9LKX9; Match level="QueryCoverage=89%, HitCoverage=10%, E-value=8e-32, Identity=94%"; Hit description =Retinoblastoma related protein RBR1
MSSLTLRQRRAPNRFYRKAYNELFSGVTTEQDPDSSTNIPEYMLFGWHLFLMLHLRSPELFKDLVSCIHGLVAVLVTLRIAPLF

SEQ ID NO: 57284 - protein, 124 aa, Zea mays
  Coding DNA Sequence Number=SeqID_15505
MDPLRCSLRPTNVPPSMGGNRGLPGHVEYRHDIDWPEGPLGHYELLTGLTPSPWSASYRDRLCTCRFCPKESEKRQLEKTWLEQPRLCSVWVHRTVRWCTRQCPVRQAGSGEKAALGNSSAAYD

SEQ ID NO: 57285 - protein, 85 aa, Zea mays
  Coding DNA Sequence Number=SeqID_15506
MAAACLRRLHRIPHPVLKLAAATHWPLPFPGAKLAPVTQSCPSADRVEVQLSARCPDRYDQEVGSSLLHVTNKRTISPLSSRLSR

SEQ ID NO: 57286 - protein, 374 aa, Zea mays
  Coding DNA Sequence Number=SeqID_15507
  Gene Ontology: Mol. function=ribonuclease H activity; Biological process=DNA integration
  Homolog annotation: Hit_ID=UPI00004C1732; Match level="QueryCoverage =99%, HitCoverage=38%, E-value=1e-46, Identity=46%"; Hit description =UPI00004C1732 related cluster
MDGGSMLNIMYVETFDGLGIARSALRPSPTPFHSVTPGHQAYPLRRISLPVTFSDPSNFRIERLQFEVVHFPGAYNVILWRPHCIKFMAVPNYTYPKLKVPGPPGTITTLKASPDTFMSAEDTKDIQIDAIDTSKHIRIGAALSDRQGSTLVDFLRANRDVFVWKPVDMSGVPREVAEPSLNILPMARPVAQRLRRFDEEKRKAIDEEELEDVRRLVGCVAALSRFVSRLGERGMPLYKLLRKSDHFSWITEAQEALDRIKAFLTTTPILVAPNLGKALLYVAATTQVVSVALVVERENEVLIAKRKLIHYFDWHSVSVVSTTLLGEIVRNRDAFARIAKWSLELNGLDIGYVPKIAIKSQALVNFVTEWTEAQ

SEQ ID NO: 57287 - protein, 433 aa, Zea mays
  Coding DNA Sequence Number=SeqID_15508
  Gene Ontology: Mol. function=translation initiation factor activity; Biological process=cellular metabolic process
  Homolog annotation: Hit_ID=Q10G37; Match level="QueryCoverage=100%, HitCoverage=66%, E-value=1e-124, Identity=58%"; Hit description =Translation initiation factor eIF-2B delta subunit, putative, expressed
MDLRRPPRSSSGGVEPKIRQVGFFTPDASAPSEPMPPAAVVQAPSAQQRPVTASPPASDDFSQGRLSPVMIPPPRHADHLALGPHPPAAADVVLATSAPVRSSPRLDIVSEIGDDDSWSRAPSAVELGTLSNHEIAIGRCFGGGNGIGLYCHEENKCGLAEIRNEGAPASIPQKQKTSKAERRAIQEAQRAAKAAAKEADKSGKSAGAAMSKQAKPAKTAQKKDVPQAASTLASEKKATERPPEREKKLDAPHPRMQFDDVHKVEKAKKRAVVNQSEAQNRVELFRHLPQYVHGTQLPDLESKFFQLEPMHPSVYKVGLQYLSGEVSGGNDRCVAMLLAFKEAIKDYTTPTNKTLSRDLTAKISSYVSFLIECRPLSISMGNAIRFLKSRIAKLPHALSESEAKTSLQSDIDRFINEKIVLADKVIVSHAITK

SEQ ID NO: 57288 - protein, 208 aa, Zea mays
  Coding DNA Sequence Number=SeqID_15509
MAGHAEGCTGRGCTRTRGRGSARGDRGELTTGSMDDINGSTGSNLGQGERWREVEERDREVAARERENEGEGVHIGGEREEEWCRRRGTLHQASVHAVSGVQNHLQIEGKGLHNIAVGIGPYVAGNSSPKFRLTLKPHRTVARKLGAIIVGEYLSSVFVRPSSSFSSSRIGEWCSESPGRESSSARFRPPGRRRRRSRLDEEDDSGAV

SEQ ID NO: 57289 - protein, 630 aa, Zea mays
  Coding DNA Sequence Number=SeqID_15510
  Gene Ontology: Mol. function=structural constituent of ribosome; Cellular component=intracellular; Biological process=translation
  Homolog annotation: Hit_ID=Q2R0M9; Match level="QueryCoverage=23%, HitCoverage=18%, E-value=2e-20, Identity=39%"; Hit description =Expressed protein
MRKYSVPYCFRMCIWLAYISSDALAIYALATLFNRHARTVPASYCPAPAPAGKEQSRILEVLWAPILLIHLGGQKEMTAYEIEDNELWTRHTVTLVSQVSVALYAFYKSWHPSSSDRKLTAAAVLLFVIGVVSFSEKPVALNKAKIKQLADVSAWIQGTKQRSVWREDLIHFSLFEESNLFTVVPRRLWTVCCGHNRREKEVALPPEDKVLMVLSDMSLLAAAKELVERGKAEKLEDVLPPLVLVAEKGLKQWLRGAFAFIYTRASVVVTRPYLIYHLALVPVLHVGALVLFATSDKRRYKRADVKITYIILCLTAALDFLAVFVRLLVYRLMSMTSVSALCETLPGYNLIDESVREADQGSCARYISSWCRRRPDGELYKKVEPHLLADLVEGSQDRDLASYRIFDSTTENWALSKELQDKCGKEIKDSLQGISFDRSVLIWHIATDLCFRCSDVVDYGQEEVEDGGGAEGPEEEEGGGGVGGAGQGTEDNYAVRALRLQINCTEAISNYMVHLLNSNPEMLLTGSRNHILSEAREGLKSIILSDKAITEELAPESEGCTCTCRRCCASIGRWCSCASTGCSCSCGQLNRAHHFSQKDLLRNLVSETASREVDRGKNSQTFYVIKGLFG

SEQ ID NO: 57290 - protein, 141 aa, Zea mays
  Coding DNA Sequence Number=SeqID_15511
MYCVLGQGFDGGSAVELVDVLAGNGEGVEVSDDGRKEGGAEASQGCAQGRQQARASYRGRGSMSAGARGRGWVLLARDVQQGAGSRARSGLGSARGSVAAAWLGLGEQGGSLARGWSRARRGGSGAGARARVLGSWAPSGP

SEQ ID NO: 57291 - protein, 142 aa, Zea mays
  Coding DNA Sequence Number=SeqID_15512
MSIKYVGKEGRQGGSSRGTTTTWMDGEHDMDERRPWTNGVDGGHGVDESAPMKRRGQTTSHTRRRGAARARAGATTPAMADGGAAMVDGGAAMVGGREGGRRRRRDAWRVGGVAVREDGWAGADGGAATEGGRAVAQRRGRD

SEQ ID NO: 57292 - protein, 106 aa, Zea mays
  Coding DNA Sequence Number=SeqID_15513
MVSGGGSAPLGAEGEEALASKGWVETRRYDNYTRKNKNGATLTWGPRPSSDPGSGTSVAVVVAAAAVVVAAGAPRGDHPQVVVVVAGPTVVVVAVTADPMVVVEED

SEQ ID NO: 57293 - protein, 317 aa, Zea mays
  Coding DNA Sequence Number=SeqID_15514
  Gene Ontology: Mol. function=protein serine/threonine kinase activity; Cellular component=membrane; Biological process=protein amino acid phosphorylation
  Homolog annotation: Hit_ID=Q53P17; Match level="QueryCoverage=86%, HitCoverage=90%, E-value=4e-82, Identity=55%"; Hit description =Protein kinase domain
  Pfam annotation: Domain name=Pkinase; Domain location=35-311; Score =124.3; E_value=3.5e-34; Accession=PF00069.15; Description=Protein kinase domain
  Pfam annotation: Domain name=Pkinase_Tyr; Domain location=35-311; Score=72.8; E_value=1.1e-18; Accession=PF07714.7; Description =Protein tyrosine kinase
  Pfam module annotation: Pfam domain module=Pkinase::Pkinase_Tyr; Domain location=35-311::35-311
MSGDNSSGMANKPSLLSTLPTNPPAQFLKDITDGFSETQMLGEGAFGTVYKGILQDGQPIAVKKLAENAPVAPEKQFKIGVGNLMAMQHPNIVRILGYCREPQRKVIEQSGRYIIVDVVESLLYYEYVPNGNLEKYISDASASRPDWKTCFEIIKGICQGLRYLHKEMDRPIVHLDLHPTNILLDENMVPKITDFGLSRLFGEEQTRINTINVVGKKGYMAPEYLYRGEISTRSDIYSLGLVIMEIITGKNSSSSDKDMSARDFVDKARLRLENVRETWTDEHIASKHSALDAVSLQENKRPSIVEIVDKLNGRHAH

SEQ ID NO: 57294 - protein, 220 aa, Zea mays
  Coding DNA Sequence Number=SeqID_15515
MEEAVYAHRELQGLNDDKWSRKSRRGFKDMGNRARLRWPWRARRWRERSRGQDAKGRAGGAWAPAERSTQLAMASRVQGAEEQASRDKHTEGAGRNVGSHGSFKAERQGARQAESTRRKRAKQGVAGARHQRAGADELQTRYTGRREERGGETSAGWASWRNSSRRARSREEDARGGRSRESAREDEECTWEERSGCARGDKHNDEKSDGEGCIVFLGDF

SEQ ID NO: 57295 - protein, 469 aa, Zea mays
  Coding DNA Sequence Number=SeqID_15516
  Gene Ontology: Mol. function=serine carboxypeptidase activity; Cellular component=peroxisome; Biological process=proteolysis
  Homolog annotation: Hit_ID=P37890; Match level="QueryCoverage=93%, HitCoverage=93%, E-value=0.0, Identity=70%"; Hit description=Serine carboxypeptidase 1 precursor
  Pfam annotation: Domain name=Peptidase_S10; Domain location=42-466; Score=644.0; E_value=1.2e-190; Accession=PF00450.12; Description =Serine carboxypeptidase
  Subcellular localization annotation: CTP_CleavageSite=18; ConfidenceScore=5.10e-01
MACGSATAARPAARLWLLAAVVVATSFLAVAAPPGALVTSVPGFGNKQQLPSKHYAGYVTVDERHGRRLFYYLVESERDPARDPVVLWLNGGPGCSSFDGFVYEHGPFSFESSGGSAGSLPKLHLNPYSWSKVSSVIYLDSPAGVGLSYSNNVSDYETGDFKTAADSHTFLLKWFQLYPEFLANPFYIAGESYAGVYVPTLSSEVVKGIHKGVKPVINFKGYMVGNGVCDTVFDGNALVPFAHGMALISESIYKEASTACQGNYWNSSSAKCDEALSKVETEIDGLNIYDILEPCYHAPADTKQAAVTPQAQSTSELPQSFKDLGVTSNKPLPVRTRMHGRAWPLRAPVSSIGPWELCTDKLDFDHDAGSMIIYHKNLTSQGYRAFIYSGDHDMCVPYTGTEAWTASLGYAVVDPWRQWIVDEQVAGYTQGYEKGLTFATIKGAGHTVPEYKPQEALAFYSRWLAGAKL

SEQ ID NO: 57296 - protein, 178 aa, Zea mays
  Coding DNA Sequence Number=SeqID_15517
  Homolog annotation: Hit_ID=Q6QP51; Match level="QueryCoverage=23%, HitCoverage=19%, E-value=3e-12, Identity=78%"; Hit description =Putative growth-regulating factor 1
  Subcellular localization annotation: CTP_CleavageSite=76; ConfidenceScore=5.38e-01
MEAGSGAKNHRQTLPRVYKDQSKTVPTLHPDRPRDSKTRSKTAVPRTARGSRTRNGRPANRTPRRINSVAGQAAPPAGEASDGPGKGDTPKRILPREGTRLRASLLIRGSKAGPSEGFNSRLRARGLHTHYWSEVRRSAPWKGSTAASGYSGSTPTTDQGFEGWPPKGSQPPQTQSEG

SEQ ID NO: 57297 - protein, 220 aa, Zea mays
  Coding DNA Sequence Number=SeqID_15518
MARKRRAKFLLKTESDVDHWTQQMVECYSPCFAKLLGLLPWMVVKKTSSICVYRPSFLRPKQPVPPFSTLEATVSSSGAFSLPLTHTLVLQSLHRRGVSGFAHRAMGSGSCCCIGCNGGGGDEGGVDAGGGLDPKGFLLAMMIALVLLMLCHQQDKKMEIVFVLSISVGTAPGTKRRSSCPCKFLSSVFRIVAVIKIDGVFLLVGTDRKPMRKPVYRGQN

SEQ ID NO: 57298 - protein, 191 aa, Zea mays
  Coding DNA Sequence Number=SeqID_15519
MAGWSAMDEQEGSSDGCARPGTRGELAPGAGAGGRASSKLGPRRGARHGWRERERKAGGAASWEAGRKLGPGRDAGGASQGDRTSGRHEKEAELGWARASRGRRRGRALGKEMRGRSRAPALRRKRRWEGIRRSIKRWKRKISRRPTPARGSEKYQGKTAAGDNADGSTTDIHNSHIRVKNRHQQVGSGQY

SEQ ID NO: 57299 - protein, 93 aa, Zea mays
  Coding DNA Sequence Number=SeqID_15520
  Subcellular localization annotation: CTP_CleavageSite=55; ConfidenceScore=5.15e-01
MAVPGPALRVPAWRVTCVACLRRVAGSACPARWLGQPASVAANGLPAWRRDQPTRGSAACGPVRPANRHRARQFPGTDEEGLASRCPCPHVVN

SEQ ID NO: 57300 - protein, 131 aa, Zea mays
  Coding DNA Sequence Number=SeqID_15521
  Homolog annotation: Hit_ID=Q67YQ9; Match level="QueryCoverage=68%, HitCoverage=25%, E-value=4e-24, Identity=56%"; Hit description=MRNA, complete cds, clone: RAFL24-13-K22
MAPFSCATIHPDASWRVVGLFACCACTRDLCGISHDKGFDISDPNVVGQNDLLIVGPGVLGRIIAEKWKKEHPSCKVYGQTASKNHHNELTDLGIIPSLKGTTIHQKVPHVIFCAPPSGSDDYPRDVSAIF

SEQ ID NO: 57301 - protein, 33 aa, Zea mays
  Coding DNA Sequence Number=SeqID_15522
MAGGKELFGAKEGRLAGDGTFHPSCRHYRTSEI

SEQ ID NO: 57302 - protein, 138 aa, Zea mays
  Coding DNA Sequence Number=SeqID_15523
MGRTQKPESRGQGWTALGLCRTEAAPAGETRARGIVAGRTRRHASTPPGRLSRTPAAARQRPGTLRGWPGLGATRSCRGTQGRSAHARYAAAALRWVGKRPPGAQGMGSVGDGDRHGGSTDLGIGITDEGRMRELRTW

SEQ ID NO: 57303 - protein, 140 aa, Zea mays
  Coding DNA Sequence Number=SeqID_15524
MGSVGDGDRHGGSTDLGIGITDEGRMRELRTWGEVRICVEGRSFSDREIEEGTSAYINKGGVGCGEAVARTTRKALRDEARQNEVAATDSELMLVCETDNNLGTTDLTHGPEVSASGACEAVVSTRYGEGGEKVAHTSVA

SEQ ID NO: 57304 - protein, 194 aa, Zea mays
  Coding DNA Sequence Number=SeqID_15525
MTQKTCCCRGVVQEQTAGLRGLSAMTMTYGRKVDAEQSKREDKPDDYETVDWPPASATLTTMGRGGVHRRGLGKYQGDGQATMAEAGGQTGLEKRERRRLERRPDLDSREAAEQRRDPGEPPWEGQERSTTVRRAPRRGGVNNSTPHEDGSSPTIENLMGGKPTLEAEADGDVKLRRSNRVKKPNSKYIGANWL

SEQ ID NO: 57305 - protein, 103 aa, Zea mays
  Coding DNA Sequence Number=SeqID_15526
  Gene Ontology: Mol. function=oxidoreductase activity; Cellular component=mitochondrion; Biological process=metabolic process
  Homolog annotation: Hit_ID=Q9SAK4; Match level="QueryCoverage=65%, HitCoverage=12%, E-value=1e-25, Identity=80%"; Hit description =Succinate semialdehyde dehydrogenase, mitochondrial precursor (EC 1.2.1.24) (At-SSADH1) ...
  Homolog annotation: Hit description=(NAD(+)-dependent succinic semialdehyde dehydrogenase)
MATLNAFELAVHVFPHHVGVQICIWPYLPQVMQSYDLIISHKEELALLMTLEQGKPMKEALGEVNYGASFIEYFAEEAKRIYGDIIPPTLSDRRLLVLKQAIC

SEQ ID NO: 57306 - protein, 76 aa, Zea mays
  Coding DNA Sequence Number=SeqID_15527
  Gene Ontology: Mol. function=oxidoreductase activity; Cellular component=mitochondrion; Biological process=metabolic process
  Homolog annotation: Hit_ID=Q9SAK4; Match level="QueryCoverage=79%, HitCoverage=11%, E-value=4e-17, Identity=62%"; Hit description =Succinate semialdehyde dehydrogenase, mitochondrial precursor (EC 1.2.1.24) (At-SSADH1) ...
  Homolog annotation: Hit description=(NAD(+)-dependent succinic semialdehyde dehydrogenase)
MEKIRAAGLLKTQGLIAGQWVDAYDGKTIEVQNPATGEVLANVSFMGSRETSDAIASAHSTFYFIVSTVTQINLVL

SEQ ID NO: 57307 - protein, 107 aa, Zea mays
  Coding DNA Sequence Number=SeqID_15528
  Gene Ontology: Mol. function=oxidoreductase activity, acting on the aldehyde or oxo group of donors, NAD or NADP as acceptor; Cellular component=mitochondrion; Biological process=metabolic process
  Homolog annotation: Hit_ID=Q9SAK4; Match level="QueryCoverage=67%, HitCoverage=13%, E-value=4e-18, Identity=68%"; Hit description =Succinate semialdehyde dehydrogenase, mitochondrial precursor (EC 1.2.1.24) (At-SSADH1) ...
  Homolog annotation: Hit description=(NAD(+)-dependent succinic semialdehyde dehydrogenase)
MGNAPEIGDALLQSTQVRKITFTGSTAVGKKLMAESANTVKKVSLELGGNAPCIVFDDADIDVAVKGSVRLTFTFIFFVSLLAYNYIKSSQVPLVNEGDIIYLRICK

SEQ ID NO: 57308 - protein, 132 aa, Zea mays
  Coding DNA Sequence Number=SeqID_15529
MALGSESSDPRAPAELVKPRSNLARTSLIGRPESHNTPSAAQLANMTPLFSGIKPAVLDHYSLSLGIIAPEPLTFLVTPVLVIFIPCSSLKYFWVVPAIALCGLDHYVNGNMERPPRKTVLPQGYNGTPLAD

SEQ ID NO: 57309 - protein, 129 aa, Zea mays
  Coding DNA Sequence Number=SeqID_15530
MDRGFITKKSRDSLSNRHGEGRRLTGNGVDDRSGHMHRLARAEEMAPVSDSGGRKVLPLPSDATASTHEDAAKPLAPGQGTRRKCPRDSAAATTRFSLFTAMKWLSARENEERGFREDRRGGFICPPHG

SEQ ID NO: 57310 - protein, 79 aa, Zea mays
  Coding DNA Sequence Number=SeqID_15531
  Subcellular localization annotation: CTP_CleavageSite=15; ConfidenceScore=5.01e-01
MAQIMVKLGYQAKPSSSGARERQRRKTVWGCKIPRRRCKAVDLFPAICNLAFTSTTVEHGEPPGKTVLPQGFNGTPLAD

SEQ ID NO: 57311 - protein, 807 aa, Zea mays
  Coding DNA Sequence Number=SeqID_15532
  Gene Ontology: Mol. function=binding; Cellular component =intracellular; Biological process=metabolic process
  Homolog annotation: Hit_ID=Q6H4W1; Match level="QueryCoverage=98%, HitCoverage=98%, E-value=0.0, Identity=75%"; Hit description =Putative pentatricopeptide (PPR) repeat-containing protein
  Pfam annotation: Domain name=PPR; Domain location=108-142; Score =35.4; E_value=2e-07; Accession=PF01535.11; Description=PPR repeat
  Pfam annotation: Domain name=PPR; Domain location=209-243; Score =34.4; E_value=4e-07; Accession=PF01535.11; Description=PPR repeat
  Pfam annotation: Domain name=PPR; Domain location=318-352; Score =49.5; E_value=1.1e-11; Accession=PF01535.11; Description=PPR repeat
  Pfam annotation: Domain name=PPR; Domain location=384-418; Score =36.0; E_value=1.3e-07; Accession=PF01535.11; Description=PPR repeat
  Pfam annotation: Domain name=PPR; Domain location=485-519; Score =42.6; E_value=1.4e-09; Accession=PF01535.11; Description=PPR repeat
  Pfam annotation: Domain name=PPR; Domain location=520-554; Score=7.1; E_value=1.1; Accession=PF01535.11; Description=PPR repeat
  Pfam annotation: Domain name=PPR; Domain location=586-620; Score =40.0; E_value=8.1e-09; Accession=PF01535.11; Description=PPR repeat
  Pfam annotation: Domain name=PPR; Domain location=621-655; Score =18.8; E_value=0.02; Accession=PF01535.11; Description=PPR repeat
  Pfam annotation: Domain name=PPR; Domain location=657-690; Score =10.8; E_value=0.39; Accession=PF01535.11; Description=PPR repeat
  Pfam annotation: Domain name=PPR; Domain location=723-757; Score=0.9; E_value=5.8; Accession=PF01535.11; Description=PPR repeat
  Pfam module annotation: Pfam domain module=PPR::PPR::PPR::PPR::PPR::PP R::PPR::PPR::PPR::PPR; Domain location=108-142::209-243::318-352::384- 418::485-519::520-554::586-620::621-655::657-690::723-757
  Subcellular localization annotation: CTP_CleavageSite=30; ConfidenceScore=5.21e-01
MANLAAQLAAVLQACIKRSGGRKPSRSNAKAAHARVLAAGLAADTFLLNRLVELYSLSGLPCHALRAFRALPHPNVYSYNAAISAACRAGDLAAARDLLGRMPDRNAVSWNTVIAAVARSGSPGEALEMYQGMLQEGLAPTNFTLASVLSACGAVAALDDGRRCHGLAVKVGLDGHQFVENGLLGMYTKCGSVADAVRLFDGMPSPNEVSFTAMMGGLAQGGAVDDALRLFARMSRTGIRVDPVAVSSVLGACAQACAGDYNVARAIQLAQSIHALVVRKGFGSDQHVGNSLVDLYAKGMKMDEAIKVFESLSSVSIVSWNILITGYGQLGCYERAMEVLEFMQESGFEPNEVTYSNMLASCIKARDVPSARAMFDKIPKPSVTTWNTLLSGYGQEELHQETIDLFRRMQHQNVQPDRTTLAVILSSCSRLGNFELGKQVHSASVRLLLHNDMFVASGLIDIYSKCGQVGIALIIFNMMTERDVVCWNSMISGLAIHSLSEEAFDFLKQMRENGMFPTESSYASMINLCARLSSIPQGRQMHAQVLKDGYDQNVYVGCSLIDMYAKSGNMDDARLFFNCMIVKNLVAWNEMIHGYAQNGFGEKAVELFEYMLTTKQKPDSVTFIAVLTGCSHSGLVDEAVTFFNSMESNYGITPLVEHYTCLIDALARAARFAEVEAVIGKMPYKDDPILWEVLLAACVVHHNAELGEFSAKHLFRLDPKNPSPYVLLSNIYATLGRHGDASAVRALMSSRGVVKGRGYSWVNHKDGSRAFMVADDLGTDVGERTMFSDNGDTSGMTEVHIDETCAG

SEQ ID NO: 57312 - protein, 149 aa, Zea mays
  Coding DNA Sequence Number=SeqID_15533
MAPPSPSPCPRSLSWGSCIVATIVVGVALGCLCAFLYPAGLFPRAPDSASHWPRQSATATRYEEAWARRSIAVAALLLTLAYVRGLLMFFLDERLSGCSMGGAAVGGPCPAVTMASSVRPSALPNPEDAFPHVQPVSLYRNDHFVFERL

SEQ ID NO: 57313 - protein, 119 aa, Zea mays
  Coding DNA Sequence Number=SeqID_15534
MTLPYRDEIQMRFEGCAYFPDFVKPGNCNFRPYQYVIELLGTLLLRKRPAVVAGLGLRVLDRLESLPTLEEGPNVSFYTLDEHLELLRKVGAFLYPLVVVLLAITNREQMAPFTSTNRC

SEQ ID NO: 57314 - protein, 235 aa, Zea mays
  Coding DNA Sequence Number=SeqID_15535
MGNTSPSPSPFTHQEKNFLHIHPRGETNFPIPVLQWRNSPRGIGDRTPLSSLPGSHITFGSLDFLAIVTDELRLIDLDIPVTTVAEPTCSTRSKTEKRHLNRLAAAIKQQAIGASSSTLVAVISHQPTYVLDLIEEDSSHGSTESDSDADDVAERARKVCDQLVEGHNEAQYFLNLGQNMDYHFACRMARIKDDHLIIQFLPIHLAKGARASLKHLPIDTIHDWAVLRKVFVGSF

SEQ ID NO: 57315 - protein, 105 aa, Zea mays
  Coding DNA Sequence Number=SeqID_15536
MSMILPLAPLAEGGVSSVSTEITFLEETTSVLARGESQTLLSSLGGQLGVQPAPDNSVEGDDTLALCRELSEESDATEKALQDGLEQLLHHGYNSPGYPVCQLRA

SEQ ID NO: 57316 - protein, 505 aa, Zea mays
  Coding DNA Sequence Number=SeqID_15537
  Gene Ontology: Mol. function=enzyme inhibitor activity; Cellular component=cell wall; Biological process=cell wall modification
  Homolog annotation: Hit_ID=Q6L4M3; Match level="QueryCoverage=97%, HitCoverage=95%, E-value=1e-166, Identity=58%"; Hit description =Putative pectin esterase
  Pfam annotation: Domain name=PMEI; Domain location=27-184; Score =103.0; E_value=8.6e-28; Accession=PF04043.6; Description=Plant invertasepectin methylesterase inhibitor
  Pfam annotation: Domain name=Pectinesterase; Domain location=234-489; Score=398.4; E_value=1e-116; Accession=PF01095.10; Description =Pectinesterase
  Pfam module annotation: Pfam domain module=PMEI::Pectinesterase; Domain location=27-184::234-489
  Subcellular localization annotation: CTP_CleavageSite=49; ConfidenceScore=5.74e-01
MAASFPTTTALSVILLLSLFVAVVRSDTAATPVTPSTACNGTTDPNFCRSVLPSNGTSSLYTYGRFSVAKSLANANKFLGLVNRYLARGGLSPGAVAALQDCQLLSGLNIDFLSAAGATLNTSANSTLLDPQSEDLQTLMSAILTNQQTCADGLQAAASAWSVRNGLAVPMVNSTKLYSVSLSLFTRAWVRSSKANKPPRHGGHGRVLFDAIDDEMVRRMALEGVAAAVSVVGEVTVDQSGAGNYTTIGAAVAAAPSNLGGSSGYFVVRVPAGVYQENVVVPKNKKYVMMVGDGIGQSVVTALIFYIYVLASQKKTFRTLEMQCNAAVLGTGFVAVNMTFRNTAGPAKHQAVALRSGADLSTFYQCSFEAYQDTLYAHSLRQFYRGCDIYGTVDYVFGNAAVVFQDCNLYSRLPMQGQSNTSEVDTLVDPAGWMPWDGDFALSTLFYAEYNNSGAGADTSRRVAWPGFHVLNSTADAANFTVGNMVLGDFWLPQTGVPFTSGLIN

SEQ ID NO: 57317 - protein, 1010 aa, Zea mays
  Coding DNA Sequence Number=SeqID_15538
  Gene Ontology: Mol. function=protein serine/threonine kinase activity; Biological process=protein amino acid phosphorylation
  Homolog annotation: Hit_ID=Q2QM12; Match level="QueryCoverage=98%, HitCoverage=93%, E-value=0.0, Identity=69%"; Hit description =Incomplete root hair elongation, putative, expressed
  Pfam annotation: Domain name=APH; Domain location=623-810; Score=0.7; E_value=0.0049; Accession=PF01636.13; Description=Phosphotransferase enzyme family
  Pfam annotation: Domain name=Pkinase; Domain location=621-929; Score =269.9; E_value=5.1e-78; Accession=PF00069.15; Description=Protein kinase domain
  Pfam annotation: Domain name=Pkinase_Tyr; Domain location=621-936; Score=34.9; E_value=1.3e-14; Accession=PF07714.7; Description =Protein tyrosine kinase
  Pfam module annotation: Pfam domain module=APH::Pkinase::Pkinase_Tyr; Domain location=623-810::621-929::621-936
MVDGGGREMDSPRFRAILRATSGRRKRAPEVKSFSHELSSRGGGGGVPAMRKMVRGGGLGSTTPEEFIGAIRTKFIRLKEEVDSELGVFAGDLVDMLARSGDHRDDCRVALEDLLVVAQRCAEMSPEELWTRCEGVVQGLDDRRQDLPAGLPKQAHTRILFILTRFTRLLQFRKGAAAGCRYAADADDDDRHNVLGLHNLSDLGLYPIHVDGGDLGPKSTSSLTELKERLIRRRMLEHRQLTVDFSPARIFSPFGDGSAVDGHSPSSKMASWKKLPSPAEKNKTAAAAGDATAAAAKGDDSPSKKKPITRHGKATVDEIVERVDAASIHIRPDGLACLGGDEAISLEIPSRYPEAQQIMVDGKPRMICRICDFEIPMACAEGHFVVCTLADRCDAKGHSADQRLLRVAEVLDRVLACFGPLGGGRASTSSESDSNAADHEALSHLLTVPSTELFSEGALTPASGSLPQSPLLTPRTSHAESQLTKHRAFADLESSQQIESLVAIARGVEGVKSSEYNSLEDLSSYLEDLNAVIDTRKVDALVVETFGRRIAKLLQEKFMQLCVQIDDTGGAAEQQQLLLQHLHPIDEEGPTTTESGGGTTASSRATLSGNRFKDRTSIEDFEIIKPISRGAFGRVFLAKKRVTGDLFAIKVLRKADMIRKNAVESILAERDILISARNPFVVRFFYSFTCRENLYLVMEYLNGGDLYSLLRNLGCLDEDMARTYIAELLQWKQVLALEYLHSMNVIHRDLKPDNLLISRDGHIKLTDFGLSKVGLINSTDDLSGPDVSCALVGEHQPADAEQREQKRRQRQKQAAVGTPDYLAPEILLGMAHGSSSSLVACCILNDGPTADWWSVGVILFELLVGIPPFNAEHPQIIFDNIMNREIPWPHVPEELSSEAYDLIDRLLMENPVQRLGATGAGEVKAHPFFKDINWDMLARQKVAFIPSTDDEYDTSYFACRHAWSGAGEHGGAAGSDYDDRSEASSMSCGSSPRSDYEEDVGGVTCIIHPR

SEQ ID NO: 57318 - protein, 178 aa, Zea mays
  Coding DNA Sequence Number=SeqID_15539
MAQGLAPRRGDQDVARALAEPPASRRTEGTRGGDRGHRETGEKGEGLREHDEKRRRKTKNNGGCSPEKETSPELRRKPSIDVKSEIGSTNRNHQDEALNETNAVVLLDFANDARIESNCSLELSSELELLRTSGVIRLMRVLLLPHSFPNSSHRPRKGGHRGSGSTGGGPTERGDGSA

SEQ ID NO: 57319 - protein, 161 aa, Zea mays
  Coding DNA Sequence Number=SeqID_15540
  Gene Ontology: Mol. function=carboxyl- and carbamoyltransferase activity; Cellular component=ornithine carbamoyltransferase complex; Biological process=amino acid metabolic process
  Homolog annotation: Hit_ID=Q8SA97; Match level="QueryCoverage=66%, HitCoverage=20%, E-value=8e-15, Identity=44%"; Hit description =Ornithine carbamoyltransferase
MAPPVDVAGPRPRLGDVEAPPRSRSSLSSEGEVESEPLGRARRRPSAEARAESEPWGRAKRSSSSSGAEPVFEPWVGRSGVRRLPGLSPSLSPGSGGAEFAIFRGLARAEPWVGRSGVSYGRSVERRSDCGHFGSVDWRTCVRIKDLRRRSMVPTVAPSRC

SEQ ID NO: 57320 - protein, 486 aa, Zea mays
  Coding DNA Sequence Number=SeqID_15541
  Gene Ontology: Mol. function=pyruvate kinase activity; Cellular component=coated vesicle membrane; Biological process=glycolysis
  Homolog annotation: Hit_ID=Q2R8U5; Match level="QueryCoverage=99%, HitCoverage=97%, E-value=0.0, Identity=72%"; Hit description =Pyruvate kinase family protein, expressed
  Pfam annotation: Domain name=PK; Domain location=31-392; Score=255.4; E_value=1.2e-73; Accession=PF00224.11; Description=Pyruvate kinase, barrel domain
  Pfam annotation: Domain name=PK_C; Domain location=371-482; Score =29.1; E_value=4.5e-08; Accession=PF02887.6; Description=Pyruvate kinase, alphabeta domain
  Pfam module annotation: Pfam domain module=PK::PK_C; Domain location =31-392::371-482
MQGASHMLLEEPFRLASVLSPAKPKVFPSLTKIVGTLGPNSHSVEIIQECLTAGMSVARFDFSWMDAAYHQETLDNLRKAAQNVKKLCPARVETQQKPQVKVQVMLDTLGPEIQVHNSTGEPIELKAGNHVIITPDICKALSAEILPIKFGDLAKAVKKGDTLFMGQYLFTGSETTSVWLEVVETSGENVNCLVKNAATLDGPIFTLHASQVHINLPTLSEYDKHVISTWGSCNSVDIISLSHTRSAEDVRELRAFLQAHALPDTQIYAKIENSEGLDHFDDILNAADGIIISRGDLGIDLPPENVFMFQKTAIHKCNLEGKPVIITRVVDSMIDNLRPTRAEATDVANAVLDGTDGILLGAETLRGLYPVDAVGSAIKVKAAAIVVFTFSGRAARLVAKYRPTMPILAVIFPREGSDPSKWRSYGTTQARQCFAVRGVYPLMGSTDEAETGGLTKEEYGIKLAMSYGRSVGIVKSFRQVDIFERL

SEQ ID NO: 57321 - protein, 121 aa, Zea mays
  Coding DNA Sequence Number=SeqID_15542
MGKGKRGHGSPRHAGNKRKRDPSPPSEDFGDSKYSEEEVSSEFEGSLALASPPASSDDSDNSQGIATEERSDDDSDDEGDIDDGGREGGDDDGGRGGEGDVGGKGGSGSGGGKASGKAPLV

SEQ ID NO: 57322 - protein, 84 aa, Zea mays
  Coding DNA Sequence Number=SeqID_15543
MEINGAELIPYLRRNFGDDRECRGGPPWSECPQRSMVHGTSATILDGFPDTVRAPGILAKTIMVLAADSQPQFKPEPPAIAAIC

SEQ ID NO: 57323 - protein, 84 aa, Zea mays
  Coding DNA Sequence Number=SeqID_15544
MEINGAELIPYLRRNFGDDRECRGGPPWSECPQRSMVHGTSATILDGFPDTVRAPGILAKTIMVLAVDSQPQFKPEPPALAAIC

SEQ ID NO: 57324 - protein, 158 aa, Zea mays
  Coding DNA Sequence Number=SeqID_15545
MESPPLTAEAIAFTEKKMDMTLEDIIKMSKKKNPGGKNPPRQPIKKRPFQNANTNKGNGKVQRFMESRSTIRQGVLAQRRSNLGGSQFAATKQAAKKAAAMPMRSGAVYWKKPSHVFISINCYGQGSDAIAGQLYASKEYILLLPPIKVGCIHNSILS

SEQ ID NO: 57325 - protein, 105 aa, Zea mays
  Coding DNA Sequence Number=SeqID_15546
MCKYLSAEELLEAICNQRKGREAQVKRFSADEQGKQTDNSSCLVQTGSSSRSRNWMMNRIREGEIKGGEEIGRRGPGREMRGWSGGLPGGGGGRWQFVRVAARNR

SEQ ID NO: 57326 - protein, 68 aa, Zea mays
  Coding DNA Sequence Number=SeqID_15547
MRVPLGVRSDTKHRQLAHSKGEVGKKKGRKLCPGPHASRPLYDIPSWAKQMGIVEAGRPKSVMGPHPS

SEQ ID NO: 57327 - protein, 220 aa, Zea mays
  Coding DNA Sequence Number=SeqID_15548
  Gene Ontology: Mol. function=carboxyl- and carbamoyltransferase activity; Cellular component=ornithine carbamoyltransferase complex; Biological process=amino acid metabolic process
  Homolog annotation: Hit_ID=Q6QP54; Match level="QueryCoverage=27%, HitCoverage=21%, E-value=3e-12, Identity=63%"; Hit description =Putative kinase
MALPVDVAGLCPRLGDVEAPPKSRSSLSFMAEAESEPLGRARRRSSAEARAVSEPWGRVKRSSSSSGPEPESEPWVGRSRVRRLPSLSPSPSPGSGGAEFAVFRALARVRALGRAERSSPSSGAEPESEPWVGRRFLRRLWQGLASFVVKCSCDSLYADGGYQLRIRRLEGTPNYGPRHHPIKLSYLTKDQASPSISKEYITFRDKSRDVELKDGVRRLR

SEQ ID NO: 57328 - protein, 136 aa, Zea mays
  Coding DNA Sequence Number=SeqID_15549
  Subcellular localization annotation: CTP_CleavageSite=42; ConfidenceScore=5.49e-01
MAVRPRLAGAARSRGCGAARLWSPPGAASPARRAARRGRGVPARARRPAPAFPARGARPRPLRGLARPRSPDPGVASACARSPGAARARTVPPASSPHPWLATMAARSRSPWRVPPLRSAAPARRGFGSHGRGAPA

SEQ ID NO: 57329 - protein, 261 aa, Zea mays
  Coding DNA Sequence Number=SeqID_15550
  Gene Ontology: Mol. function=catalytic activity; Cellular component =endoplasmic reticulum; Biological process=metabolic process
  Homolog annotation: Hit_ID=Q69UX2; Match level="QueryCoverage=99%, HitCoverage=94%, E-value=1e-92, Identity=62%"; Hit description=Acid phosphatase-like
  Pfam annotation: Domain name=Sterol_desat; Domain location=7-221; Score=77.1; E_value=5.3e-20; Accession=PF01598.8; Description=Sterol desaturase
MEFLSDEALAIFVPILVYWVYSGMYMALGQSMDRYRLHPRKEEDSKNLVSKREVVKGVLLQQLVQAGVAAVVFTLTGDSSSSAASYDKEAAQGYFYYLTVARQFGVAMVVLDGWQYAWHRYMHLNRFLYRHIHSWHHRLVVPYAFGSQYNHPVEGLLLDTLGGALAFVVSGMSPRASIFFFSLCTAKGVDDHCGLWLPAGNLFHLFFWNNTAYHDVHHQLRGSRFNFSQPFFVTWDKLFGTHMPYVLEERPGGGLQARPLC

SEQ ID NO: 57330 - protein, 46 aa, Zea mays
  Coding DNA Sequence Number=SeqID_15551
MDIAYVELIVHNLETTGQSKDGGNKSFDVPSAQEKVKEAEGVGDDR

SEQ ID NO: 57331 - protein, 222 aa, Zea mays
  Coding DNA Sequence Number=SeqID_15552
MKKLRLWLNFSAAQQCNGNECCGVKVNRQVVRNPLNSYSHPLNGGPLGVWEVNHQIARIYRMVNSIPVLFTLACIRSCVTFGLLPSVKPKVLIYIKVHIITHAISHVSYVSSFINTYCDDEGFCFGMGCTLELGPGANVWTETLGVGRPKAAQSLKAAGWAQNWIAKTVFSRNKTVTVKTNEKSVKPFSIPFPNTIYLFSFRNRKIPEVNENGRKNGIRNGT

SEQ ID NO: 57332 - protein, 89 aa, Zea mays
  Coding DNA Sequence Number=SeqID_15553
MEEVVLTRTDATGEEVEVVSYTWSTVQLYLGCTCPDGMGPATLNSQSQSCAGDQSFALLQVGKEERSERQGRRQTCPYRWKAGRRYLLI

SEQ ID NO: 57333 - protein, 274 aa, Zea mays
  Coding DNA Sequence Number=SeqID_15554
MALSGFHNGDFKTVCLPACLPDLGTAVPAECKSGLGHDLGYTFPSPELGFGLDICNGKTSDVIVRDRALVPDLVSAEIGCLHQAKVNNKYKTHASGHAVYGGSTTPPHRTIGSSASPDPGLGLGLSPGRRRTPLRPTQGSDSGSALEDDELRSARPRARTRAQPRKTVNSAPPDPGLGLGLSPGRRRTPLRLTQGSDLGSAPEDDKLRSARPRARTWAQPRKTTNSASPDPRARTQPWPQPTVSASPDPGARTRPRPRKTDSTSTSEEPPHRLT

SEQ ID NO: 57334 - protein, 57 aa, Zea mays
  Coding DNA Sequence Number=SeqID_15555
MAEPGIVVVSTMSESFGSMSWFLEQAQQQPFVFPQFQSSMPWWGLHAPSPPPQNPNQ

SEQ ID NO: 57335 - protein, 115 aa, Zea mays
  Coding DNA Sequence Number=SeqID_15556
MGEAGGQALVRDWERERENVAVAGHHGGDDRLQEQQGETTTGYRKGTEHVWEGSWALRPSAERGRGWDADLLQKRTREPPWGRLQPGRAPERWLASREMREGDGRERKGNSLAEH

SEQ ID NO: 57336 - protein, 49 aa, Zea mays
  Coding DNA Sequence Number=SeqID_15557
MGVWSAAAGHATRAETQPGVGANGHAGGVHAGRCEGAPPRGAYRIVDHL

SEQ ID NO: 57337 - protein, 158 aa, Zea mays
  Coding DNA Sequence Number=SeqID_15558
MDSMRLPESLSCTLSHRSRQPLCKFERFCGVSLEACLGGEGAHGNVRGEVLDEGTLSGRGSEHWGEASDARKRGRGGRSWRVWVDRERGAQSAVARHLSGRGWGGIMRRGWWFWRGRGPGWHLVSAVRMGVGKQAEVDLADVPRSQSLGGYYGWMGGH

SEQ ID NO: 57338 - protein, 89 aa, Zea mays
  Coding DNA Sequence Number=SeqID_15559
MDSFVLTRGALYEVFLSEGANYWIYTVREILIVWTRLGWPDVIRTIPAVQFGKVFMVMVATHASYPFYLLRMSYVLLLAVMPVVWLQDL

SEQ ID NO: 57339 - protein, 62 aa, Zea mays
  Coding DNA Sequence Number=SeqID_15560
MACPGNGWSGLATVAEALAAMAGGNTLAGAKERWLAGEEIWSQEIWSVSLPKPEANPKFCRV

SEQ ID NO: 57340 - protein, 116 aa, Zea mays
  Coding DNA Sequence Number=SeqID_15561
MRREADRQFASQTGQLTQRQVELVFTREFKRENPGSTGPEAGSTSFDQRVSQLKLSSTQLKSKLNSDEFKFNSGEVKFNPAKEKINLAKVKFNPAEEKLNSAEVKAQLSRSQVHVS

SEQ ID NO: 57341 - protein, 125 aa, Zea mays
  Coding DNA Sequence Number=SeqID_15562
MGKGTKRKHEPTPPSDDFDDSQGIAAEVWTYVRAVERSGLEGSDESEFSSDEEDSDGGEDEDDDDDDGDDDDGGDGDGDGSNGGGGSGGKGSTRGGSSTGSTRGGSSKGSTKGGGGKGSGSKASG

SEQ ID NO: 57342 - protein, 44 aa, Zea mays
  Coding DNA Sequence Number=SeqID_15563
MATRTIDNKHTNAVRKPIRTKVLTQFEGFYPNRSLFTVTVAQRL

SEQ ID NO: 57343 - protein, 160 aa, Zea mays
  Coding DNA Sequence Number=SeqID_15564
MEGVPGLWRARTYGGEGSWSHSRDLLTRNRIFLLMKIQQKLFLMLLELELFFSQQGFPSRLNDIARETLELSLESAIEGQSDMYICEVHSGVAKKCVGANHCDENQRQCSLRGRGQSVTIGRTVRDLAQGLVFLPNESDGLRLVVGRSARARAVEFTGSA

SEQ ID NO: 57344 - protein, 613 aa, Zea mays
  Coding DNA Sequence Number=SeqID_15565
  Gene Ontology: Mol. function=structural molecule activity; Cellular component=clathrin coat of trans-Golgi network vesicle; Biological process=intracellular protein transport
  Homolog annotation: Hit_ID=Q10SS6; Match level="QueryCoverage=92%, HitCoverage=54%, E-value=0.0, Identity=78%"; Hit description=Adaptin N terminal region family protein, expressed
  Pfam annotation: Domain name=Alpha_adaptinC2; Domain location=345 -454; Score=8.2; E_value=0.00056; Accession=PF02883.10; Description =Adaptin C-terminal domain
  Pfam annotation: Domain name=Alpha_adaptin_C; Domain location=460 -582; Score=-0.3; E_value=1.3e-05; Accession=PF02296.7; Description =Alpha adaptin AP2, C-terminal domain
  Pfam module annotation: Pfam domain module=Alpha_adaptinC2::Alpha _adaptin_C; Domain location=345-454::460-582
YVDVILQLIDKAGDFVSDDIWYRVVQFVTNNEDLQSYAAAKAREYLDKPALHETMVKVSAYLLGEYGHLLARRPGCSPKELFAIINDKLPTVSTSTVAILLSTYAKILIHTQPPDVGLQQQILTIFKKYESYIDVEIQQRAVEYFELSRKGPALADVLAEMPKFPERESALLKKAEDAEIDTAEQSAIKLRSQQQTSSALVVADHSPANGSAPPANHLTLVKMPSQIVSDTQESGVIHEEVPNPPVEAPKENGTPVEVESRDTNITGINNEVKTEPPSTSHSTSPADLLADLLGPLAIEGPPAVEQNPTQGLNSNQSPVGDLALATLDDQSNSVQPIVNVEEKFHILCTKDSGVLYEDPHIQIGMKAEWRAHHGRLVLFLGNKNTSALTSVRVLILPPSHLKMELSSVPDTIPPRAQVQVPLEVANLRASRDVAVLDLSYTFGTSLVDGKLRLPVVLNKFLQPITLTPEEFFLQWKALTVHLLKVQEVVKGVKPMPLSEMANLFMSLHLAVAPGLDNNPNNLVACTTFFSEATRAMLCLIRLETDPQDRTQLRLTVASGDQHLTFELKEFVKEHLIDIPRTQAAPPMAMVQPQLLTAAPATYNDPGAMLAGLL

SEQ ID NO: 57345 - protein, 2043 aa, Zea mays
  Coding DNA Sequence Number=SeqID_15566
  Gene Ontology: Mol. function=zinc ion binding; Cellular component =nucleus; Biological process=homophilic cell adhesion
  Homolog annotation: Hit_ID=Q7XCX5; Match level="QueryCoverage=99%, HitCoverage=78%, E-value=0.0, Identity=40%"; Hit description=Plus-3 domain containing protein, expressed
  Pfam annotation: Domain name=GYF; Domain location=613-666; Score =34.6; E_value=3.3e-07; Accession=PF02213.6; Description=GYF domain
  Pfam annotation: Domain name=Plus-3; Domain location=325-431; Score =150.6; E_value=4e-42; Accession=PF03126.8; Description=Plus-3 domain
  Pfam annotation: Domain name=SWIB; Domain location=187-262; Score =83.0; E_value=9.1e-22; Accession=PF02201.9; Description=SWIBMDM2 domain
  Pfam module annotation: Pfam domain module=GYF::Plus-3::SWIB; Domain location=613-666::325-431::187-262
MGKFFSVRGTKGFCDTCYGTILLIESKDESAIKVDFDDILSWEYLFKLYWLDLKGKLSLTLEELTIAKTRWNVPSTSARKEKDESSDDLYDANNDDDAGTDCSSGKRRRTNSRKKGQKCRKVNKDCSVPAKKVELPITNTESVPTEVTNERVPLPVDTKVPNGWVPLPVDTKVPNESVPLPANTKWASPELLEFVGHMRDGDQSFISQFDVQTLLLDYIKKNNLRDPQRKSQIICDLRLHRLFRKARVAHFEMLKLLEMHFLMNETSTVTDSRQVTIDLNSAYVDTNGYNDMAAKFSPDKRRKIHRKMERDTQVNLEDYAAIDMHNINLIFMRRSLMEDLVDDAKFSDKIHGGFVRIKISDVYQKQDIYRLVKVTGTHKVPEKYSIGKKMTNFALEILNLNKKEIITMDTISNHDFTEEECKRLRQSMKCGVISRLKVGDILEKAKILQSVKVNDWFENEKQRLGHLRDRASETGRRKEYPIRPYYDVLLNDSEERTRRINEVLEVHVDSHMDPNYESAEETDEKRTVGKSVDRTRPDTTISRRISRYLSTMQNHPQKVSDCSHHPKNLSTESTICGSGARSLENSTANRTMYEAGSFSSSGVTMSNDTEPEKVWHYKDPSGNVQGPFTLLQLSKWTSYFPRDLRVWLTFESEERSLLLTEVLSKQQKDFTQAASHTSSKATLVGTGHTRNNPSVDQTNAFSPAGHSVVSSSGITVQYNKYSVPERESVYSPDDSLSLSTSSVPPKDACTVNSQTHCQNKHSVFIQSPGSAYGHTDLNHDGIQGGCSGESNHHHSSGALWSPTVVQVSCGHGNVESHQSQHVSWSQSQHESKNSSQRPVKDLNSRRDLSKNLPTQRIGKDVSSPLFACAWSPAESRTASSQHDGSCLSSTTNPNFLDELHYSIASAKPKSCAPATPIEDRGSSSPSGMLSHAERVPICSPQSTPLASAFDMCKMEEIMNQQRTLEPDTSNASINQSPESKIFPVSSPDNHDIDREFPSPVPRSENKDIAVDSSGLTPASPENITTNLPGSDTCKMEVMSQQQVTEAVVSNSSDNHSPQSKVSPVSSPNNEDMKHQYPSSTRRSENKIPAVDNLLSTSAARENLTTTSAHDSDTCKMVELVNQPKTPEVDASNAPLCQSPHSHTSQVPSDNQDIERECPGPTPRSDSKEPLVNNSATTSASASDTIKMEEFVNQQKTVEADASNAPLNQSHSHIFPVPSDSQDIEHECPGPTPRSDTKEPLLNNSVLTLAASEILTTTSAASDTCKMEDSVNQQKTLEADALNAPLNHHPHSHVLPVSFDNQDIQHEYPSPTPKSDSKEPLVDNSVLTSVGPEMLATTSVSDTCKTEEFVNQQKAVEADASNASLNQPHISAVPSDKQDIECECSSPTPRSDCKEPLMDNSVLTSAVPEILATSSASDKCKMEEFVNQQRPIEVDASNASLNQYSRCHIFNVSSDNQYVERECSSTTPRSDCEEPLMDNSILTSAVPEILATSSASASDKCKMEEFVNQQRPIEADASNASLNQPHRCHIFTVSSDNQDIECECPSPTSRSDSKESLVDNLVLTSAVPENLPTSFAVASDSCKMEILNKKRTLEADASNASLDQPSHSSVFTSSSNDNQGNACERPSPNPRPEGEQPLMDNSGLTSPVPQNLTSASDICKMGEILNENRTLEANPSNGSITQSHQSKVFLVPSIDILERECSSETPRPQFKEPVVDSSGLTSAAPESLTAKQHVHSPDAFIPPKHGAPTGELGDAKSDFKGEEIIQKEQYCEREPIVATRENLLIDLSCGAESIDVSDVLESLMEERSVTSYVPVSIEDFLAASAVEEPQYSSPIALSPWGEPSYYQGDAGDSALWGIQDSINDMWSLLSPRPMLQASSGIGTEGKETFDINEVAVTHVNSDFFQRGSMLGEENMNQANLSVAADRMLLPEQVPSIPNGMSTSSVDEGTRVIGSQASINQSLDWGTTWRTSQNLSVYSNEIAGPSSKSYWEESRKQEATNSGVSISGEAIRNKRLNPPDNAIRGSHHHRGSLYRLIKIKSTERK

SEQ ID NO: 57346 - protein, 679 aa, Zea mays
  Coding DNA Sequence Number=SeqID_15567
  Homolog annotation: Hit_ID=Q10SS1; Match level="QueryCoverage=99%, HitCoverage=98%, E-value=0.0, Identity=54%"; Hit description =Expressed protein
  Pfam annotation: Domain name=DUF726; Domain location=324-665; Score =220.7; E_value=3.3e-63; Accession=PF05277.3; Description=Protein of unknown function (DUF726)
MATTLTPTQRYAAGTLLALALRQAQIHQSEPLGSGPDDEERASSASGSSSSTISSTGSDTTSGAGLWTHDSRGLLRPVFRFLGDRAQGMGGDGGDGRVAGRRQASHRCGTALPSLPPDRVICVHLLSQQLGEGLDSKYPIVSFHSLVSQFISILFEEDGESSSDRLEQEIALAKAVDVMVMSLGSDTAPDENIKDEFKYSTACTYATLESTEAGSSENLLGIVKLSLENVPVNEHRKMVLLYALLSACIADKPVSQEEEDRKSSHFRKGYDARHRVALRLIAAWLDVKWIKMEAMEVMVACSAMAAAKEQEQERENASPRSKWEKWKRGGIIGAAALTGGALLAITGGLAAPAIAAGFGALAPTLGTLVPFIGASGFAAMAAAAGSVAGSVAVAASFGAAGAGLTGTKMARRIGKVKEFEFKPIGDNHNQGRLAVGILVSGFAFDEEDFWKPWEGWKDNLEKYGMYILQWESKHIIAVSTAIQDWLTSRLAMELMKQGAMRTVLSGLLAAFAWPATLLAATDFIDSKWSVAIDSVPNSLFSELMNCILSDQIRQEKCLQKCFLRDCKETEGLVERVVLLGAPVSVKGERWEPARKMVAGRFVNVYSRDDWILGVTFRASLLTQGLAGIQAIDVPGVENVDVTGLVDGHSSYLSAAQQILEHLELNTYYPVFVPLPEVNK

SEQ ID NO: 57347 - protein, 153 aa, Zea mays
  Coding DNA Sequence Number=SeqID_15568
  Homolog annotation: Hit_ID=Q5N7G7; Match level="QueryCoverage=29%, HitCoverage=23%, E-value=3e-10, Identity=68%"; Hit description =Prolyl 4-hydroxylase alpha subunit-like
  Pfam annotation: Domain name=DUF584; Domain location=27-152; Score =93.6; E_value=5.9e-25; Accession=PF04520.4; Description=Protein of unknown function, DUF584
MAMPRAPGAGSLRFLGLLKQPESDAAAPFELDERDVLWPDGRGAAGRFGLSSLLAEDCGGGVPVPVPGRAMAMAPSAAPRQSAPVRVPAPWPGGRRADEDEEDGEEVVPPHVVAARRHARSSSVLEGAGRTLKGRDLRSVRNAVLRQTGFLDL

SEQ ID NO: 57348 - protein, 68 aa, Zea mays
  Coding DNA Sequence Number=SeqID_15569
  Subcellular localization annotation: CTP_CleavageSite=32; ConfidenceScore=5.02e-01
MATNLVSLILSPASPAIASSVLPIHWVVYGMQCFSTKALLMKGLSVGLCLLADEFDFQPFLEETEYYQ

SEQ ID NO: 57349 - protein, 125 aa, Zea mays
  Coding DNA Sequence Number=SeqID_15570
MASIGQVFDLRIGRNLDAGDLEARVERLTMELHHGSREHASDIRRVAEFPAEVDHLQWEIAELLHPSVPPDIAAMGARTSGAAGRGPYGELDLFGAPPSMNIADDRSPKTSSGAGAAMDADNLIR

SEQ ID NO: 57350 - protein, 49 aa, Zea mays
  Coding DNA Sequence Number=SeqID_15571
MAEDDLRVKQLAKKLQQNIRAAKEQVLKTKILSESDNDECRSYSRRTTV

SEQ ID NO: 57351 - protein, 207 aa, Zea mays
  Coding DNA Sequence Number=SeqID_15572
MRHNRGRAEPQPHLDAMATTARNAQGPDVRFFTDIEFSLPYPSSTSSPSSLSLPLAHVGVRGASPESTPSRSEFAHVVAVRLAVGGDSPEQRPARRRASLSCLVGDVSEPVKPRRSLTIEPSLLVDIHPCRNENTRPAILAPRELTGGPLPSALSPLNNFTGMLGGKITGRLGAEPRGSLKVSLTTTRLSMCAVASRWGPQVGIVLI

SEQ ID NO: 57352 - protein, 70 aa, Zea mays
  Coding DNA Sequence Number=SeqID_15573
MSRAFDDYYIKDCGVISALEVTQRMTDNNDHSPLSGGLKLFPEYLSVRTCSLSDHPDNSTTLRVEWDALS

SEQ ID NO: 57353 - protein, 79 aa, Zea mays
  Coding DNA Sequence Number=SeqID_15574
MTEWPAPTNISGSNEAGDHILWDGTHISMMNPYTHEKVTVGAAGVYTGQSGRHTGQSGGLSPPVLPGISHWATVPECTR

SEQ ID NO: 57354 - protein, 139 aa, Zea mays
  Coding DNA Sequence Number=SeqID_15575
MELTIVTQKVIKDKRTGKQGILSGPGRRAGHAQGCRAARTQNKEVAGTGPWPDHGQPASLRRDALTSGEGTRGEGRRCRACWWPGLSAQGIGCGAAPPHARKQTMGRGNRGYGPSARMPGMEWHDESATPNEEEGKIEG

SEQ ID NO: 57355 - protein, 314 aa, Zea mays
  Coding DNA Sequence Number=SeqID_15576
  Homolog annotation: Hit_ID=Q8LKW9; Match level="QueryCoverage=39%, HitCoverage=57%, E-value=4e-16, Identity=42%"; Hit description=DRE binding factor 1
MNARNTPVSLCVLTTCHLSVHVAYDQAAYRRRGDAARLNFPDDAASRATLDPVVNAKLEAISATIATAAASSSKNAARAKSKAVPINAPILEAVASPSSSSSSDEGSGSDDEMSMSSPSPTPVVAELGQLDFGEVPWDEAENFVDWPPCPAVADEASLISLYRQKCRWLKGGCSYDGRPRRRSQPWCSAAPHPASGRTSPRIPPAAASRPRPSFNGAPINARDHQSTPRPTLDLPSTGHPVRGHIHPTAFHQCRILPAHARQNLLCGHIRLEILHMGATRTAPAHSSGRVRRWMSRQMALPMHYPNRKQGEGPA

SEQ ID NO: 57356 - protein, 183 aa, Zea mays
  Coding DNA Sequence Number=SeqID_15577
MDLNSKGIPSPFYIICIALCSQYCDCHSLVFIISSEFEFQDKEHQHVEEVDQKSSSKHVEISAHDMNSSRNPVKAIMQEMINICLDNKDMEASDGSKLGINGPGIILSKHNDECGGGAQEAESMENTPTTQLMMHQDQLCSNFCILHIIHHCEQMLGITTDITPDLINHAGLIVSRLNVPKEL

SEQ ID NO: 57357 - protein, 120 aa, Zea mays
  Coding DNA Sequence Number=SeqID_15578
  Gene Ontology: Mol. function=amino-acid N-acetyltransferase activity; Cellular component=cytoplasm; Biological process=amino acid biosynthetic process
  Homolog annotation: Hit_ID=Q84JF4; Match level="QueryCoverage=49%, HitCoverage=9%, E-value=2e-18, Identity=73%"; Hit description =Putative amino acid acetyltransferase
MVIPDDYVEKKALSLGLEKLFLLTTRTADWFVRRGFKECSFDSLPLVRRKRIDLSRGSKYYMKWLQAAEVEEYLEEEDIKHEFSAPYTPQQNGVMERMNRTLIDMAKTLFRECKTSEQFW

SEQ ID NO: 57358 - protein, 554 aa, Zea mays
  Coding DNA Sequence Number=SeqID_15579
  Gene Ontology: Mol. function=amino-acid N-acetyltransferase activity; Cellular component=cytoplasm; Biological process=amino acid biosynthetic process
  Homolog annotation: Hit_ID=O81008; Match level="QueryCoverage=74%, HitCoverage=68%, E-value=1e-147, Identity=63%"; Hit description =Putative amino acid acetyltransferase
  Pfam annotation: Domain name=AA_kinase; Domain location=1-224; Score=- 33.8; E_value=0.0029; Accession=PF00696.18; Description=Amino acid kinase family
MEEDVMTIGCQDISLLHGLGIKFVLVPGTHVQIDKLLAERGKKAKYAGRYRITDSDSLDAAMEAAGRIRLTIEAKLSPGPPMLNLRRHGVNGRWHEISDNVASGNFLGAKRRGVVGGIDYGFTGEVKKIDVSRIRERLDRDSIVVVSNMGYSSAGEVLNCNTYEVATACALSIEADKLICIVDGQIFDEHGRVNRFMSIEEADMLIRTRAKQSEIAANYVKVVDEEDINHVRCLPMKHGTEHGMNGRDHINGYTASFRNGVGFNDGNGLSGEQGFAIGGEERLSRSNGYLSELAAAAYVCHGGVQRVHIIDGTVGGALLLELFTRDGVGTMIARDMYEGTRMAREEDLSGIRKIIRPLEESGVLLLEALTSFIVVERDGSIIACAALFPFLEDKSGEVAAIAVSEECRGQGQGDKLLVTTGAPQTMRLEQKPTVGIPPQSQRRESASVVSLGSPVRETDGNARVCAGQGGHTRGRVEEVKTDPARKATTTTNPEVATTVNPAGKAATAPNPMKVTKKGERRWGGSSRTGACVEPGRGFDGEDKRCLKVGCHTWF

SEQ ID NO: 57359 - protein, 231 aa, Zea mays
  Coding DNA Sequence Number=SeqID_15580
  Homolog annotation: Hit_ID=Q69II6; Match level="QueryCoverage=36%, HitCoverage=14%, E-value=8e-07, Identity=39%"; Hit description =Putative beta-glucuronidase
  Subcellular localization annotation: CTP_CleavageSite=48; ConfidenceScore=5.10e-01
MAAGLPLKMVGFCVVWALFWLAGSATVSTSTTAFAGGEAVVVDSRSVVAVTDDDFVCATLDWWPPEKRKTGPATYRASSGLVTLRSTADCDAEAVPVSGLRCKGGGSAETTVAVLDSAGDGAHHGRWRWRLRYQVEIESKSRVMSRRDGEKTDGRRRFEGKCGQQNERSRLMGGRTVGRQNQRRQTTLRLLISSRDFIDNYNIEQRKHRRQESGKSCGKLQTGNSKDNNIV

SEQ ID NO: 57360 - protein, 630 aa, Zea mays
  Coding DNA Sequence Number=SeqID_15581
  Gene Ontology: Mol. function=glucose-6-phosphate 1-dehydrogenase activity; Cellular component=cellular_component; Biological process =glucose metabolic process
  Homolog annotation: Hit_ID=Q6K5H5; Match level="QueryCoverage=69%, HitCoverage=95%, E-value=0.0, Identity=90%"; Hit description =Putative glucose-6-phosphate dehydrogenase
  Pfam annotation: Domain name=G6PD_C; Domain location=389-619; Score =430.6; E_value=2.1e-126; Accession=PF02781.6; Description=Glucose-6 -phosphate dehydrogenase, C-terminal domain
  Pfam annotation: Domain name=G6PD_N; Domain location=205-387; Score =322.3; E_value=8.5e-94; Accession=PF00479.12; Description=Glucose-6 -phosphate dehydrogenase, NAD bindi
  Pfam module annotation: Pfam domain module=G6PD_C::G6PD_N; Domain location=389-619::205-387
  Subcellular localization annotation: CTP_CleavageSite=27; ConfidenceScore=5.10e-01
MGREKISSLQLYLVVVGGAAAFLSDVRGSTGTRSGLRVPVRRDRGPKVPARYGAGREVVGGHQTRAVGLGISRVMECGRLVDKEANASTSKRVRGWDNTAWLVDGSRLGVGRSGQQKAGRKDWRVETEAAGGRRDSAAEPHINCVINSTFSAFVGIYLREEETIQFIMSGGSSESSPLSGQNSLSSLSISKDNELSSESGCLSIVVLGASGDLAKKKTFPALFHLFQQGFLQSGEVHIFGYARSNLSDDGLRERIRGYLKGASDEHLSQFLQLVKYVSGSYDRVEGFELLNKAISEYETSKNNDSGSYRRLFYLALPPSVYPSVCKMIRSYCMSPSSHTGWTRVIVEKPFGKDLNTAEELSAELGQLFQEEQLYRIDHYLGKELVQNLLVLRFANRLFLPLWNRDNIANVQIVFKEDFGTEGRGGYFDQYGIIRDIIQNHLLQVFCLVAMEKPVSLKPEHIRDEKVKVLQSVEPIKHEEVVIGQYDGYKDDPTVPDDSNTPTFASVVLRVHNERWEGVPFILKAGKALNSRKAEIRVQFKDAPGDIFRCKKQGRNEFVIRLQPSEAMYMKLTAAWEIFTPLLHDIDGGKLRSVPYKPGTRGPQEADELSRRMGYVQTHGYVWVPPTLSKV

SEQ ID NO: 57361 - protein, 63 aa, Zea mays
  Coding DNA Sequence Number=SeqID_15582
MASMTISLGTVGACALRRIFGLVSEREKLKKIRKLTQRRSCEAGKAFGMFAEKGTDLKMKRPI

SEQ ID NO: 57362 - protein, 415 aa, Zea mays
  Coding DNA Sequence Number=SeqID_15583
  Gene Ontology: Mol. function=glyceraldehyde-3-phosphate dehydrogenase (phosphorylating) activity; Cellular component=cytoplasm; Biological process=glucose metabolic process
  Homolog annotation: Hit_ID=Q43247; Match level="QueryCoverage=89%, HitCoverage=99%, E-value=1e-175, Identity=86%"; Hit description =Glyceraldehyde-3-phosphate dehydrogenase, cytosolic 3
  Pfam annotation: Domain name=DapB_N; Domain location=44-103; Score= -29.5; E_value=0.012; Accession=PF01113.11; Description =Dihydrodipicolinate reductase, N-terminus
  Pfam annotation: Domain name=Gp_dh_C; Domain location=237-394; Score =383.7; E_value=2.9e-112; Accession=PF02800.10; Description =Glyceraldehyde 3-phosphate dehydrogen
  Pfam annotation: Domain name=Gp_dh_N; Domain location=44-232; Score =257.9; E_value=2e-74; Accession=PF00044.14; Description =Glyceraldehyde 3-phosphate dehydrogen
  Pfam module annotation: Pfam domain module=DapB_N::Gp_dh_C::Gp_dh_N; Domain location=44-103::237-394::44-232
MGNAVIPAIWLCFWILIVGDYFFTDCFFFGLVACVCALVYAAKIKIGINGFGRIGRLVARVALQSDDVELVAVNDPFISTDYMAICLFLRESYVNVVKVQSNLMMWIRFYFIAVDVIVYDETYMFKYDTVHGQWKHHEVKVKDSKTLLFGEKEVAVFGCRNPEEIPWGSVGAEYVVESTGVFTDQEKAAAHLKGGAKKVVISAPSKDAPMFVVGVNEKEYKSDINIVSNASCTTNCLAPLAKVINDKFGIVEGLMTTVHAITATQKTVDGPSSKDWRGGRAASFNIIPSSTGAAKAVGKVLPVLNGKLTGMSFRVPTVDVSVVDLTVRLEKSATYDEIKAAVKAEAEGSLKGILGYVEEDLVSTDFQGDSRSSIFDAKAGIALNGNFVKLVSWYDNEWGYSTRVVDLIRHMNSTN

SEQ ID NO: 57363 - protein, 224 aa, Zea mays
  Coding DNA Sequence Number=SeqID_15584
MRDEEVEDLAGLESSMARKNAEVETSAEEQSSLKEGDAEDPTTMGTSVQVPVSGPSQANFDDNENDESLMCRSVIVLSSDESDDEYDVESWPSEGEGLRPFTEMDDESSEDDLDYFVALDLSFAESPSRFAPTVVVETSPRVASSEPWGLGCQNEVWECLGTRGIILALTAGSCFGEGDLRALFDGEELRLMLFNFHEASLIPNEEPINMICPFVGDLFSNAMN

SEQ ID NO: 57364 - protein, 190 aa, Zea mays
  Coding DNA Sequence Number=SeqID_15585
  Homolog annotation: Hit_ID=Q2QN63; Match level="QueryCoverage=91%, HitCoverage=28%, E-value=5e-54, Identity=59%"; Hit description =Expressed protein
  Pfam annotation: Domain name=DUF1336; Domain location=1-166; Score =122.5; E_value=1.2e-33; Accession=PF07059.3; Description=Protein of unknown function (DUF1336)
MELCLFRVSECYDKEVSEHFKESMMRFFEDETEKVKGFTSESTVSYRDRLKIMVGLVNPDDLQLGSTERKLVQAYNEKPVLSRPQHSFYEINHLPSNLPSLHRQGEDYLEVDLDIHRFSYIARKGLDSFRARLKDDILDLGLTIQAQKQSKLPEQVLCCVRLNKIDFTDQEVPTIVTVDAEVPEVTLLRG

SEQ ID NO: 57365 - protein, 76 aa, Zea mays
  Coding DNA Sequence Number=SeqID_15586
MAWGGRQQGTPRVNRGRGLPADWLTWAAWHIGLEARRSSSGWSWPALQAKHHATAMATAAREMRYGDIKLVRIRIN

SEQ ID NO: 57366 - protein, 250 aa, Zea mays
  Coding DNA Sequence Number=SeqID_15587
MEFGTSRIYSSRMLEMQRLGYFGDGVGMAPGVEDVRELEGELVVYEAFFAASLRLPAHRFVVEVQQNFKIQIHQLMPSAMVALAKGDSADVGDDRGKQVKTRSEEGTSKGKAMVAGVDGDVRWDRGGYDFARALGNIFAHAEGQELSVDDYLVRGVTMFDAQTRLPLIGAEAGRLGVASSKVPAGPGSLEKGDAGTSLDPWLKFCATADGGSEVALAAAADGVAACVAQQLRYVSVNSFLTLANCDIRQL

SEQ ID NO: 57367 - protein, 38 aa, Zea mays
  Coding DNA Sequence Number=SeqID_15588
MAPRAAGLLFCVAHPIRDAVETRGEKPPLFSMFIFQCV

SEQ ID NO: 57368 - protein, 105 aa, Zea mays
  Coding DNA Sequence Number=SeqID_15589
MAAKSTREPPCMQSPTALAPFGTLLGKKWSRAQLAFNELLLRYFYLLLIRILGHRGLGVRFLRHREQSSGPRVDSQRPEGLFNKSASAKGYPLIWTVRSSAYMPD

SEQ ID NO: 57369 - protein, 72 aa, Zea mays
  Coding DNA Sequence Number=SeqID_15590
  Subcellular localization annotation: CTP_CleavageSite=10; ConfidenceScore=5.07e-01
MAAKSTREPPCMQSPTALAPFGGLGVRFLRHREQSSGPRVDSQRPEGLFNKSASAKGYPLIWTVRSSAYVPD

SEQ ID NO: 57370 - protein, 666 aa, Zea mays
  Coding DNA Sequence Number=SeqID_15591
  Gene Ontology: Mol. function=protein kinase activity; Cellular component=integral to membrane; Biological process=protein amino acid phosphorylation
  Homolog annotation: Hit_ID=Q84NJ6; Match level="QueryCoverage=91%, HitCoverage=92%, E-value=1e-172, Identity=57%"; Hit description =Putative receptor kinase
  Pfam annotation: Domain name=LRRNT_2; Domain location=35-73; Score =42.0; E_value=2.1e-09; Accession=PF08263.3; Description=Leucine rich repeat N-terminal domain
  Pfam annotation: Domain name=LRR_1; Domain location=110-132; Score =11.1; E_value=2.3; Accession=PF00560.23; Description=Leucine Rich Repeat
  Pfam annotation: Domain name=LRR_1; Domain location=134-156; Score =10.0; E_value=3.9; Accession=PF00560.23; Description=Leucine Rich Repeat
  Pfam annotation: Domain name=LRR_1; Domain location=158-180; Score =9.1; E_value=5.6; Accession=PF00560.23; Description=Leucine Rich Repeat
  Pfam annotation: Domain name=LRR_1; Domain location=182-204; Score =7.3; E_value=12; Accession=PF00560.23; Description=Leucine Rich Repeat
  Pfam annotation: Domain name=LRR_1; Domain location=205-228; Score =6.0; E_value=21; Accession=PF00560.23; Description=Leucine Rich Repeat
  Pfam annotation: Domain name=LRR_1; Domain location=403-432; Score =0.1; E_value=2.8e+02; Accession=PF00560.23; Description=Leucine Rich Repeat
  Pfam annotation: Domain name=LRR_1; Domain location=85-108; Score =2.6; E_value=92; Accession=PF00560.23; Description=Leucine Rich Repeat
  Pfam annotation: Domain name=Pkinase; Domain location=373-642; Score =14.3; E_value=2.1e-09; Accession=PF00069.15; Description=Protein kinase domain
  Pfam annotation: Domain name=Pkinase_Tyr; Domain location=372-642; Score=-46.9; E_value=1.4e-09; Accession=PF07714.7; Description =Protein tyrosine kinase
  Pfam module annotation: Pfam domain module=LRRNT_2::LRR_1::LRR_1::LRR_ 1::LRR_1::LRR_1::LRR_1::LRR_1::Pkinase::Pkinase_Tyr; Domain location
MARQRRAIGGARAAVPFALLALLASALPGLMAQNLAGDRAALLALRSALDSRGLLPWDTTELSPCGWRGVVCDNQTQAAGPGSRRVVELRLPGKRLVGTIPLGTVGNLTVLQTLSLRRNAITGGIPADIGNCAQLTVVNLTANQFTGAVPEGLFSLAALRQVDLSRNRLVGGVSEEFNRLKQLDTLFLDSNDLAGLLPPGLYLPNLSRFNVSFNAQLIGPVPASLARMPASAFRGTGLCDGPLPACTDSTPPAPPPAASSAGGEKKKHLSRWAIVGIVGGAALVLLLIMALVACFRRRQAAAAAAAGRPAGAAAANVHEATAPVTVTLARTDSDAVKQSHAPPLAPAMISEGKKLVFLGSTPERPYDLETLLRASAEVLAKGPLGTTYRATLDGGEPVLAVKRLREVHLSEDEFCNKATALGALHHHNLTRLRAYFYSKEEKLLVYDFVGAGSLSAVLHDGGAEGRARLDFTARARIALAAARGVAFIHHSGAKSSHGNIKSSNIVVTGTRDGAYVSDYGIAQLTGAAAPPRRGAGYNAPEVNDARSVPQSADVYSFGVVVLELLSGRAPLHALREGADGVNLPRWVRSVVQEEWTSEVFDAGIANEPRVEGEMMRLLQLGMECTEQRPDRRPTMTLVEARIERIVEDACQKADFSSTDGSRSVSA

SEQ ID NO: 57371 - protein, 458 aa, Zea mays
  Coding DNA Sequence Number=SeqID_15592
  Gene Ontology: Mol. function=transferase activity, transferring glycosyl groups; Cellular component=cytoplasm; Biological process =metabolic process
  Homolog annotation: Hit_ID=Q6Z689; Match level="QueryCoverage=97%, HitCoverage=98%, E-value=0.0, Identity=74%"; Hit description =Putative UDP-glycosyltransferase 85A8
  Pfam annotation: Domain name=UDPGT; Domain location=9-452; Score= -29.6; E_value=3.9e-09; Accession=PF00201.9; Description=UDP -glucoronosyl and UDP-glucosyl transferase
MGSNARPHAVLIPYPAQGHVTPLLQLAKVLHSRGFFVTYVNSEYNHRRLLRSRGADSLAGLDDFRFETIPDGLPPSGSDDDVTQDIPALCESLSRSGAAPFRDLLARLNGMPGRPPVTCVVLDNFMSFAQRVASEMGILAVVFCTMSACGFMGYLHFKELMDRGYVPLKDESYLTNGYLDTVLDWVPGMRGIRLRDMPSFIRTTDPDEFMVHFDSGEAQNARRAQGIIVNTFDALEQDVVGALRGVFPRVYTIGPLLTFARDMGPGSVVYVNFGSITVMTPAQLAEFAWGLANCGRPFLWVIRPDLVTGEKAMLPEEFYAETRERGLFLSWCPQEQVLSHPSTGLFLTHSGWNSTLESIRAGVPMICWPFFAEQTTNCRYACANWGIGLEIDNNVTRDEVARLIEEAMDGEKGKDMKAKATVWKEKAVAATESGGTSSVSIDRLVEFLLEGNVPTAAG

SEQ ID NO: 57372 - protein, 149 aa, Zea mays
  Coding DNA Sequence Number=SeqID_15593
MTSISRRPKSTSLYGATSPQRPPAATTSISTGYPIPDGYPVDTGTGPFFYPIGLRDVGTLGLGDAIWILACVLRATRVERQMANKHEAREPGTKPAVWVRSEPGTIRFYAGPGRPGTNKRTGLGQETRYGDLARHGPFTSKLVEPAFLH

SEQ ID NO: 57373 - protein, 97 aa, Zea mays
  Coding DNA Sequence Number=SeqID_15594
MTTPGEKISSWMNSEHYGRSFAHPLAGDVAERPSSRFVVNRHAPVRISAISWRISVIRGGIRCQTKEGPSRCFSGQYEFAGDVLAAVHRRGPGSAKK

SEQ ID NO: 57374 - protein, 269 aa, Zea mays
  Coding DNA Sequence Number=SeqID_15595
  Homolog annotation: Hit_ID=Q3E0G9; Match level="QueryCoverage=36%, HitCoverage=24%, E-value=3e-08, Identity=37%"; Hit description=Ig -like, group 1
MAPCDVVGPSPGSGEAEAPPRPRSNLSSEVEVESEPWVGRGGDRRPRPRLSPSPRLGRGGVRRLPEPRLSPSPGVRRGGVRGLPEPRLSPSPGVGRGGVRRLPEPRLSLSPGVGRGGDRRPRPRLSPSPRVGRGGVRRLPEPKLSPSPGGRARRSPSSEAETGAEPWGRARRSFLWRPRPDLADVSLTLSSGTAVGTTQAALSSCQLCADGGYQLRLGVLGVPLIMVPDTIIGTMEVKKEEKAKAYNVFKDLDNRQIFLSACDDDDELH

SEQ ID NO: 57375 - protein, 111 aa, Zea mays
  Coding DNA Sequence Number=SeqID_15596
MATEAVMRWAAVGYGLRPPEVWQGHQGLRRAMWISSLEASLMELPWGGCWISQPTAVQASVHPTGHYEFVTAVPQLFIVNNASPSVGHQQQQKEVRWNYFHPGQKVEIARS

SEQ ID NO: 57376 - protein, 512 aa, Zea mays
  Coding DNA Sequence Number=SeqID_15597
  Gene Ontology: Mol. function=oxidoreductase activity; Cellular component=integral to membrane; Biological process=electron transport
  Homolog annotation: Hit_ID=Q6ZIH1; Match level="QueryCoverage=92%, HitCoverage=92%, E-value=0.0, Identity=67%"; Hit description =Putative cytochrome P450
  Pfam annotation: Domain name=p450; Domain location=34-501; Score =362.1; E_value=9e-106; Accession=PF00067.12; Description=Cytochrome P450
MDALTYYLYLFLAFLPLLLLKLKRRDNNDGLRLPPSPWSLPVIGSLHHLLVGSPLPHRAMAHISHRLKAPLIYLKLGEVPVVVASSPDAAREILKTHDANFATRPWSPTMKVMMADGEGLAFARYGALWRQLRKISILELLSARRVQSFRGVREEEVGRLVAAIAEYSPRGEAVNLSQRIAELMNDTAVRAMIGDRFERRDEFLENVAEGVKISTGFSLGDLFPSSRLASLVGGTARRAAVNHRKMFKLMDYAIEKHEERRAAMTTDAEGVVKEDLVDVLLRIQKEGGLEVPLTMGMIKAVILDLFGAGSETSASTLQWAMSELVSNPRVMERAQAEVREKLQGKPTVTEDDLVDMRYMKLIIKETLRMHPVVPLLLPRECREPCRVMGYDVPKGTTVFVNVWAISRDPKHWEDAATFRPERFEAAGTVDFKGTDFEYTPFGAGRRMCPGMAFAQASMELVLAALLYHFDWKLPGGMLPSELDMAEEMGITARRKRDLYLHPVVVSVPPHVS

SEQ ID NO: 57377 - protein, 122 aa, Zea mays
  Coding DNA Sequence Number=SeqID_15598
MGDGVHPCATAKSACGPVVAPELGDSPHKWAPGVNDSHPLTCGPGRYGSWTAAVLWASSIGTPASPVDRVPRRLTCRARMSAPLQELCRTVENGNWAEREDLKPFYSGKKLDETPLDQQALK

SEQ ID NO: 57378 - protein, 62 aa, Zea mays
  Coding DNA Sequence Number=SeqID_15599
MVVAVGAEAKKLVNGLPKKQKLQPLPPLPLGVGGLKELCAAVPKTVMCDVASKADFLCHHSD

SEQ ID NO: 57379 - protein, 36 aa, Zea mays
  Coding DNA Sequence Number=SeqID_15600
MTPTACDGAARSEPETHGRLKSKILNSNFVGEFILI

SEQ ID NO: 57380 - protein, 59 aa, Zea mays
  Coding DNA Sequence Number=SeqID_15601
  Subcellular localization annotation: CTP_CleavageSite=38; ConfidenceScore=5.12e-01
MSGNPAYCSVDASAAVDCAALRSRGRRDISQFGALACRVAVLRRERRSGKANTTAWGRG

SEQ ID NO: 57381 - protein, 75 aa, Zea mays
  Coding DNA Sequence Number=SeqID_15602
MCTSLVMAACGCAAGRRVAPVANKDGNLRIGLCIASQKSKREVLPAPFWVHLEEHRLEGFGSLFGLPPRIDCKLG

SEQ ID NO: 57382 - protein, 337 aa, Zea mays
  Coding DNA Sequence Number=SeqID_15603
  Homolog annotation: Hit_ID=Q5ZDA3; Match level="QueryCoverage=87%, HitCoverage=100%, E-value=3e-61, Identity=42%"; Hit description =Membrane protein-like
MGEEDASAGGDPQRLKRIAAAAYDYENDARWAGYWSNVLVPPHLASRPDVVDHFKRKFYQRYIVSFPHPYLPKPPRTVAARLDASLGSIGLDAPHAALSSIRLTLFSALVPGRMICSMKEPVTIFPLSVSIYIPVAAYSSFCRVRSVFNVIKCCCLCLTFLRLYDNQDPGLVVEPMSSMTSTQSSRPAAKSSATPSSENVRARDSVALLPVLCWALDHVARFLRRNFTHSSLYRSRRNIIQTFMYFHLLKLMYHSPVTSGYHQSVWARIGRAVNPYIYRYAPFLNTPISAVQRWWLRRDIRMTRRPDAVSSPKMMPLVEFYPMIEHIQFGNGKITVH

SEQ ID NO: 57383 - protein, 425 aa, Zea mays
  Coding DNA Sequence Number=SeqID_15604
  Gene Ontology: Mol. function=nucleoside-triphosphatase activity; Cellular component=membrane; Biological process=cell division
  Homolog annotation: Hit_ID=Q5ZDA1; Match level="QueryCoverage=98%, HitCoverage=92%, E-value=1e-145, Identity=63%"; Hit description=BCS1 protein-like
  Pfam annotation: Domain name=AAA; Domain location=216-389; Score =24.7; E_value=2.8e-06; Accession=PF00004.19; Description=ATPase family associated with various cellular activities (AAA)
MATYDKAIESYKKAVTTAASLAASAMLVRGVVNELVPYEVRDLLFSGLGYLRSRMSSRHTVVIEETEGWTSNQLYDAARTYLATRINTDMQRLRVSRVDEGKSLMFSMEEGEEMADVHAGAEFRWRLVCRDGAGNGVGNGGGNGHGHGHARGGSYRVEVRSFEMSFHRRHKEKAIASYLPHILAEAKKIKDQDRDAQDLHERGRVLADRQGLETGLPALRPRPGTGKSSLIAAMANYLKFDVYDLELTEVNWNSTLRRLLIGMTNRSILVIEDIDCSLDLQQRADEAQDAGTKSNPSEDKVTLSGLLNFVDGLWSTSGEERIIIFTTNYKERLDPALLRPGRMDMHIHMGYCCPESFRILASNYHSITDHDTYPEIEALITEVMVTPAEVAEVLMRNEDTDVALEGLIQFLNGKKDHAKDDSRQG

SEQ ID NO: 57384 - protein, 124 aa, Zea mays
  Coding DNA Sequence Number=SeqID_15605
MGKNKKGRSSSHHSGDKRKREPSPPRRTLGIAVEVWTYIQAIERSGLEGSDESEISSYEENSSYSSEEGSGGDGDNEGDGGDGGDDGGGGDGDDKGDDDDGKGDGGSGKGDSGSSKASGKAPLA

SEQ ID NO: 57385 - protein, 88 aa, Zea mays
  Coding DNA Sequence Number=SeqID_15606
  Homolog annotation: Hit_ID=Q6KF34; Match level="QueryCoverage=93%, HitCoverage=49%, E-value=2e-32, Identity=89%"; Hit description =ETCHED1 protein precursor
  Subcellular localization annotation: CTP_CleavageSite=67; ConfidenceScore=5.61e-01
MTTTAAGYGCCWAGIPPFALLPRILSTRRETPPPPPPRASLVASSSKLRALAPRLRVSNRPRRLIVSASSSGEANSDAAPSPTIVRVN

SEQ ID NO: 57386 - protein, 219 aa, Zea mays
  Coding DNA Sequence Number=SeqID_15607
  Gene Ontology: Biological process=electron transport
MAMGVMWSLCLLVCSLIGAARSESRALQNAPAPPRVARALSAPSIAHDGRLVACSGKDLLGFEPNGSFAWIVPLGHTCNDSIGPVFQGEQVYLVAEDKVIKVTPRNVHTAKPASEVFFSHNATSSGRSEEIIGLAVSGSYSSLFLTIRNRGLFAFSLRGELQWSAGPALDFFGYRLGCKRNVSGCYFDSAPVVDQCEGVLYVRLDVNWFARWGPLLDFS

SEQ ID NO: 57387 - protein, 995 aa, Zea mays
  Coding DNA Sequence Number=SeqID_15608
  Gene Ontology: Mol. function=microtubule motor activity; Cellular component=microtubule associated complex; Biological process =microtubule-based movement
  Homolog annotation: Hit_ID=UPI0000D56CB9; Match level="QueryCoverage =33%, HitCoverage=47%, E-value=1e-82, Identity=50%"; Hit description =PREDICTED: similar to CG9913-PB, isoform B
  Pfam annotation: Domain name=Kinesin; Domain location=414-733; Score =525.4; E_value=6.3e-155; Accession=PF00225.13; Description=Kinesin motor domain
MDTDDKSQIKSLSFSNHTSMIKLPAANPPRHLEIIKTDITSLSVHEHTWAPLARGRLSTVAAWAGAGPGLRAGENYAADRWSPIPPWDFKLAVRPRPSTDPTVLETSSRYPATRLSPVTLPTTDESLPRTQIKNPEIPASESFLLLSVEELVDVSARWFEHLVWDPRKFVTWNFCPEEGRAVRCWGGAAACDTQIWCEEEMPVVTRSRLSAARGDGAGALPWGSASAAPALRHDAGAPREGVASKNHHHHHGLKEKLRALTQDYEQQKQKLAASQLRRSIRCLNAWEAINDENAEEEEDGGRVAKFRYDAFAQVPESAVLRENVAPPQARAPSNDGAVLARTTEPQAKENAVGRGANAMSCPIKKAVPALPVLPVPPARKLSLGGAVGGKLKAAGEVGAGTAEAAESRILVFVRLRPMSRKEKEAGSRSCVKIVNRKEVFLTESASENDYLRLKRGRDSHFCFDSVFPDSTTQAEVYSTSTADLVEGVLQGRNGTVFCYGATGAGKTYTMLGTMENPGVMVLAINDLFSKVTQKYHSIKLSYLEIYNETVRDLLSPGSPLNLREDKQGIVAAGLTQRSVYSTDEVMELLQKGNKNRTTEPTRVNETSSRSHAVLQVVVEYRSLDGVNVKRAGKLSLIDLAGSERALATDQRTQRSIEGANINRSLLALSSCINALVEGKKHIPYRNSKLTQLLKDSLGGACNTVMIANISPSNLSFGETQNTLHWADRAKEIKTKTQQTTVNEEVLDQPDSETMLVLELQKENRVLREQLAKQQQKLLTAEAQLLASKTSPQRSPAPSSHVSTPGSTQRKTRRSILAAGGGNYFSTLDSKRHAADNAQVRELQRKVSTLESEIEKMKKEHLLQLKRKDEFIRDLINRKDPNNNSEETATVDRRVVTRASVRKAQRDASAAVELKSPSRGVHITGANCKRSVLSWGHSEGNSPFSSCCQRDDKTRSHVATETPKKSILQAASARICTANIDPSKIHMKDCLQLIHY

SEQ ID NO: 57388 - protein, 204 aa, Zea mays
  Coding DNA Sequence Number=SeqID_15609
  Gene Ontology: Cellular component=integral to membrane; Biological process=defense response to bacterium
  Homolog annotation: Hit_ID=Q8LR09; Match level="QueryCoverage=91%, HitCoverage=88%, E-value=7e-76, Identity=65%"; Hit description =Senescence-associated protein-like
  Pfam annotation: Domain name=MtN3_slv; Domain location=9-98; Score =96.7; E_value=6.9e-26; Accession=PF03083.6; Description=MtN3saliva family
MISPDAARNVVGIIGNVISFGLFLSPVLTFWRIYKAKDVEEFKPDPYLATLLNCMLWVFYGIPVVHPNSILVVTINGIGLVIEAVYLTIFFLYSDSQKRKKAFAILPVEILFMVAVVLGVILGAHTHEKRSMIVGILCVIFGSMMYASPLTIMIPNALGAFFGLVQLILYFCYYKSTPKKEKNVELPTVSSNVGGGNVTVSVER

SEQ ID NO: 57389 - protein, 300 aa, Zea mays
  Coding DNA Sequence Number=SeqID_15610
  Gene Ontology: Mol. function=RNA binding; Cellular component=nucleus; Biological process=mRNA processing
  Homolog annotation: Hit_ID=Q69VQ7; Match level="QueryCoverage=99%, HitCoverage=99%, E-value=1e-133, Identity=72%"; Hit description =Putative THO complex 3
  Pfam annotation: Domain name=WD40; Domain location=166-204; Score =32.3; E_value=1.7e-06; Accession=PF00400.22; Description=WD domain, G-beta repeat
  Pfam annotation: Domain name=WD40; Domain location=208-246; Score =9.9; E_value=2.6; Accession=PF00400.22; Description=WD domain, G -beta repeat
  Pfam annotation: Domain name=WD40; Domain location=42-81; Score=41.6; E_value=2.7e-09; Accession=PF00400.22; Description=WD domain, G-beta repeat
  Pfam module annotation: Pfam domain module=WD40::WD40::WD40; Domain location=166-204::208-246::42-81
MESREEERKGSGGAAAGGGSTPGANLRDLVSREYYGHKKKSKVKDIELKGHTDSVDQLCWDPNHPDTVATAAADKSIRLWDARSGKCQVVELSGENINITYKHDGTQIAVGNKEDELTILDVRTLKVAKKHKSTYEMNEIAWNKAGDLFFITTGLGHVEVVKDLEFLKPCKLNAHTAGCYCIAMDPLDRYFAVGSADSLVSLWNVKELLCIRTFTKLEWPVRTVSFSHTGEFIAYASEDPFIDIANVETGRSIHQIPCKAAMNSVEWNPKYNLLAYAGDDKNKYMTDEGVFRVFGFETHN

SEQ ID NO: 57390 - protein, 104 aa, Zea mays
  Coding DNA Sequence Number=SeqID_15611
MPRHCLDVGLLSRRASSWSERTVTFRAGEDEPQHIFSKWKLPVVRARAGGTTAASNQPPWGQITDGVKRRLGLAVECDLRLTEGQPYTRAHASACRDGMATCEA

SEQ ID NO: 57391 - protein, 116 aa, Zea mays
  Coding DNA Sequence Number=SeqID_15612
  Homolog annotation: Hit_ID=Q8L8G5; Match level="QueryCoverage=40%, HitCoverage=12%, E-value=1e-08, Identity=60%"; Hit description =Nucleosome/chromatin assembly factor group A
MLDTKGAKKEPHKGLKTTKPITTKDCVSFFNFFSPLKFPNDEKKIDDDIIMLLWSIYMMSLEPWRLEHIVKHEYQLVSYDMLIWIPGSQYLLEQVLVTLRSPLDAEQELNTLESLV

SEQ ID NO: 57392 - protein, 95 aa, Zea mays
  Coding DNA Sequence Number=SeqID_15613
MESHDLRAEWESRLVGGDETDGSGYDYGAGKWYSFRLERVVSIATTAQAKMKPWKETFRSSKTTTSSRHGLAATPNRLPAKAAFIYVSFPHFDLL

SEQ ID NO: 57393 - protein, 101 aa, Zea mays
  Coding DNA Sequence Number=SeqID_15614
MVEGKEQVVVGTLHRLTLEAIEAGKKKKLYETTYIKNLIARMGPFTDRIVVEVAVVALTENLTVCADSAPMSIKPELVQSGVWLKHGILLFGREQSHCGRS

SEQ ID NO: 57394 - protein, 106 aa, Zea mays
  Coding DNA Sequence Number=SeqID_15615
  Subcellular localization annotation: CTP_CleavageSite=75; ConfidenceScore=5.16e-01
MDEPRTRRGRVAHTPRSGGSAGGPRAIGTPGRAQGHAGQGQGTSGAVSRVGRATLRRRELRREGAGTACQGGGNRAAAGEARPGRAEARPRRGGAGPRAPLGAEAR

SEQ ID NO: 57395 - protein, 110 aa, Zea mays
  Coding DNA Sequence Number=SeqID_15616
  Gene Ontology: Mol. function=zinc ion binding; Cellular component =intracellular
  Homolog annotation: Hit_ID=Q67VC7; Match level="QueryCoverage=69%, HitCoverage=9%, E-value=1e-27, Identity=52%"; Hit description =Putative pollen-specific LIM domain protein
  Pfam annotation: Domain name=LIM; Domain location=12-59; Score=27.2; E_value=3.6e-06; Accession=PF00412.12; Description=LIM domain
MSGAWGGTTQKCASCGRRVYPVEELAADGRVYHRPCFRCHHCKSTLQGQQSSRFSNMFVGTQEKCVVCNKTVYPLEKIPSQMYADISIGFIEGLPKVHRKPVILIVVDHL

SEQ ID NO: 57396 - protein, 184 aa, Zea mays
  Coding DNA Sequence Number=SeqID_15617
MDGVDDWRVWKWKERAAQLRRACGAGREAWDWENSGSADGELVRSESPGPSTSTPNQWRGLPRWHARRFSIRPAGLQWPANRHGLELDFGGTSNPIFRPCSPLRHQEFGIPDNLLTWGVGVDCGAVDRSSVRPSVRAACKAQRLFCFSGSLVPVAAMDGYSAGGRQPFVADSAGYCWCWDGCRK

SEQ ID NO: 57397 - protein, 84 aa, Zea mays
  Coding DNA Sequence Number=SeqID_15618
MSHGGGPITSEVRPGRITQESAFSSGRHQIRPPPSISPNLIALVVNYGALGHGGGKHHGKTAVFPAMGWAVYSKLKGVGGASAR

SEQ ID NO: 57398 - protein, 47 aa, Zea mays
  Coding DNA Sequence Number=SeqID_15619
MAGLLATSQQYTAAYCDVVKLQGMWHPIGRKPTLVLTYLGFTFTHEP

SEQ ID NO: 57399 - protein, 89 aa, Zea mays
  Coding DNA Sequence Number=SeqID_15620
MVDWPSILWGLLSSTLRGAMPSRASSLYVRYAQDGPEAENSSQAESDLALEDDGHGVSVDRRHTPYLARQLSVFSVRPHTQGYPRGAFG

SEQ ID NO: 57400 - protein, 188 aa, Zea mays
  Coding DNA Sequence Number=SeqID_15621
MDYSTKARCIKFTIERQQIDLENSTKFGAYKTWHGLWRTEHCSVSQAVALANWPLSSFLKATSLKFTRLSGVPPDCPVSQWCNGQLRPTVNCADDGTVNRAEVRTATSKRTGLSGVPPDCPVLQEDRSPQLSTAPNPNGRLTWHSPDSEQCYIWCTIELSSVPIDSKASQWLGEREMCPWAISKYFGD

SEQ ID NO: 57401 - protein, 312 aa, Zea mays
  Coding DNA Sequence Number=SeqID_15622
  Gene Ontology: Mol. function=protein binding; Cellular component =spliceosome; Biological process=mRNA processing
  Homolog annotation: Hit_ID=UPI0000DA43ED; Match level="QueryCoverage =77%, HitCoverage=97%, E-value=3e-20, Identity=32%"; Hit description =PREDICTED: similar to keratinocytes proline-rich protein
  Pfam annotation: Domain name=Lem_TRP; Domain location=111-120; Score =3.0; E_value=71; Accession=PF08262.2; Description=Leucophaea maderae tachykinin-related
  Pfam annotation: Domain name=Lem_TRP; Domain location=149-158; Score =2.5; E_value=90; Accession=PF08262.2; Description=Leucophaea maderae tachykinin-related
  Pfam annotation: Domain name=Lem_TRP; Domain location=168-177; Score =3.0; E_value=71; Accession=PF08262.2; Description=Leucophaea maderae tachykinin-related
  Pfam annotation: Domain name=Lem_TRP; Domain location=187-196; Score =3.0; E_value=71; Accession=PF08262.2; Description=Leucophaea maderae tachykinin-related
  Pfam annotation: Domain name=Lem_TRP; Domain location=295-304; Score =2.0; E_value=1.1e+02; Accession=PF08262.2; Description=Leucophaea maderae tachykinin-related
  Pfam annotation: Domain name=Lem_TRP; Domain location=54-63; Score =3.0; E_value=71; Accession=PF08262.2; Description=Leucophaea maderae tachykinin-related
  Pfam annotation: Domain name=Lem_TRP; Domain location=92-101; Score =2.5; E_value=90; Accession=PF08262.2; Description=Leucophaea maderae tachykinin-related
  Pfam module annotation: Pfam domain module=Lem_TRP::Lem_TRP::Lem _TRP::Lem_TRP::Lem_TRP::Lem_TRP::Lem_TRP; Domain location=111 -120::149-158::168-177::187-196::295-304::54-63::92-101
  Subcellular localization annotation: CTP_CleavageSite=21; ConfidenceScore=5.36e-01
MAPPVTWSVLSLGWARWRLLRGRGRVCLPRPRSSPSPWVGRGGDRRLRPGLSPSPGVGRSGVRRLPGLSPSRSPGVGRSGVHRLPGLSPSPSPRVGRSGVRRLPGLSPSPSPGVGRSGVRRLPGLSPSPSPGVERGGVRRLPGLSPSPSPRVGRSGVRRLPGLSPSPSPGVGRSGVRRLPGLSPSPSPGVGRSGVRRLPGLSLCPSPWGRAKAEFPMAPRAGLGCCQPHSVEWHNSQSGAGGAVLLSGRSVERRSDYGHFGSVNWRACVRIKLCADGGYQLRFRSLEGLLSLKKVMNVGFQGVKSILSQSRK

SEQ ID NO: 57402 - protein, 118 aa, Zea mays
  Coding DNA Sequence Number=SeqID_15623
MVAHLDPRNKRFQDHHAMTTVPVTTGSVERYPGEAGTVELKGRAWEGPASHTNMTRESANRTVDTMEWLTAKINGVAASNEVDTAWFKWDHGEEDTGQQLQQCGHAVALHEHHARPKL

SEQ ID NO: 57403 - protein, 65 aa, Zea mays
  Coding DNA Sequence Number=SeqID_15624
MKKILAPSLEVKEEATSTPPAPSLSKVTLELQELVPLGEEFDSILSSQSPPEEEPSSSRIALESE

SEQ ID NO: 57404 - protein, 79 aa, Zea mays
  Coding DNA Sequence Number=SeqID_15625
  Subcellular localization annotation: CTP_CleavageSite=48; ConfidenceScore=5.04e-01
MGQENPLSRREDDAPVTRTSNGSRTRNGNLANYSPRRINSAARRKALRAGAAGDVSPSPKRTRRKRDRERGYPQRDPSP

SEQ ID NO: 57405 - protein, 64 aa, Zea mays
  Coding DNA Sequence Number=SeqID_15626
MAVADVVPAKSHWDSPSRTFDDYYIKDGGVISAPKVWDVLFDDETMQIVAYIEVCTILMVTIYW

SEQ ID NO: 57406 - protein, 75 aa, Zea mays
  Coding DNA Sequence Number=SeqID_15627
  Subcellular localization annotation: CTP_CleavageSite=57; ConfidenceScore=5.40e-01
MNKNPGNRNAITNGTPVPPPQTGSEQKKPNRRAWCAQPPSGYKRPPTFAQTNGREGRAAMQAACNRARWTCFSDF

SEQ ID NO: 57407 - protein, 754 aa, Zea mays
  Coding DNA Sequence Number=SeqID_15628
  Gene Ontology: Mol. function=RNA-directed DNA polymerase activity; Cellular component=intracellular; Biological process=RNA-dependent DNA replication
  Homolog annotation: Hit_ID=UPI00004C1731; Match level="QueryCoverage =94%, HitCoverage=52%, E-value=0.0, Identity=75%"; Hit description =UPI00004C1731 related cluster
  Pfam annotation: Domain name=RnaseH; Domain location=272-399; Score =3.1; E_value=3e-05; Accession=PF00075.14; Description=RNase H
  Pfam annotation: Domain name=rve; Domain location=478-625; Score =77.9; E_value=3.2e-20; Accession=PF00665.16; Description=Integrase core domain
  Pfam module annotation: Pfam domain module=RnaseH::rve; Domain location=272-399::478-625
MPFGLRNAGATYQRCMNHVFGEHIGRTVEAYIDDIVVKTRKASDLLSDLEVTFRCLKAKGVKLNPEKCVFGVPRGMLLGFIVSERGIEANPEKIAAITSMGPIKDLKGVQRVMGCLAALSRFISRLGERADGEALLVYVAATTQVVSAAIVVERQEEGHALPVQRPVYFVSEVLSETKIRYPQVQKLLYAVILTRRKLRHYFESHPVTVVSSFPLGEIIQCREASGRIAKWAVEIMGETISFAPRKAIKSQVLADFVAEWVDTQLPTAPIQPELWTMFFDGSLMKTGASAGLLFISPLGKHLRYVLRLHFPASNNVAEYEALVNGLRIAIELGVRRLDARGDSQLVIDQVMKNSHCRDPKMEAYCDEVRRLEDKFFGLELNHIARRYNKTADELAKIASGRTTVPPDVFSRDLHQPSVKINDAPEPEAPSAQPEARSAQPEAPSAQPEGELPLDQAEARRVARRAKSFVLLGDEEELYHRSPSGVLQRCISIAEEGARGYTHLLVAIDKFSKWIEAVAFFTNIIHRFGVPNSIITDNGTQFTGKKILDFCEDHHIRVDWAAVAHPMTNGQVERANGMILQGLKPRIYNGLNKFGKRWMKELPSVVWSLRTTPSRATGFTPFFLVYGAEAILPTDLEYGSPRARAYNEQSNQASREDSLDQLEEARDKALLHSARYQQSLRRYHARGVRSRDLQVGDLVLRLRQDARGRHKLTPPWEGPFIIAKVLKPGTYKLANNQGEIYGNAWNIKQLRRFYP

SEQ ID NO: 57408 - protein, 106 aa, Zea mays
  Coding DNA Sequence Number=SeqID_15629
MELAAITVCVDELPLRMSRLPPQSTRVILTVVASSWALCGGTLMMHMEFSGVIRGKRCRNSSPCARRRCDSTLLRGQQPPHIQHRAVDGESNGSDPTIPLRRGRFA

SEQ ID NO: 57409 - protein, 83 aa, Zea mays
  Coding DNA Sequence Number=SeqID_15630
MGEGSEARRIGGGGFTMEICWCVELQEAGYRSRRGKRRRGRALASGAGADADVEDEAGWASSWAVAARVLGMVRDVGGSDRMK

SEQ ID NO: 57410 - protein, 124 aa, Zea mays
  Coding DNA Sequence Number=SeqID_15631
AESTAAGHFLSADAILEVAAGFLAGMSGAQGSGTQGFMAGEVGQLTAIGFHESRELADIRAMAVAAVRIARITLTARAHAEVRVLRAGERVLACGPDFTATQDDAWVRQRTGPRVRKTPMGQIG

SEQ ID NO: 57411 - protein, 110 aa, Zea mays
  Coding DNA Sequence Number=SeqID_15632
MAVMGSTLEKMYLCQGQPCTQTPNFHASTPQGPDEHYWSHPEPPARFARAVSSPSVTVSRGPACGMRDDEWDPCDASGEHERTGEAAGGTHRDTETLLKLRHAEYIMHIR

SEQ ID NO: 57412 - protein, 169 aa, Zea mays
  Coding DNA Sequence Number=SeqID_15633
MAEVWREERVQMKLLDANLALEKKYVHLNRLQAEMEAFLRTKDDESASHSTALREARLISVIVAATSSSPMEVDAEPLLPTAAVERERERDDDGHTVRLDKSFGSGCVRGRKPLNPDGRGDLPGDFRRFHPYSLLQSANFGAPIEEPLLSREVPGNRSNLKHIEVSVKL

SEQ ID NO: 57413 - protein, 223 aa, Zea mays
  Coding DNA Sequence Number=SeqID_15634
  Subcellular localization annotation: CTP_CleavageSite=29; ConfidenceScore=5.34e-01
MVSRMLCDDGGSQPPYGSKRTSARTQPLRQLSLRQAPSLLRRPQHHTSWVPKSLRLPRQHGPLREGWPRGDEDETGALLGPLASLSRVDACNLLLQAHPTWARDEHEGRGIPTSLTPVSGRLASPPFALALALDPSGLGHAATLTRRPEGPPEMAHKHQHGERGHKPHRWGEASRVDPCGPQLLPHLDRFYFLLAALSLVDLAVYIACNMWDDDNRRKVSSHI

SEQ ID NO: 57414 - protein, 126 aa, Zea mays
  Coding DNA Sequence Number=SeqID_15635
MPTRPDALHALAHTGDGQCLVQWHGGGRELAVFKLGSDGWWTEAGDGVSEDVLILSSRTAVAWLSARRRSLLENYWSCSKGFCTLHIEDQMVLYALQQRPLNGPLNLENVAGFSIYRVSLNAPLSI

SEQ ID NO: 57415 - protein, 91 aa, Zea mays
  Coding DNA Sequence Number=SeqID_15636
MAAVGEPDMACASSPLVSYTRGRLEEERIPRLCRARVAAGFGGGAVGARSGAEDVAVEAEVDGNEATKKDADARRYEVCWANTGWLAVPLV

SEQ ID NO: 57416 - protein, 115 aa, Zea mays
  Coding DNA Sequence Number=SeqID_15637
  Gene Ontology: Biological process=negative regulation of growth
  Homolog annotation: Hit_ID=P80915; Match level="QueryCoverage=64%, HitCoverage=74%, E-value=1e-10, Identity=39%"; Hit description =Antimicrobial peptide 1 precursor
  Pfam annotation: Domain name=MiAMP1; Domain location=41-115; Score =52.0; E_value=2e-12; Accession=PF09117.1; Description=MiAMP1
MAGRKCRAIPTAIATAVVVVAVLMAVAVAGVAAKDASGAPSSLTTWSAAGCSGDTSIVGSCGCTDLAFYAGQEFYYRGETATLYTGTGCTGTPYQVFEDTQACGDFGWRSINIDC

SEQ ID NO: 57417 - protein, 102 aa, Zea mays
  Coding DNA Sequence Number=SeqID_15638
MAYSNTHVPTPVHAFVTNIFLISSSNYQSKNIKIHIINKNVGGLRLPKVLKNTTNIFPKYNICTGTFGHEMKLYNNMESAVREKDESMLKLPVKKLRLNDGK

SEQ ID NO: 57418 - protein, 229 aa, Zea mays
  Coding DNA Sequence Number=SeqID_15639
GDFWGAFGDALKSITRASTMPPPAPTVPPSHQPFDDYAGPYARRPLPGVMVAPHPPTPIPSTEPQPVGVHTQKAPTCPRLCQRSCPAHPPAAPALSAPVMNCPLPCAPQKSRRKIPPKPRHTLLRGVPFDSEALLGGNGVVVVEAKTLHLDSQGTRASRWPKDVGRKSCRATSLPTPKTPNAEKRMPTSDVPCCDRHAKKADGMPRSDMPNSCVTNNLYTFSTGSAICI

SEQ ID NO: 57419 - protein, 544 aa, Zea mays
  Coding DNA Sequence Number=SeqID_15640
  Gene Ontology: Mol. function=metal ion binding
  Homolog annotation: Hit_ID=Q6K7P0; Match level="QueryCoverage=65%, HitCoverage=32%, E-value=1e-65, Identity=43%"; Hit description =Putative DNA-binding protein PD3, chloroplast
  Pfam annotation: Domain name=JmjC; Domain location=256-363; Score =27.4; E_value=2.5e-06; Accession=PF02373.13; Description=JmjC domain
MAEWKKNCRFVSKVDWRNSCAKAVKRDLKEWNIDKEFAVDRKGWNFGLWDLISGIELQPEVDDKHIFSIAPNGVNILTHTDEIKLKAKRIAAVEKKKRCLGMKILSTKEASGGLQRCADYFGMPTAPSESNKEPRPEECVNELGIKQPVQHVASEEQEGVQDDAKADANVMNVSFGKGKSEDSFGTINGTNSGDKIESPSGLAERTLTQPTTKGCSKQRGRSSNGRGNRTKKIEEGNASGLIAVAPESEDDDDDAAFIDGNQAEGGALWDIFRREDVSKLHDYLMKHAHEFRHCNFEPVKQVTHPIHDQCFYLTIEHKRKLKEEYGVEPWTFEQKLGEAVFIPAGCPHQVRNLKSCIKVALDFVSPENVRECIRLTEGFRLLPKWHKVNEDKLEVKKIALHAFNQAIKDITDESSNSNERAVEVTREHHWSSPQSGGVFPGTNDLGRVRNSSPVVATATDPFPAIIGASCYLPHCENSPHLSALVSSTQNQVLSEAFGGGLGVWVFGHGAVAPMLGVVRRSDGGRGKAVRLLDLNGRPRSYHAP

SEQ ID NO: 57420 - protein, 763 aa, Zea mays
  Coding DNA Sequence Number=SeqID_15641
  Gene Ontology: Mol. function=metal ion binding
  Homolog annotation: Hit_ID=Q6K7P0; Match level="QueryCoverage=56%, HitCoverage=45%, E-value=1e-111, Identity=46%"; Hit description =Putative DNA-binding protein PD3, chloroplast
MAAEALGAMRSRYRSAAIEPLRLRLSNPSDSGCGRYVFRNLISAMLLAYMHMESGEENLQEKVQEGGKVNLTEKVQEGGEENLTEKVQEGGEENLTEKENEGIVEVSKPPQRRRKDPVADPSSLESSGFMRFRERRNASAVQEQGPKKRRITEDSNMCHQCQRNDSGRVSGGYSVSEQDKIKFSMRIVHFLLPWLKQFHQEQMQEKSAEAATKGIDADKLEVPLTICGKKERIYCNNCRTSIVDFHRTCNKCNYDLCLQCCQELRRGLVSGNDAKVDGGGKQDFLSGVSHDKIISKGPSDGQNDMLIDSVVPGENNTSSLRQWSVNKDGTIPCPPNAFGGCGSSLLELKCLFKEKFIAELLEKANSALNNEMEVKIEGSKCPCFTESGDMDDGISRKSSCRENSCDNYIYCPTATDVQNGSLDHFQEHWLKGEPVIVRDTLALTSGLSWEPMVMWRALREKKEKVERLSVLALECLGWCEVDVNIHMFFAGYSSGLVGPDDLPLLLKLKDWPPHSSFEERLPRHGAEFMSALPFREYTDPKWGPLNLAVKLPDNVNKPDLGPKTYIAYGVSKELGIGDSVTKLHCDMSDAIYNSSLVPGDEVTRSYKKFAGLERKQVEHVRSQLALAKEILHMLEIAQDGRVLSPAERWLKFRLKKQTLLLSSCKRTIARLRARISWLKDGDANTKLFHLHARHRKRKIFVACLVDGEQILISHEEKAACVDQFYTNLLGNSTDRVQAIELETLGMPSFDLTDLEAPISEQDV

SEQ ID NO: 57421 - protein, 79 aa, Zea mays
  Coding DNA Sequence Number=SeqID_15642
  Gene Ontology: Cellular component=mitochondrion
MGDAFCFIREEGRSIQHELREISDIENQAVGLKGILDQLPRAHASEFRSKMSGLASQVKKEKRVLNAALTKIVNYGVPI

SEQ ID NO: 57422 - protein, 62 aa, Zea mays
  Coding DNA Sequence Number=SeqID_15643
  Gene Ontology: Mol. function=phosphotransferase activity, alcohol group as acceptor
  Homolog annotation: Hit_ID=Q5VMR5; Match level="QueryCoverage=96%, HitCoverage=10%, E-value=1e-08, Identity=48%"; Hit description =Phosphatidylinositol 3-and 4-kinase family-like
MGHSGNASKSAMNRSADEQLPSNEWDVFLEKFQELLKEALHESARAAAGQRMKQRLGTSCKF

SEQ ID NO: 57423 - protein, 370 aa, Zea mays
  Coding DNA Sequence Number=SeqID_15644
  Gene Ontology: Mol. function=protein serine/threonine kinase activity; Cellular component=membrane; Biological process=protein amino acid phosphorylation
  Homolog annotation: Hit_ID=Q6ETC7; Match level="QueryCoverage=76%, HitCoverage=72%, E-value=6e-93, Identity=65%"; Hit description =Serine/threonine-specific receptor protein kinase-like protein
  Pfam annotation: Domain name=APH; Domain location=78-263; Score=3.6; E_value=0.003; Accession=PF01636.13; Description=Phosphotransferase enzyme family
  Pfam annotation: Domain name=Kdo; Domain location=59-255; Score= -85.5; E_value=0.067; Accession=PF06293.4; Description=Lipopolysacchar ide kinase (Kdo)
  Pfam annotation: Domain name=Pkinase; Domain location=76-344; Score =67.4; E_value=4.7e-17; Accession=PF00069.15; Description=Protein kinase domain
  Pfam annotation: Domain name=Pkinase_Tyr; Domain location=76-344; Score=25.6; E_value=4.9e-14; Accession=PF07714.7; Description =Protein tyrosine kinase
  Pfam annotation: Domain name=RIO1; Domain location=89-239; Score= -86.0; E_value=0.012; Accession=PF01163.12; Description=RIO1 family
  Pfam module annotation: Pfam domain module=APH::Kdo::Pkinase::Pkinase_ Tyr::RIO1; Domain location=78-263::59-255::76-344::76-344::89-239
MALALLFFCVLLLASGAIAFLLIRHCLARAPPHRHRQAQPEAAAKQLQQQALLAIKKEPAPRRLAWREVEALTGGFDEAAVVGRGGSSTVYLARLLDGSPVAVKVHRWCGGERRLRAFRQELDLLRRLRHPHIVALLAYSDDHEDEGALVLEYLGGGTLADALHGTAAAPLPWAQRMRVLHDVACALEHLHGGGGGGASVVHGDVSASNVLLSDGGVRLCDLGSACEGFSAAVAPARAAVASPGYADPFFLRTGIVSSRSDVYGFGVLLLEAVTGLPAASEAENLTARILPRVRARGVAGLVDGRLGDGGHDEEEAAGVARLAVECVAAQPGLRPSMAQVRAAIAEKAARSIAKAGCGHHIQLSKLLELT

SEQ ID NO: 57424 - protein, 70 aa, Zea mays
  Coding DNA Sequence Number=SeqID_15645
MGTNHVFLSARDNMKSSLKEQKKVGSIGLSGVRPAYWSLLDSLFLLPTLCKRVISDRDCRLGKNGTRANV

SEQ ID NO: 57425 - protein, 1533 aa, Zea mays
  Coding DNA Sequence Number=SeqID_15646
  Gene Ontology: Mol. function=methyltransferase activity
  Homolog annotation: Hit_ID=Q1SSE9; Match level="QueryCoverage=91%, HitCoverage=83%, E-value=0.0, Identity=37%"; Hit description=N-6 Adenine-specific DNA methylase
MASSSSFAPDDQTDADFFDKLVDDDDPATSLPDDPPIPEPQAPPEGSGKGGAGVHTAVKQVQWASFGGGADDGPDPFAHLSGGAGDDDGFLVTTAGTQTASDHAFFGGTQSLAAEVTDQDFFAGSNSSNQHNVSGQHDQGGGSTAVDSADPMSLEAMYPGWKYDEASQQWYQLDDSVNSTGNAAQVLDNSTRYAQQQQQLHASYLHNSVHSGLETIAEEGTTATGAVSSWGQGAASEYPPNMLFYAEYPGWYFDTNTQQWHSLELYQQAAMQAGTASMGQTVIANDGVAATSSLTGYNAAQNEDLAAHDQVTQHNSFSNSFAHQNQWQITDAFGNNVRSECATENSLASSSYGFQQHRNADSTSSSTNQRAGFNAAETVTDHYGGRKGVESPSIQSGYSTSDIQQSSHKAFEPYTGYQDHYKAFEPATGHHASNNMFKQSTGNQGGYKAFEPAMDNQSGYKAYEPSMGHHSASWEPVPSTGHQTDFKGSGASTVHQAGYKEFETSTGYNTSLKAFEPSSSQHAGYMGSQSNYMGFDTSTNHHGYGDANVVASTQGFVPMQTTYQGQTQAIANSQVHLSNSYLGIDNSMNFNQQQFLGANASNLQFSHSPHDGRAGRPPHALVSFGFGGKLIVMKEASSMPASFNNGIQGNSSGTVSVLNLSEVVMDKIDSSSITNGSALSYFHALCRQPVPGPLVGGSAASKDVNKWIDEMIAWYDSSSELQRSDTRKLLISLLKILSQHYGKLRSPFASDPSQEETDGPEMAVTKLFSSFKSTVNMGDYGSIVSCMKNIPSESQMQAVAQEVQNLLVSGRRKEALQCAQGGQLWGPAIILALQLGDMFYVDTVKKMAHFHFVSGSPLRTLCLLIAGQPADVFNVDNNVNIDYGTSHQPMECHDFWVSLTNNFPAFLFTFFFDNLFFLSQPGPNGMLDDWEENLAIITANRTKGDDLVITHLGDCLWKEKNEIAAAHSCYLVAELNIDSYSESARLCLIGADHLKCPRTFASPEAIQRTEVYEYAKVLGNSQYILLPFQPYKLIYAYMLVEVGKVSDSLRYCQASMKVLKASGRAPELEVWKQLISSLEERIRTHQQGGYGTNLAPAKLVGKIFTSLDKSISRMMGTPSAPLPPLPHGSVSDRESHSMPEAAKFINSQSVMAMSSLMPSASMQSMTEIAENSDGTGRKMAHNRSVSEPDFGRTSKQVLAKGGGSDGTQSSAAGSGSSRFGWLVQKTMGLVSKSHRQDPISVLKAKLGDQNKFYYDEKLKRWVEEGAVVPAEEPPLPPPPTKSSFQNGMPDHKLNGHMSVGHAPSGVTEWKSSNYSEQGLGMPPIPPSQNQFSSRGRMGVRSRYVDTFNKSGASGAVPSYNKPAAPSVTPPAGAKFFIPTAAPVAADQMMPHQAAEIHSETMQQDERAASPPAGTSFSSTPPPTQFSSPPPHTQFSSPMQSTIHRQSSMANISTPYQSSGVSSLSSDTSFSKSRAASWSGTYSEQFSAFAGTRSPDGQTVRSPLMPGKPSHSRSNSNSSVQLNGLTEDLHEVEL

SEQ ID NO: 57426 - protein, 154 aa, Zea mays
  Coding DNA Sequence Number=SeqID_15647
MAMATQGQADHQQQQHGRSEPTTSVAANRWGPYSGAGDFASNMAVILAALLAALALGLALNAAVRYLLRRRRRRRRAGSGGGQGNGSGVLPSDEPAEKPSVEVELQAPARRRPPCWGKYILCNHLSWCKHAIKRSGASDLDLMMTVILYLTPST

SEQ ID NO: 57427 - protein, 177 aa, Zea mays
  Coding DNA Sequence Number=SeqID_15648
  Pfam annotation: Domain name=DUF581; Domain location=85-143; Score =69.8; E_value=8.5e-18; Accession=PF04570.5; Description=Protein of unknown function (DUF581)
MVGKRERDCKNPVRRTTSMTEFALAAVMEEDDEEAQLPDNGSSSSRGGGQHQQDWLSALGGGAAAAQEDWIAAYRARAAPAKAGLRRNSADYSAVETAAFLRACGLCRRRLGPGRDTFVYKGEAAFCSLECRERHITQEEWKDKCAATSIKDAGAAKVVSGRRRAGEGKAGGTVAAA

SEQ ID NO: 57428 - protein, 91 aa, Zea mays
  Coding DNA Sequence Number=SeqID_15649
MAYDLPMIRLRVVSPAGVWWLLGDPTAPATNSGRTLGYPAQDSHGPDPSDHAELQYAGHNHQADDPAASSLHLVEEGDEWERPANGTHSAE

SEQ ID NO: 57429 - protein, 91 aa, Zea mays
  Coding DNA Sequence Number=SeqID_15650
MAYDLPMIRLRVVSPAGVWWLLGDPTAPATNSGRTLGYPARDSHGPDPSDHAELQYAGHNHQADDPAASSLHLVEEGDEWERPANGTHSAE

SEQ ID NO: 57430 - protein, 132 aa, Zea mays
  Coding DNA Sequence Number=SeqID_15651
  Subcellular localization annotation: CTP_CleavageSite=34; ConfidenceScore=5.16e-01
MQSFLWRLWPDLAAVSLALSSGTAVGAAQAALSSCQAAWRLGQGCFLAKTGPQASRSLWTGHKKTGNCRVIGVKFPKTQNTTCTDCGLIYVKHRVSSAKWHGERVSVDMGRQIRNGRPKLNLIIPNRYALTT

SEQ ID NO: 57431 - protein, 107 aa, Zea mays
  Coding DNA Sequence Number=SeqID_15652
  Gene Ontology: Mol. function=structural constituent of ribosome; Cellular component=intracellular; Biological process=translation
  Homolog annotation: Hit_ID=Q10S10; Match level="QueryCoverage=94%, HitCoverage=98%, E-value=1e-50, Identity=97%"; Hit description=60S ribosomal protein L23, putative, expressed
  Pfam annotation: Domain name=Ribosomal_L14; Domain location=19-107; Score=70.4; E_value=5.6e-18; Accession=PF00238.10; Description =Ribosomal protein L14pL23e
MSKRGRGGTAGNKFRMSLGLPVAATVNCADNTGAKNLYIISVKGIKGRLNRLPSACVGDMVMATVKKGKPDLRKKVMPAVIVRQRKLWRRKDGVYMYFEGPIFPLAH

SEQ ID NO: 57432 - protein, 61 aa, Zea mays
  Coding DNA Sequence Number=SeqID_15653
  Gene Ontology: Mol. function=structural constituent of ribosome; Cellular component=ribonucleoprotein complex; Biological process =translation
  Homolog annotation: Hit_ID=P49690; Match level="QueryCoverage=69%, HitCoverage=30%, E-value=7e-17, Identity=95%"; Hit description=60S ribosomal protein L23
  Pfam annotation: Domain name=Ribosomal_L14; Domain location=1-61; Score=-32.0; E_value=0.021; Accession=PF00238.10; Description =Ribosomal protein L14pL23e
MERRRLGDALKTVVYIEVYKDNAGVIVNPKGEMKGSAITGPIGKECADLWPRIASAANAIV

SEQ ID NO: 57433 - protein, 425 aa, Zea mays
  Coding DNA Sequence Number=SeqID_15654
  Homolog annotation: Hit_ID=Q9AV79; Match level="QueryCoverage=97%, HitCoverage=90%, E-value=3e-82, Identity=47%"; Hit description =Putative flowering-time gene protein
  Pfam annotation: Domain name=CCT; Domain location=338-376; Score =81.5; E_value=2.7e-21; Accession=PF06203.4; Description=CCT motif
MAEDLCPTDDISSPIAAHILDFYDDDDGGCGGGGGDLFVGVNAASDMFTVPSEDVSTSSVTTPPAPCGGHGDNASSLDAAASAFSPMPFLDSTLSALLEEEDAPVLDTELLAIDDYRFAATAVAGDEPRPEQQRFAQVPMVLPVAEHPSSLQTQMSSTAFELLHAASSSSGYTDNDCFAAAMDEGGGGYVGLDEALCQQQQHQLLQPGALLSAGMMETAAQGCYFVNGGPTAQGVLFGASGSGVVMPMTAGLEEIGEYQRMMESASAALAATHSPDADSVAAAQQMAFSGNGGEMQMGGGSMSPGRLPAATEAASSLEDTDFKSARITVEERREKIHRYIKKRNERNFSKKIKYACRKTLADSRPRVRGRFAKNDDYGEPSSRVAHNHDEYDHMAAMKAQDILDPDALQAAMNSYMYNHTVESWM

SEQ ID NO: 57434 - protein, 60 aa, Zea mays
  Coding DNA Sequence Number=SeqID_15655
MLLAVMAAVGALQRGHGVVIVRMGVWGAVVVHMEAGTRAGARGFNNNGFTTFQGSYTGLS

SEQ ID NO: 57435 - protein, 182 aa, Zea mays
  Coding DNA Sequence Number=SeqID_15656
MAEALAAMAGGIELAGAKGKGLAGEGECGAKSTARHTGDYEGRETEATETASISEIMRNFGMIIQKGEESVPRNDTVDAKAKTIDAEAIGDDEENDGILNPSKPSHIEFDKSTVKLEDLVLMKKLDYFGKNDDELIRLPMPDSRSAIQRCGRINKHSRSGSRILGEQSSANTAWVGDAEAKG

SEQ ID NO: 57436 - protein, 165 aa, Zea mays
  Coding DNA Sequence Number=SeqID_15657
  Subcellular localization annotation: CTP_CleavageSite=83; ConfidenceScore=5.16e-01
MTNEQLTASLVHFNNLGALQAQVTTMQSGMNTMQSDMFALQSDVAAMKAIMLGSQPQPPLPSSTTTVAALTTPSLLALMCTPAASHSADVPIHQVTFLRSSSQVPAFLSPHAGGSSRSAAVKGCASTVNEPFVCGHQCKQLFDLELGDFEFADEVVEDAITEATL

SEQ ID NO: 57437 - protein, 97 aa, Zea mays
  Coding DNA Sequence Number=SeqID_15658
  Homolog annotation: Hit_ID=Q2RBM1; Match level="QueryCoverage=67%, HitCoverage=35%, E-value=8e-13, Identity=59%"; Hit description =Expressed protein
MQSMCCVLLCLAMRYEALLLPDAKYCNDLHLKVSRLEWLTFTTYCLDNGFYTIVSKIYIFFNDVIHYGSTSRRYVSEKYFPHRKARVMTGRSANLAI

SEQ ID NO: 57438 - protein, 107 aa, Zea mays
  Coding DNA Sequence Number=SeqID_15659
MATETGRATPLFCSGDRGLWLFVGPFIWEWTVLDAQHVFELHPMAFSLYFSHNMQAVAKATEDQTDATQQHPLPPAFSLISHKAKAEAQAAVGQPSTFAFLLYLFEI

SEQ ID NO: 57439 - protein, 146 aa, Zea mays
  Coding DNA Sequence Number=SeqID_15660
  Homolog annotation: Hit_ID=Q2QTT0; Match level="QueryCoverage=50%, HitCoverage=17%, E-value=6e-30, Identity=87%"; Hit description =Expressed protein
MHIRARVQVLPLRDLKSMHMKKVCAMGFTKNNTGRPKFSLGSGPCTMADWRPMPWLPGGLLNIQIGEASRRAWLGEEADPQYSDRLLRPYKRPVEVYMDQQDSRWFISKDAIVSGLGLLGIKQGGPETTLSKPRRKRVVRKKVASG

SEQ ID NO: 57440 - protein, 121 aa, Zea mays
  Coding DNA Sequence Number=SeqID_15661
MGCTRASSTLLMVVVAISVLALDHSVANARQVRSPSMSTGEHHPSRNKEALQATTTKEHGAVHTGGGAGTVHMSPGSTGEAGVVGQPIFGGRGENSSPAAAEKVAVVVARYGPRPHPKKHN

SEQ ID NO: 57441 - protein, 182 aa, Zea mays
  Coding DNA Sequence Number=SeqID_15662
  Gene Ontology: Mol. function=hydrolase activity; Biological process =aromatic compound metabolic process
  Homolog annotation: Hit_ID=Q6EPW1; Match level="QueryCoverage=92%, HitCoverage=64%, E-value=1e-67, Identity=75%"; Hit description =Hydrolase-like protein
MALNQDHKIRGAVTISGSPGLRDEASRRRRIAIDKSRAQFLMCCGLECFLQTWYSGKLWTSLREHPEFNSLVRTRSKHKNIKALAKVLADSSVGRQKSLWEDLKHLKRPLLVVAGEKDAKFKDISQKMRTEIMSHAECGSDGPKGKELCEVLIIPDSGHAVHVENPLPLVKKGFKFVPPKKN

SEQ ID NO: 57442 - protein, 150 aa, Zea mays
  Coding DNA Sequence Number=SeqID_15663
  Gene Ontology: Mol. function=peptidase activity; Biological process =aromatic compound metabolic process
  Homolog annotation: Hit_ID=Q2QTQ5; Match level="QueryCoverage=82%, HitCoverage=31%, E-value=2e-45, Identity=75%"; Hit description =Expressed protein
MGCFLQIVLLRDQSYWKGLQEKVQQFDHRSLVNWKHLNDLVFNYATLSRLIVALKLCRYDYSGYGQSSGKPSEHNTYADIEAAYKCLIEKFGAKEEEIILYGQSVGSGPTVDLASRLSQLRAVVLHSPILSGLRVMYPVKRTYWFDIYKI

SEQ ID NO: 57443 - protein, 218 aa, Zea mays
  Coding DNA Sequence Number=SeqID_15664
  Gene Ontology: Mol. function=nucleotide binding
  Homolog annotation: Hit_ID=Q8S7V6; Match level="QueryCoverage=90%, HitCoverage=42%, E-value=6e-95, Identity=82%"; Hit description =Putative auxin independent growth-related protein
  Pfam annotation: Domain name=DUF246; Domain location=2-172; Score =30.1; E_value=2.1e-16; Accession=PF03138.5; Description=Plant protein family
MSACLFSLSLRMTSPFFTLYAYPWWRDKEIDSQAKRSQGLCPLTPEEASLVLKALGFQKDALMYIAAGEIYGGDRRLEPLRSAFPNLVRKEMLLDSEVLHQFQNHSSQMAALDFIVSTASDVFIPTFDGNMAKLVEGHRRFLGFRRSVVLDRRKLVELLDLYTNKTISWDKFASSVREAHKDRVAQPSCRRKLENRPKEEDYFYANPHECLANSTLCS

SEQ ID NO: 57444 - protein, 406 aa, Zea mays
  Coding DNA Sequence Number=SeqID_15665
  Gene Ontology: Mol. function=hydrolase activity, acting on ester bonds; Cellular component=cellular_component; Biological process =lipid metabolic process
  Homolog annotation: Hit_ID=Q84Z95; Match level="QueryCoverage=82%, HitCoverage=86%, E-value=1e-151, Identity=79%"; Hit description =Putative GDSL-motif lipase/hydrolase protein
  Pfam annotation: Domain name=Lipase_GDSL; Domain location=65-378; Score=174.3; E_value=3e-49; Accession=PF00657.12; Description=GDSL -like LipaseAcylhydrolase
MQCSSSISPYTIDHPTLPVIFFLLYRRPAAAAEQSSGEEAAAECFPFQEQQVRPATATPTPPRAFFVFGDSLVDSGNNNYLATTARADSPPYGLDYPTHRATGRFSNGKNVPDIISEYLGAEPALPYLSPHLDGRKLLVGANFASAGVGVLNDTGVQFANIIRVQKQLRYFRQYQDRLSRLVGEDAAARLVRGALVLVTLGGNDFINNYYLVPFSARSREFALPDYVRYVVSEYAKVLRQLYSLGARRVLVTGSGPLGCAPAELALRGSRDGECDAELQRAAALYNPQLVDMIKGVNAELGADVFVAVNAYRMHMDFISDPAAYGFVTSKVACCGQGPYNGVGLCTAASSVCPDRSVYAFWDNFHPTEKANRIIVSQFMDGPQEYMHPLNLSTILAVDARAAATFN

SEQ ID NO: 57445 - protein, 136 aa, Zea mays
  Coding DNA Sequence Number=SeqID_15666
KSLDYDKLYKGLEVLAEFEKAANSRVVDSGVLRGMNLEDIRKAGERLILQGGCKNFFQKIVKTREILNLDIHILSYCWCAELIRSAFSSAGCLDGLNIHANEFAFEESVSTGEIDRKIQSPLDRYRYRRWVKHKLA

SEQ ID NO: 57446 - protein, 75 aa, Zea mays
  Coding DNA Sequence Number=SeqID_15667
MAPYLEQGHRGHHHAHGRSLNEHVHDFLGARHHLRREMLLLRRHHGCTLWRRHYRSTLLWRDRYLLRHHPKPGRT

SEQ ID NO: 57447 - protein, 50 aa, Zea mays
  Coding DNA Sequence Number=SeqID_15668
LQVHQFGLICDNLDAVNKFEPNYRLIRRLRYKSNHMLLFNLSSITFDVSY

SEQ ID NO: 57448 - protein, 338 aa, Zea mays
  Coding DNA Sequence Number=SeqID_15669
  Homolog annotation: Hit_ID=Q2QTQ5; Match level="QueryCoverage=46%, HitCoverage=44%, E-value=1e-68, Identity=73%"; Hit description =Expressed protein
MDVLALLFNRAEDSGLLQQLSGRSKLHRISMYADGVVIFLSPSAADISIAMSILDLFGKASRLRNNEQKSNVFPIRCSEDDLTAGPEFIAIAGRRIMVQHVLTSMIVYLAMAIDFPPWALDVVDKIRKVFFGKVVKMSREDIVWLSGGWCAHLGDGKYSAKSPYEGLFVGSTSFGHYHQGTADEVVDWSHGKQLWELCKDKYEPLWLRGGKHCDLELFPEYIRHLKNFFHSLEKSPSHRQAWRENVDRIEPSRKSTDFFEPSRKSTDQRKKSRSTRDKTRNTEHRYSNVEKVDKLKISFDQFEKSRRSVDIFERPKRNIEQLDCGRKSVDRLDRIWAS

SEQ ID NO: 57449 - protein, 171 aa, Zea mays
  Coding DNA Sequence Number=SeqID_15670
  Gene Ontology: Mol. function=peptidase activity; Biological process =aromatic compound metabolic process
  Homolog annotation: Hit_ID=Q2QTQ5; Match level="QueryCoverage=81%, HitCoverage=36%, E-value=2e-55, Identity=78%"; Hit description =Expressed protein
MGCFLQIVLLRDQSYWKGLQEKVQQFDHRSLVNWKHLNDLVFNYATLSRLIVALKLCRYDYSGYGQSSGKPSEHNTYADIEAAYKCLIEKFGAKEEEIILYGQSVGSGPTVDLASRLSQLRAVVLHSPILSGLRVMYPVKRTYWFDIYKNIDKIPQVTCPVLIIHVKNKAT

SEQ ID NO: 57450 - protein, 76 aa, Zea mays
  Coding DNA Sequence Number=SeqID_15671
MALVQAGMGLTRVVILVGAGVAGSVVLRNGRLAEILGELQEILDKGKKVKDGGGGDGETDLNEALTSQFRFRMDIV

SEQ ID NO: 57451 - protein, 92 aa, Zea mays
  Coding DNA Sequence Number=SeqID_15672
  Gene Ontology: Mol. function=glutathione peroxidase activity; Cellular component=mitochondrion; Biological process=response to oxidative stress
  Homolog annotation: Hit_ID=Q7XU04; Match level="QueryCoverage=70%, HitCoverage=38%, E-value=2e-29, Identity=93%"; Hit description =Glutathione peroxidase
MQRYSYLACQGDVRILVMILTDPCRMVDVNGSNAAPIYKFLKSSKGGLFGDSIKWNFSKFLVDKEGRVVDRYAPTTSPLSIEKDIKKLLGSS

SEQ ID NO: 57452 - protein, 456 aa, Zea mays
  Coding DNA Sequence Number=SeqID_15673
  Gene Ontology: Mol. function=heparan-alpha-glucosaminide N -acetyltransferase activity; Cellular component=integral to membrane; Biological process=glycosaminoglycan metabolic process
  Homolog annotation: Hit_ID=Q2R301; Match level="QueryCoverage=82%, HitCoverage=92%, E-value=7e-44, Identity=40%"; Hit description =Expressed protein
MEKEGQEIAASDGGKGPAEQHAIDVGHVVQHGDGKGEDDIEKERVAVVEDVQTKKKSSRRVAALDAFRGLTIVLMILVDDAGGAYERMDHSPWNGCTLADFVMPFFLFIVGVAIAFALKRVPNIGAAVKKITTRTLKMLFWGVLLQVLLFTDHLAEMTFVTTVFDGIYLGMYGEGGYSHAPDDLAYGVDMKKIRWCGILQRIALVYFFVALIEALTVKVRPTTVRSGPYAIFDAYRWQWLGGLVAFVVYMVTTFSLYVPDWSFVYHNEGDVNDGKQFTVKCGVRASLEQACNAVGYVDRQTHKERLKHWLLTGFSLLVLGIILHFTNGTAIPINKQLYSFSYVCFTGGAAGIVLSAFYILIDVWGLRTPFLFLEWIGMNAMLVFVLGAQGILAAFVNGWYYGSPDNTLVNWIVKHVFVNVWHSQRLGTLLYVMFCEIVFWGVAAGVLHKLGIYWKL

SEQ ID NO: 57453 - protein, 244 aa, Zea mays
  Coding DNA Sequence Number=SeqID_15674
  Gene Ontology: Mol. function=inorganic phosphate transporter activity; Cellular component=membrane; Biological process=phosphate transport
  Homolog annotation: Hit_ID=Q9C9W0; Match level="QueryCoverage=98%, HitCoverage=97%, E-value=3e-73, Identity=59%"; Hit description=Non -intrinsic ABC protein 3
  Pfam annotation: Domain name=ABC_tran; Domain location=54-217; Score =135.7; E_value=1.3e-37; Accession=PF00005.17; Description=ABC transporter
MGSASSDGLREHLLDVDGGGAAAVPKIRVRGLRRRADATGEEILRGVHLDVPRGAVMGVIGPSGSGKSTLLRALNRLWEPAPGAVLLDGADICALDVLALRRKVGMLFQLPAMFDGTVADNVRYGPQLRGKKLTEAEVKSLLHLADLDPALCSKPASELSVLLLDEPTSALDPISTQNIEEAIVRLKKTRGLTTVIVSHSVKQIQRIADLVCLVVAGEVVEVLAPSDLSDAKHPMARRFLELSG

SEQ ID NO: 57454 - protein, 416 aa, Zea mays
  Coding DNA Sequence Number=SeqID_15675
  Subcellular localization annotation: CTP_CleavageSite=20; ConfidenceScore=5.01e-01
MHLHGMRESKQGRHLGFVTSCAVLLSRIRYVPRVVGGAFLGRTPASRPGRTPSWHRALSAAHHPPTNCPAQAVRPHAAVAWPGPARNGYMSAPVLASNPLSGAGTSARATMIACCCRWRGVARAALGARTALPASHSVRGREAPPPGTGTAAISWLYAAQIVLSSLSALEQAWGAVACGLRCRLWVCVVRAYCALMYVRIVYAHAADFCIGITAVSLQSRDVSAWGGRAGVAGAFPFWPHSHGPVLDHRHLSMASSPWIQTSRRQKRLSFFTALRSALGHGPDTAALLVTRPHDRCPGTNDGHAGLPPRLKGPPRVEPPLPPRPCGDDDLRWRWESNEEPQGWGVSSSRRCSLQPAWKVGEGHDLLNESLQMDILGAEATQKVQHQGTIGDGLAKVAERICHAFIWRQYLLMDRPP

SEQ ID NO: 57455 - protein, 123 aa, Zea mays
  Coding DNA Sequence Number=SeqID_15676
MIFIALGLEIQQEKGLCLHPRRAASIAAASGRTGAECQAGSTTGRKNWLRSQAFSKQKILDFGIVVEMETRMGAIETGKGGVRTIVGLGKGASKFGELRHADVIEAPSKSTDLESSSSLDPRS

SEQ ID NO: 57456 - protein, 71 aa, Zea mays
  Coding DNA Sequence Number=SeqID_15677
MGPLGIELGIKVNTLDLWLKVIACLADSLLHRLQEATPPPRQLGRYVTAHLTDHFVSLGCCCPPHQDHSKE

SEQ ID NO: 57457 - protein, 107 aa, Zea mays
  Coding DNA Sequence Number=SeqID_15678
  Homolog annotation: Hit_ID=Q2QWV7; Match level="QueryCoverage=38%, HitCoverage=11%, E-value=6e-08, Identity=61%"; Hit description=TRAF -type zinc finger family protein
MKHCGSGIGKRSATDFGEGSKAVAPMKEESQKHQLHIPSMVQRLTRQKDKWLNFLNKLAYLHVSLIQCAYCDSEVMHMLAQILLPGLAAVCVDSSMEDLFNIPGEIM

SEQ ID NO: 57458 - protein, 337 aa, Zea mays
  Coding DNA Sequence Number=SeqID_15679
  Gene Ontology: Mol. function=protein binding; Cellular component =spliceosome; Biological process=mRNA processing
  Homolog annotation: Hit_ID=Q6QP51; Match level="QueryCoverage=55%, HitCoverage=90%, E-value=4e-21, Identity=38%"; Hit description =Putative growth-regulating factor 1
MTASKKGPGKGDTPKGILLREGNRPRASLLIRGSKAGPSEGFNSRLRALGLRAHYWSEVRRPAPRKGSTAASGHLGSAPTTDQGVRRLALEGFTAASDTERGMTLEDSAACAALTAVPLDRVRLTAAKSGLRRHRKLRFARPQGSDSGSASEDDELRFARPQGSDSGSAPEDDELRFARPQGSDSGSASEDDELRFARPQGSDSGSTPEDDEIRSARPQGLDSGSPRKTTNSAPPDHRALTRAQPRKTMNSASLDPRARTQPWPQPTVSASPDPGGSDSTSALEDRLDLDLGGASTSPNPGLGPTTSTGGAINTLPQADSGYGEQDRRPIWLAPLYE

SEQ ID NO: 57459 - protein, 147 aa, Zea mays
  Coding DNA Sequence Number=SeqID_15680
  Homolog annotation: Hit_ID=Q4A2B5; Match level="QueryCoverage=68%, HitCoverage=4%, E-value=4e-07, Identity=35%"; Hit description =Putative membrane protein
  Subcellular localization annotation: CTP_CleavageSite=33; ConfidenceScore=5.26e-01
MGFDVASQIHSPPSRTPDPMLPEATPFTDLLRSCSATWFPLTSVPREHGLPSPRPLPPRHASVLPDPSLSLSRAPPQPSLFPSPRRLVIPPPTLTSGPTCHCLPRRSPDRQGDEDPFPPSCSGTPIASYAADRANPIPPDRSVRSTA

SEQ ID NO: 57460 - protein, 76 aa, Zea mays
  Coding DNA Sequence Number=SeqID_15681
MTMNVVVTPHLPVCLYSAAAFENKSPTVPDYSTSETNFLWVDCSDDTAADAEGTASRTAAEADVGSAADIPEGDSA

SEQ ID NO: 57461 - protein, 229 aa, Zea mays
  Coding DNA Sequence Number=SeqID_15682
MDALGFEYPDHDRLDEEAVGVKKKRVVSILKRQAQRSVEKDKKKRLTKRSKLTPEPSTSKKRKIIASSREEERSSPPKHSTENPSTTSIGVTEILEPQKKDARESAEIEAHKGPSAPGGGNAWKKRCMMNVMRAVLDTPPPVIQKKTAPSVADEGPQQAKSSGGPCGTTLSEIDRLIANVASEKNTEGTIAPETSVSKGKRTEEASSEDKGFDLRDLGGNNFLKRIYLN

SEQ ID NO: 57462 - protein, 1622 aa, Zea mays
  Coding DNA Sequence Number=SeqID_15683
  Gene Ontology: Mol. function=ATP-dependent helicase activity
  Homolog annotation: Hit_ID=Q2QNG8; Match level="QueryCoverage=92%, HitCoverage=98%, E-value=0.0, Identity=51%"; Hit description =Expressed protein
  Pfam annotation: Domain name=BAT2_N; Domain location=67-248; Score= -67.8; E_value=0.086; Accession=PF07001.2; Description=BAT2 N-terminus
MPQRPWRAEIRTGCVIWGFSEIPEYNRTAAAEDARIGRGSDGGMGRRRPLMAARMESRGGAEERERVRARRGEDGRGADGAEETEAMASVAERKASVAERRGRRQRWGATPARKSSMTVLGKVPKPINLPSQRLENNGLDPNLELVPKGTHTWGSKAPSTTPNAWSSSSILSSKNDGSSTSSSHFNVRPTSGGGSRPSTAGSESLGSPNAWGANSRPSSASGTFPSSHLPMATNRPQSAETRPGSSQISRFADNASDNVKASIRTIDRSESSSRGPGFTLSTGDFPTLGSEANSQRGHSSKGRPTSSLGKEVSQGEQVKSLATGTGEVISPSNNHPVDIMKTEHHAHTGGAPVPATSVPNEGLQQQPYPPNFPMPPLQFDSWRAPPGHPPEGMWHRGPVPGGPYRPVGPPGSFPVEPFGYYGQFPPNSEAAGRQGSGHGGYHTKNDVYHPMPHNSYIMNQPVIPVRPVYQGPVLYDGYYGPQANFNNTNVRDPHFVGGPGILNQFPNQNDRFHPGHPQNRPGKHETVPREQLESDKLHVFHQEHPGSLHDNPDRLGGSREFERNVQPAPPLLPHPDGKQTDMNMRADTRDTFSETERTVVLTKSVPNQRGSVGIDHLSVYENTRSHHRETCDGTLRKKFKEDSSVVLDQHPVIKKNAALIEKIESLNNKARNVYAQNLPEPASSKEFKKHKKTTDVSSNDVISTTCTSDQAVSVSHISAVVQRRPNVTIEGTILGPAHSHLTEFSKAEKLGDSINNHLHRRVDSSRNSYHGPCKDRPANKFGSCGRGESYITNSLPVADLGNDIHHGQQPQIASQLQPVIVPDDMPASLDYESQNKKQDAASNAQNNQRAKMKELAAERAKRMKAEEEERIKNQKAKALAKLEELNRRSSVLQKKSNDTKVETDDAHDKQQIGLDVNAKLDTSTEQHDVVTPDRLTALLPPNDPNHTMVQIQAQSTAQSNALDGGKAHDAHTTSSLVKNTHSNMEHVVQKSISQSHNISMVKTKQGYRKRQVVSEEKISGEKASASVTTDSSVQKNVDVPVDTVTAVVAPHDDPPTQNKKGTRHLRSKKKVDDASVISKHPPVVFNEQNTVKISTEPKTHTGGVIISSSIVPIEGTIVTVGSITVGGLSLTAMNQEHVNSADGTNSTESGLSRPQQARKSGKHQHVLRPVEKPHGNDGVLWAPDMLPLHNEQSDGAMPTAAVADVTQPAGKAINDGENVTRTKRAEMERYVPKPMSKELQQHNPSHDKEAIDKPGAAKSHPAAEPKKTSKGHGGKSNPSWRKRDPDQPAMVAPNSVDQADNSYESKEVQNCTDMNQPVELGKEDTQLKSNVDAAAENSSAPAQTVPLSAGGAKEHSAANRQRRQHFKAQRNEASSYSNESKVREGKNDSVYQSASPVIDSNSSNHKNVPRSDVKNSGIVSHSRAWKPKTNSHPQNSSDGKIAVEGKVDSHGGRLELNMPKGSDTITHQDTSSKPMKRSDGTDEASHSKQENLTQEDGNQKIETGQEQANPAPRRQGQPNARYHRGGGAHRGRGGYDTGRPNHGTNAERWKGGSHLEYQPVGSQNKAGGDFQLSQGMEDRTEGPPASGQAFGERGHSRGLRPAGRFVRRNTASTSTTNSHQHE

SEQ ID NO: 57463 - protein, 121 aa, Zea mays
  Coding DNA Sequence Number=SeqID_15684
  Subcellular localization annotation: CTP_CleavageSite=77; ConfidenceScore=5.13e-01
MAHEASSLPAVRVYPATMLVDHTVILDRPSVSVKGPVQQGSPPAATPATGSPSVGAGGASSRGTWERRLADSTSYCPAAPAPGADAPAPHAGGGATSPSGWTGQSLGDEADAPQEERARKE

SEQ ID NO: 57464 - protein, 92 aa, Zea mays
  Coding DNA Sequence Number=SeqID_15685
MEYEGSDRPHATRDARGGAPRDEAQTEEHHEPLRSCILLVVIFLTRIFLDGSGHLVTTTSHLVLDSRGHVSVIAVPCRDGEHHKVMRVAWDG

SEQ ID NO: 57465 - protein, 132 aa, Zea mays
  Coding DNA Sequence Number=SeqID_15686
METTPGEGWARLRTTNGLLATPWGLVGGAQPWLRHRREQGSRSVAHVEEKTRGEGTAATGSRGRGIEQGRGAPRLGSSRVWRGRGAGQTWAQHVRREQRRRGETGRLLRAGREPLAALADAIHFALHVLVAR

SEQ ID NO: 57466 - protein, 88 aa, Zea mays
  Coding DNA Sequence Number=SeqID_15687
MEQEHLHLAMVHSLYSSLSQLDSTNGVHAGTEAFVMAPIFSLRDLGMCIVPRLFPEGRGCLWCNLCSGKEEGVEADLQEFQDFVEFED

SEQ ID NO: 57467 - protein, 486 aa, Zea mays
  Coding DNA Sequence Number=SeqID_15688
  Gene Ontology: Mol. function=protein binding; Cellular component =cellulose and pectin-containing cell wall; Biological process =protein amino acid phosphorylation
  Homolog annotation: Hit_ID=Q6K8U3; Match level="QueryCoverage=87%, HitCoverage=95%, E-value=1e-150, Identity=65%"; Hit description =Leucine-rich repeat-like protein
  Pfam annotation: Domain name=LRR_1; Domain location=133-154; Score =1.7; E_value=1.4e+02; Accession=PF00560.23; Description=Leucine Rich Repeat
  Pfam annotation: Domain name=LRR_1; Domain location=222-244; Score =7.8; E_value=10; Accession=PF00560.23; Description=Leucine Rich Repeat
  Pfam annotation: Domain name=LRR_1; Domain location=245-267; Score =14.8; E_value=0.32; Accession=PF00560.23; Description=Leucine Rich Repeat
  Pfam annotation: Domain name=LRR_1; Domain location=270-292; Score =5.4; E_value=28; Accession=PF00560.23; Description=Leucine Rich Repeat
  Pfam annotation: Domain name=LRR_1; Domain location=294-316; Score =4.1; E_value=48; Accession=PF00560.23; Description=Leucine Rich Repeat
  Pfam annotation: Domain name=LRR_1; Domain location=318-340; Score =10.3; E_value=3.4; Accession=PF00560.23; Description=Leucine Rich Repeat
  Pfam annotation: Domain name=LRR_1; Domain location=346-367; Score =7.8; E_value=10; Accession=PF00560.23; Description=Leucine Rich Repeat
  Pfam module annotation: Pfam domain module=LRR_1::LRR_1::LRR_1::LRR _1::LRR_1::LRR_1::LRR_1; Domain location=133-154::222-244::245 -267::270-292::294-316::318-340::346-367
MDNHLMSSFTILLLSSFAATVAYPARNELQPNQMKNHHSSVSSYNPQPKDFPTEQLYRAYLIIQRFKNTIISDPKNVTATWIGHDLCGETTYVGFYCGSPAGGDKKLTVTGVILNGYNLHAPTLEGFVNQLPDLALFHAASNNFGGDIPQLTGLGYMYELSVAVKDLQLQARPKRDIPPDSTVGLGGNTHGHGHLGNCIIADFNFSFNVGIGKGHKFPGFTDAKALLLNHNNLSGPLPSNLGFSKLSYLALANNKLTGPIPPSISNLEDSLFEVLLLNNQLSGCLPHELGMLTKAAVIDAGMNQLTGPIPSSFSCLISVEQLNLAGNRLYGQVPDALCKLAGPAGRLANLTLSGNYFTSAGPACAALIKDGVLDVKNNCIPGLTNQRRPAECAAFQSQPKTCPAASTQVTCPAAAASRNAAAPGERKVKDYSSYVTNFDQSDGGSIDPVDSNYVGARVSRYRLVLYVEESLSSNLEEVRVADSIDE

SEQ ID NO: 57468 - protein, 86 aa, Zea mays
  Coding DNA Sequence Number=SeqID_15689
MALHKLCDDGGPQLSYGKQGDVSKDSNRSNSYPSARLRRTSDSHDITPARYMFACACLYSLRDTNRLRSIPELRGIDDQDLVNHWS

SEQ ID NO: 57469 - protein, 127 aa, Zea mays
  Coding DNA Sequence Number=SeqID_15690
MTVNWQSPKQLQVKTLSNSWGLEQLLECLFIRTGSLDDRPEKQCNHEGGDDEDDGFDYAYGNGFWYSFRLERLARLRHTARKSVIPFLPSRLAELPLRHPVTGQSSHLERLHHHLHEEQERQQQELE

SEQ ID NO: 57470 - protein, 83 aa, Zea mays
  Coding DNA Sequence Number=SeqID_15691
MGFSPQTSYSAPWCSIHNPEWFYTMLQTWVKHWIVIYLRQRWSGELSMHTAVRWRLLGIGEQLVGPQSTIATHTTLNSNNESP

SEQ ID NO: 57471 - protein, 104 aa, Zea mays
  Coding DNA Sequence Number=SeqID_15692
  Gene Ontology: Cellular component=mitochondrion
  Homolog annotation: Hit_ID=Q94HS0; Match level="QueryCoverage=99%, HitCoverage=15%, E-value=3e-28, Identity=49%"; Hit description =Putative salt-inducible protein
  Pfam annotation: Domain name=PPR; Domain location=21-55; Score=48.0; E_value=3.1e-11; Accession=PF01535.11; Description=PPR repeat
MPEARRLFDQMAQVGIQVNTITFNVLIDGYAKSGQMDQASAAYREMQARGLVPDSCTFNIIAARAHKFGLCWDHRLNDAWELLLGAIEFGGPLPVTGFSGFLSA

SEQ ID NO: 57472 - protein, 473 aa, Zea mays
  Coding DNA Sequence Number=SeqID_15693
  Gene Ontology: Mol. function=GTP binding; Cellular component =membrane; Biological process=Golgi to plasma membrane transport
  Homolog annotation: Hit_ID=Q5JLH8; Match level="QueryCoverage=92%, HitCoverage=60%, E-value=0.0, Identity=78%"; Hit description =Putative ERD4 protein
  Pfam annotation: Domain name=DUF221; Domain location=39-437; Score =510.6; E_value=1.8e-150; Accession=PF02714.6; Description=Domain of unknown function DUF221
MNRLDASDLNVEAPHKGGIAWARPSIIGSSTHSGDLEAEEREKIVKDPKSIVPAAFVSFRSRWGAAVCAQTQQTSNPTVWLTEWAPEPRDVYWDNLSIPFVSLTVRRLIIAVAFFFLNFFYVFPIAFVQSLANLEGIEKAAPFLKPLIEEHTIKSFIQGFLPGIALKIFLILLPSILMFMSKVEGLTSISSLERRSASKYYIFIFFNVFLASIIAGSALEQLKSYIHQSANEIPRTIGEAIPMKATFFITYTMVDGWAGVAGEILRLKPLVIFHLKNFFLVKTEKDREEAMDPGSIGFDSSEPQIQLYFLLGLVYAAVTPFLLPFVLIFFGFAYVVYRHQLLLLGLLSTKGAGQSTPVLLVLPVVTFYFHKYCNNRYKPTFVKCPLQEAMKKDTLERAREPGFDLKGYLMNAYIHPVFKGDGDDDKFSVADEPEAEQVLVATKRQSRRNTPVPSKYNGSESPSLPEIVNDQRL

SEQ ID NO: 57473 - protein, 373 aa, Zea mays
  Coding DNA Sequence Number=SeqID_15694
  Gene Ontology: Mol. function=transferase activity, transferring glycosyl groups; Cellular component=endoplasmic reticulum membrane; Biological process=GPI anchor biosynthetic process
  Homolog annotation: Hit_ID=Q2QQC9; Match level="QueryCoverage=99%, HitCoverage=71%, E-value=1e-133, Identity=64%"; Hit description =Expressed protein
  Pfam annotation: Domain name=Mannosyl_trans2; Domain location=1-373; Score=120.6; E_value=4.5e-33; Accession=PF04188.3; Description =Mannosyltransferase (PIG-V))
  Subcellular localization annotation: CTP_CleavageSite=63; ConfidenceScore=5.02e-01
LSVLILKDQKAAYRASVLFCFNPASVFYSSLYSESLYALFSLGGIFYVFSGANTVAVIMLALSGSARSNGALNAGYFCFQALLQAYDATVQKKRPLLAIHALVAGALRSIFIFLPFFAFQAYGYLNICVHGSSDELRPWCKAKVPLLYGFIQSHYWGVGFLRYFQVKQLPNFLLASPVLSLAVYSIVHYAKLLHRCFQRTSVHKQIITALEKRPVVSYRRSDDATILSEPPAGLTKKAQDGDKHTAVPYSICWTGSSKAKQRKPVATEIAPATFHDSTTPANQNIEEDQDTCSILLLPFVLHLAFMAFTALFVMHVQVSTRFLSASPPVYWAAAHVLASPSRANRRWGYLICVYFIAYILLGSLLFSNFYPFT

SEQ ID NO: 57474 - protein, 143 aa, Zea mays
  Coding DNA Sequence Number=SeqID_15695
  Gene Ontology: Mol. function=nucleic acid binding; Biological process= DNA integration
  Homolog annotation: Hit_ID=Q3LRV2; Match level="QueryCoverage=94%, HitCoverage=77%, E-value=6e-30, Identity=44%"; Hit description=Gag
METSTSHGKASSRESGAKGREESPPRVKSHRSGDKKKKMKKVVYYETDSLSPSTYSSDASSVTSKRHERKKFSKPPVFYGEDYCMWSDKMRHHLTSLHAKIWDIVEFEAQVPSVGDEGYDWDEIAQIQHFNSQATTILVGDHN

SEQ ID NO: 57475 - protein, 156 aa, Zea mays
  Coding DNA Sequence Number=SeqID_15696
  Gene Ontology: Mol. function=protein serine/threonine kinase activity; Cellular component=cytoplasm; Biological process=protein amino acid phosphorylation
  Homolog annotation: Hit_ID=Q5JLD8; Match level="QueryCoverage=98%, HitCoverage=43%, E-value=3e-65, Identity=65%"; Hit description =Putative serine/threonine kinase
  Pfam annotation: Domain name=NAF; Domain location=56-114; Score=22.0; E_value=3.2e-05; Accession=PF03822.5; Description=NAF domain
MEQRIRIEEIRSDEWFQKNYEPIKEIENEEVNLDDVNAAFDDPEDDNEDAFEDETGPLTLNAFDLIILSQGLNLAALFDRRQMRVEGLNADKTSHLSVMVEVFEVAPSIFMVELQRAAGDTSEYNTFVNNYCSKLDDIIWKFPTEKGKSRIPRLSK

SEQ ID NO: 57476 - protein, 405 aa, Zea mays
  Coding DNA Sequence Number=SeqID_15697
  Gene Ontology: Mol. function=RNA-directed DNA polymerase activity; Cellular component=mitochondrion; Biological process=RNA-dependent DNA replication
  Homolog annotation: Hit_ID=UPI00004C1731; Match level="QueryCoverage =89%, HitCoverage=25%, E-value=1e-172, Identity=80%"; Hit description= UPI00004C1731 related cluster
  Pfam annotation: Domain name=rve; Domain location=135-283; Score =79.5; E_value=1e-20; Accession=PF00665.16; Description=Integrase core domain
MKNSHCRDPKMEAYCDEPEAPSAAEGEALRVEEEQNGVPPNRNWQTLKELYHCSPSGILQRCMSIIEGQELLQEIHSGACGHHAAPRALVGNAFQQGFYWPTAMADTTRIVRTCLGCQFYARQTHLPAQALQTIPITWLFAVWGLDLVGPLQKAPGGFTHLLVAIDKFSKWIEAVAFFTNIIDRFGVPNSIITDNGTQFTGRKFLDFCEDHHIWVDWVVVAHPMTNGQVERANDMILQGLKPRIYNDLNKFGRRWMKELPSVVWSLRTTPSRATGFTSFFLVYGVEAILPTDLEYGSPRTRAYDDQSNQASREDSLDQLEEARDMALLHSARYQQSLRRYHARGVGDLVLRLRQDARGRHKLTPPWEGPFIIAKILKPGTYKLANSQGEVYSNAWNIRQLRRFYP

SEQ ID NO: 57477 - protein, 283 aa, Zea mays
  Coding DNA Sequence Number=SeqID_15698
  Gene Ontology: Mol. function=transferase activity, transferring glycosyl groups; Cellular component=endoplasmic reticulum membrane; Biological process=GPI anchor biosynthetic process
  Homolog annotation: Hit_ID=Q2QQC9; Match level="QueryCoverage=84%, HitCoverage=49%, E-value=5e-91, Identity=68%"; Hit description =Expressed protein
  Pfam annotation: Domain name=Mannosyl_trans2; Domain location=1-268; Score=2.3; E_value=3.3e-11; Accession=PF04188.3; Description =Mannosyltransferase (PIG-V))
MLRSVQDTDELSAQSGRLSVLILKDQKAAYRASVLFCFNPASVFYSSLYSESLYALFSLGGIFYVFSGANTVAVIMLALSGSARSNGALNAGYFCFQALLQAYDATVQKKRPLLAIHALVAGALRSIFIFLPFFAFQAYGYLNICVHGRSAELRPWCKAKVPLLYGFIQSHYWGVGFLRYFQVKQLPNFLLASPVLSLAVYSIVHYAKLLHRCFQRTSVHKQIITALEKRPVVSYRRSDDATILSEPPAGLTKKAQGTTAISTVYVLLCFEKPLLIYLDAKSI

SEQ ID NO: 57478 - protein, 37 aa, Zea mays
  Coding DNA Sequence Number=SeqID_15699
MGDTTMMAWAEAGGEDRDGVGDSIRGLHYWISLIQLI

SEQ ID NO: 57479 - protein, 697 aa, Zea mays
  Coding DNA Sequence Number=SeqID_15700
  Gene Ontology: Mol. function=acyl-CoA dehydrogenase activity; Cellular component=peroxisome; Biological process=fatty acid metabolic process
  Homolog annotation: Hit_ID=Q69XR7; Match level="QueryCoverage=94%, HitCoverage=94%, E-value=0.0, Identity=82%"; Hit description =Putative acyl-CoA oxidase ACX3
  Pfam annotation: Domain name=ACOX; Domain location=535-696; Score= -18.6; E_value=8.1e-06; Accession=PF01756.9; Description=Acyl-CoA oxidase
  Pfam annotation: Domain name=Acyl-CoA_dh_1; Domain location=329-490; Score=2.4; E_value=0.00048; Accession=PF00441.14; Description=Acyl -CoA dehydrogenase, C-terminal doma
  Pfam annotation: Domain name=Acyl-CoA_dh_M; Domain location=192-252; Score=71.7; E_value=2.4e-18; Accession=PF02770.9; Description=Acyl -CoA dehydrogenase, middle domain
  Pfam module annotation: Pfam domain module=ACOX::Acyl-CoA_dh_1::Acyl -CoA_dh_M; Domain location=535-696::329-490::192-252
MDLTSPSPAARRAAAIARHLAAAAAPIPASSPLEPSCCLSYVPPESTERPAAFAPADLRLLLDGHDLPTRDWLFRAMEESPLFRSRSSRTGSRVFVAPDFNDGKEGQREATMRRIAYLNRRGVFRGWLTEDGAAAELRKLALLDCIAIYDHSLAIKIGVHFFLWGSAIKFLGTKRHHDKWLVATENYDIKGCFAMTELGHGSNVRGIETIATYDSETREFIINTPCESAQKYWIGGAANHATHTIVFCQLHINGRNEGVHAFVAQIRDEDGTVLPNIHIADCGHKIGLNGVDNGRIWFQNIRVPRENLLNLVADVLPDGRYVSMIDNPDQRFAAFLSPLTLGRVNIAVNSVYISKVSLAIAVRYSLSRRAFSIAPDAPEMLLLDYPSHQRRLLPLLAKVCLMSSAGNFMKNMYVKRTPEMSKDIHIYSSALKATLTWQNMITIQECREACGGQGLKTENRIGIFKSEFDVQSTFEGDNNVLMQQVSKALYAEFLGAQKKQQPFKGLGLEHLNGSSPVIPDKLTSSILRSSKFQMDLFCLRERDLLKQFVEEVSLHLAQGESREKALMLFLCLSLIQVTFSQSYQVAEDLARAFTERTILQIFLEDEMNVPSGSLKEVLGLLRSLYVMVNIDESTSFLRYGHLSRDNVALVRKEVLKLCSELRPHALAVVSSFGIPDAFLSPLAFDWIEANALSTGSH

SEQ ID NO: 57480 - protein, 434 aa, Zea mays
  Coding DNA Sequence Number=SeqID_15701
  Gene Ontology: Mol. function=zinc ion binding; Cellular component =cellulose and pectin-containing cell wall; Biological process =metabolic process
  Homolog annotation: Hit_ID=Q941U5; Match level="QueryCoverage=94%, HitCoverage=60%, E-value=1e-156, Identity=67%"; Hit description =Ankyrin-like protein
  Pfam annotation: Domain name=DUF248; Domain location=180-434; Score =247.9; E_value=2.1e-71; Accession=PF03141.7; Description=Putative methyltransferase
  Pfam annotation: Domain name=Methyltransf_11; Domain location=301 -396; Score=22.8; E_value=0.00031; Accession=PF08241.2; Description =Methyltransferase domain
  Pfam annotation: Domain name=Methyltransf_12; Domain location=301 -394; Score=22.4; E_value=0.0016; Accession=PF08242.2; Description =Methyltransferase domain
  Pfam module annotation: Pfam domain module=DUF248::Methyltransf _11::Methyltransf_12; Domain location=180-434::301-396::301-394
  Subcellular localization annotation: CTP_CleavageSite=86; ConfidenceScore=5.09e-01
MKALGAHVVDLLRGPHLLRAAVLAFAVAVAFLVGYHWPNAYPRLVFFSSASSSLASRSSRSPAVALSPNSNISFEPSLIPTPTTPPASPAPNACPPPSLPPPTPAPPPPLLPPPPPARLGIVGEDGAMQDDFDIGSVGANDTDLASDETAPQEPSNGGASGGPPRVRIGRFLVCPESMREYIPCLDNEEEIKRLPSTERGERFERHCPAQDKGLSCLVPVPKGYKAPIPWPQSRDEVWFSNVPHTRLVDDKGGQNWITKVKDKFRFPGGGTQFIHGANRYLDQISQMVPNVAFGSHTRVVLDVGCGVASFGAYLLSRDVLTLSIAPKDVHENQIQFALERGVPAMVAAFATRRLLYPSQAFDMIHCSRCRINWTRDDGILLLEVNRLLRAGGYFAWAAQPVYKHEQAQQEAWKGGGVRTHALMKEGQETLGEAV

SEQ ID NO: 57481 - protein, 64 aa, Zea mays
  Coding DNA Sequence Number=SeqID_15702
MELRTLLRAAVLLHRVLLELESCLCWTSNSHAHHRDTWPSASPSETSSVDGTHIDMVYIGVEHV

SEQ ID NO: 57482 - protein, 914 aa, Zea mays
  Coding DNA Sequence Number=SeqID_15703
  Gene Ontology: Mol. function=microtubule motor activity; Cellular component=microtubule associated complex; Biological process =microtubule-based movement
  Homolog annotation: Hit_ID=Q2HU33; Match level="QueryCoverage=88%, HitCoverage=76%, E-value=0.0, Identity=62%"; Hit description=Kinesin, motor region
  Pfam annotation: Domain name=DHC_N1; Domain location=257-839; Score= -270.3; E_value=0.081; Accession=PF08385.2; Description=Dynein heavy chain, N-terminal region
  Pfam annotation: Domain name=Kinesin; Domain location=100-437; Score =569.8; E_value=2.7e-168; Accession=PF00225.13; Description=Kinesin motor domain
  Pfam module annotation: Pfam domain module=DHC_N1::Kinesin; Domain location=257-839::100-437
  Subcellular localization annotation: CTP_CleavageSite=33; ConfidenceScore=5.53e-01
MEASTPTARRGGAPADYAAMSLSPSPSFSHTPRSGASSSAHKPPTTSRHRDRGPLLFNGNSNSNSSIAAQQAAQLQQTSTTTSSKGSSGSGGVNIQVLLRCRPLSDEERRVGTPVVVTCNDQRREVSVAQNIANKQIDRTFAFDKVLGPKSQQQDVFNHAVVPLVSEVLDGYNCTIFAYGQTGTGKTYTMEGGGGKALNADLPTDAGVIPRAVKCIFDILEAQSAEYSMKVSFLELYNEELTDLLAAEESKFSDDKSKKPLALMEDGKGGVFVRGLEEELVSSAAEIYRILERGSAKRKTAETLLNKQSSRSHSIFSITIHIKECTPEGEEMIKCGKLNLVDLAGSENISRSGARDGRAREAGEINKSLLTLGRVINTLVEHSGHIPYRDSKLTRLLRDSLGGKTKTCIIATISPSVHCLEETLSTLDYAHRAKHIKNKPEVNQKMMKSALIKDLYFQMDRLKQELYAAREKNGVYIPREQYIADESEKKHDGGILQAMSEKLDRLELVLESKDKQLEELHGLYESQKVLSADLSDQLQTLQKRMKETECTLADLETRYMKANDTIKEKQYLIENLLKSEKVLVGEAQTLRSELENTAGDLHGLFSKLERKEKIEDKNGSIIQYFHSQLIQEMNVLHRTVSTSVSQQERQLKALEEEMQSFVTSKGKVAGGLQEHVRKLKESFNSRIAELHGFANELKHKSMLSFENLNSQVTTHTSSLEDCMKDLLVDADELLIALQNGLSQHEVNFATFIEQQHEGLSRNLEGTKFVSATTMNFFRTIDSHALGLLKILEESKMEHQKQLFQLQKKFEAVVADEEKYLMEKVAGLFAESNARKKNMVQDDICSLNRTVSESSNNLQTETTKLHDFTSSMKEQWEGYMKKTEEAFQQNVSSIEQKRGFLAGNFQQWQVVYLNS

SEQ ID NO: 57483 - protein, 472 aa, Zea mays
  Coding DNA Sequence Number=SeqID_15704
  Gene Ontology: Mol. function=protein binding; Cellular component =Golgi-associated vesicle; Biological process=vesicle docking during exocytosis
  Homolog annotation: Hit_ID=Q6ZGF2; Match level="QueryCoverage=97%, HitCoverage=75%, E-value=0.0, Identity=82%"; Hit description =Putative vacuolar protein sorting homolog
  Pfam annotation: Domain name=Sec1; Domain location=58-470; Score =130.7; E_value=4.1e-36; Accession=PF00995.13; Description=Sec1 family
MVLITLVRDYIDRMLHDIPGMKVLVLDPQTVRAPSPGRPQLRLAARSSPIFDLTRSVPSQVGMVSVVYSQSDLLRKEVFLVETMDNASSSRESMAHLKAVYFLRPSANNVQKLRRQLAMPRFAEYHLFFSSILKVPQIQILADSDEQEVVQQVQEFYADFCAIDPYHFTLNIQNNHMYMLPTVVDPPGMQGFCDRAVDGIASVFLALKRRPVIRYQRTSDVAKRIAQETARLMYEQESGLFDFRRTENSSLLLVIDRRDDPVTPLLNQWTYQAMVHELIGIENNKVDLMGFANIPKDQQEVVLSSVQDDFFRANMFENFGDLGMNLKRMVDDFQHLSKSSLNLQSIVVLGDMAKFVSNYPEYRKTHGNVTKHVNLVSELSRIVEERKLMLVSQTEQELACTSGQAAAFEAVTSLLNNESVSDIDRLRLVMLYALRYEKESPVQLMQLFNKLASHSAKYKSGVSVSLGRSLAL

SEQ ID NO: 57484 - protein, 169 aa, Zea mays
  Coding DNA Sequence Number=SeqID_15705
MAEERNKEECPVADKRGKIDDRTLKMAVLCCISLVIVAEFKDEQLRLFKTGIMPHPLTYQLRLSRSKPPSTRKPEAKKQKGTTEGGVKAETNFNSGAFRKESNVEDANVACLRWTRFSPMEDSAGESNALNTGWEAAPTGVAEAFAQVPSTTSDQDSGQSKLPPPSSLP

SEQ ID NO: 57485 - protein, 106 aa, Zea mays
  Coding DNA Sequence Number=SeqID_15706
MAGERRRGRWRGEQSRSRSGEAVKVRARSMESRRARGVVRVVTWRWSGSGGSGEVVYVSAWRGLHGDGRVAGVAGGSVESKAEEAVRKENTSHRLSTVHSASPLSE

SEQ ID NO: 57486 - protein, 105 aa, Zea mays
  Coding DNA Sequence Number=SeqID_15707
MEVGSIWPVDAQDGRSMAGGGSRGGEIAGEAIQCNGGGENGALGPWGGGEAQELTQLDPRLLERGGSAHRSGGRTRRRGSIELGGGVWGGRGRCEELGELGAVLL

SEQ ID NO: 57487 - protein, 521 aa, Zea mays
  Coding DNA Sequence Number=SeqID_15708
  Gene Ontology: Mol. function=nucleoside-triphosphatase activity; Cellular component=membrane
  Homolog annotation: Hit_ID=Q69XZ5; Match level="QueryCoverage=92%, HitCoverage=62%, E-value=1e-180, Identity=68%"; Hit description =Putative transcriptional regulator
  Pfam annotation: Domain name=UPF0261; Domain location=2-442; Score =477.9; E_value=1.2e-140; Accession=PF06792.2; Description =Uncharacterised protein family (UPF0261)
MEVLCIGTADTKFEELLFLAAQLRSALAASGSDSKVQVSIVDVSTTEKTTANDFKDIIFIPRNTILSCHLGVDQHNLPDNRGEAIALMSKALQSFLKKRYDSGMLVGAVGLGGSGGTALIAPALRLLPLGVPKLIVSTVASGHTTPYVETSDLVLFPSVVDICGINSVSRVILSNAAAAFAGMVHGILSASNESDETSTKPTVGITMFGVTTPCVNAVKDRLNKEGYETLIFHATGVGGKAMEDLVRGGFIQGVLDVTTTEVADHIVGGIMACDETRFDAIIENKIPLVLSVGALDMVNFGARDTIPLAFADRNIHVHNEQFDYSKNLGAESSSIFPVQVLVEVSLMRTTVEENKKFARFIADKINKSSSKVTVCLPQKGISAIDAPGMPFYDPEATSTLLGELNTLIQRTDIREVKLFPYHINDPEFANALVDAFLSMDVQASSSAQPKQDLNIGKSCSGQKISDSSIIWRTPVDFPDAKPVEVDDHFESSWTHEKIRKKFNDPWCILLCFMHHPDEPKA

SEQ ID NO: 57488 - protein, 58 aa, Zea mays
  Coding DNA Sequence Number=SeqID_15709
MASTSITSQLDGTKRVRSLRASDGGRHRPNPSIGQGLTGARHVQQTRWTDKVAGSKDV

SEQ ID NO: 57489 - protein, 80 aa, Zea mays
  Coding DNA Sequence Number=SeqID_15710
MGCLFGGGTDPEQGWAFLSMTRPDPAGSAHLMERQGIAGGARGRRRGHRAGLRKGLQPPWALGARRREGKGERWRFGLQD

SEQ ID NO: 57490 - protein, 63 aa, Zea mays
  Coding DNA Sequence Number=SeqID_15711
NWRSNVETQVKTCQNELQGLKKGLDSKVEQLKSVKMKAIRSTVQEEKGNLPAQNTTLGLVWDK

SEQ ID NO: 57491 - protein, 187 aa, Zea mays
  Coding DNA Sequence Number=SeqID_15712
  Subcellular localization annotation: CTP_CleavageSite=40; ConfidenceScore=5.16e-01
MRSSSSSGAKPESEPCGRAMRSSSSFGAKPESEPWGQAMRSSSSSGAKPESEPWGRAKRSSSSSGAEPESEPWGWAMRSFLWRLRPDLAAVSLTLSSGTAVGAAQASLSSCQACQWSDEATFALNTPAIRSAGVATWPRLLLGEDWASGEPKLCADGGYQLRFRSLEGTPNYGPRQIHNQGSGYAPE

SEQ ID NO: 57492 - protein, 129 aa, Zea mays
  Coding DNA Sequence Number=SeqID_15713
MSMKFVRRLSLLNDAKGHSEWPADLGSPSGTLLPNGSLPRGEIYGSCKEDDTLRRHGLPSGDIPLVFDPKPEPTKTTDQAKDGGKKSFEVPGAREKVKETRNPKPGVKKKTCKVKVDRVKSYGASRITT

SEQ ID NO: 57493 - protein, 150 aa, Zea mays
  Coding DNA Sequence Number=SeqID_15714
  Gene Ontology: Mol. function=sequence-specific DNA binding; Cellular component=nucleus; Biological process=regulation of transcription, DNA-dependent
  Homolog annotation: Hit_ID=Q41828; Match level="QueryCoverage=46%, HitCoverage=44%, E-value=3e-27, Identity=84%"; Hit description=MADS box protein
  Pfam annotation: Domain name=SRF-TF; Domain location=39-89; Score =89.9; E_value=8e-24; Accession=PF00319.9; Description=SRF-type transcription factor (DNA-binding and dimerisation domain)
  Subcellular localization annotation: CTP_CleavageSite=26; ConfidenceScore=5.11e-01
MTIVTTDLSCGPSSKAKGGQPAVTVSGGDRQGRSKIEIKRIENMTNRQVTFCKRRNGLLKKAYELSVLCDAEVALVVFSSVAASTSTPTTDEELDDEDDQIFHQMQGANSPKSTRNFAEASHSKHDDLVGKDVISGGYKKLEWLFWTKKA

SEQ ID NO: 57494 - protein, 128 aa, Zea mays
  Coding DNA Sequence Number=SeqID_15715
  Homolog annotation: Hit_ID=Q6QP51; Match level="QueryCoverage=20%, HitCoverage=12%, E-value=9e-07, Identity=85%"; Hit description =Putative growth-regulating factor 1
MEAQAHTSCNRRAGYYVRETAPPLAPVPRPLDCGSGAATRGNPAHGRTVPTKHIGHGSVSRGTRRDGRYGQKWADSNGGGTGKGDTLKGILLREGSGPRALLLIRGSKVGPSEGFDSRLRPLGLRIHY

SEQ ID NO: 57495 - protein, 197 aa, Zea mays
  Coding DNA Sequence Number=SeqID_15716
  Subcellular localization annotation: CTP_CleavageSite=91; ConfidenceScore=5.52e-01
MALASLPSRILLSVASHIPCLPLCPSIAPHSASSGLRPGVLAVSRRLPGARARTGQRSRMLTMASFGLSYPTSAVTTRCSVHGVVGGRLVQSAMEGAVGQMIILILGIVVVAPMTFYTINFMEMRDVDISASLTGGLSATGRRPNDWPPRHLWPWFETGLAGDEDPAATYDFVGFKMWYAIFLTALRQSNTALKTLL

SEQ ID NO: 57496 - protein, 211 aa, Zea mays
  Coding DNA Sequence Number=SeqID_15717
  Homolog annotation: Hit_ID=Q10PY1; Match level="QueryCoverage=85%, HitCoverage=35%, E-value=3e-25, Identity=42%"; Hit description=F-box domain containing protein, expressed
MGKRKRSSCQRDNHNDSLASKIMRTRIPDLPEAALNPGIEEVTLWLFHTRRIYEFPCSLLSDGVRNSLRYLKLRCCALRPTVELAPMRSLTSLHLSFVSIKWNGLKRLLSNSLALEELELVCCDKIVCLKIPSALQRLNSLNIFGCSALKVLESKAPNLSSLSLSDFGGGLVFSLVKTLQMKKLITESTVYDARTRLPSIMPNLETLVINS

SEQ ID NO: 57497 - protein, 159 aa, Zea mays
  Coding DNA Sequence Number=SeqID_15718
MGDLPQPPLPAKYMERCEIHTKRLSDDSAAVEILGAVQTSAPRQEYGFGWLLTVRPLSAPSPRRRPRRVYAPAVNFPCCAPKRCSWNYLSVTIVAADPDLSVAGLRPVVTIGESPAQLSTIITVTSSAIRIKDEQTTVKSEVQQEEIAEQELIEGKLCP

SEQ ID NO: 57498 - protein, 68 aa, Zea mays
  Coding DNA Sequence Number=SeqID_15719
MESNHHQKGSQKIKGCLDWSDDCNLADGEYILVPEQGAAQEVAPDPAPEPAPEDLPATDLEGKPRFYA

SEQ ID NO: 57499 - protein, 329 aa, Zea mays
  Coding DNA Sequence Number=SeqID_15720
  Gene Ontology: Cellular component=cellulose and pectin-containing cell wall
  Homolog annotation: Hit_ID=Q67X77; Match level="QueryCoverage=88%, HitCoverage=88%, E-value=1e-61, Identity=42%"; Hit description =Putative phi-1
  Pfam annotation: Domain name=Phi_1; Domain location=40-329; Score =364.0; E_value=2.3e-106; Accession=PF04674.3; Description=Phosphate -induced protein 1 conserved region
MGKQATSCVGCGAVHLAVLLLSLARPCHSSLYRPPPPSAMVYHAGEVLDGAVPVSVLYYGAFSPHQKAVIADFLLSLSPRGRQPQRHGFGTPGPAPAPSVARWWETVDRYARKAGREPPRVLLANQVHDEACSLGKTLSRVQVERLAARLGVAPGGVAVVLTAADVAVEGQCSSACGTHGASAPGGAAHVWVGDAAVQCPGRCAWPFHPAEGFAYGARHVPGRGRGETLAAPNGDVGVDGMLINLAALLAGAVTNPYGHGYFQGDPGAPVEVAAACPGVYGRGAYPGYPGAVRLDTATGAGYNVVGRNGRKYLVPALVDPDTNSCIIMT

SEQ ID NO: 57500 - protein, 172 aa, Zea mays
  Coding DNA Sequence Number=SeqID_15721
MNELPYGPYPEEVSKDADDAAGGKKRRRAREVKGVVWHRTQRHRLALLKVRLRHARNQWSFDGEGPERVLEEEEGPKAPLRLVDHHRANGSKSKDAPTKAAIVGKAMPPPVRPAIVVVMLQFLGAMKALRNATEATKSTFEQLHYVGAFTSQVASGAFIKSITSQLRSRRWS

SEQ ID NO: 57501 - protein, 53 aa, Zea mays
  Coding DNA Sequence Number=SeqID_15722
MGKNVELVKDNPCTPPCAVARPAEALTLASLIDDEKKLDDCQFDLWKQSYVAT

SEQ ID NO: 57502 - protein, 226 aa, Zea mays
  Coding DNA Sequence Number=SeqID_15723
  Homolog annotation: Hit_ID=Q10RH2; Match level="QueryCoverage=67%, HitCoverage=32%, E-value=7e-75, Identity=86%"; Hit description=XS domain containing protein, expressed
  Pfam annotation: Domain name=XS; Domain location=82-195; Score=58.5; E_value=2.2e-14; Accession=PF03468.5; Description=XS domain
MYIIVLDSIPSYMAANPTSSKDFADVHGLVMHAYNPPNADSLVDHLGLHKALCVLMGWDYTKVPENFKGYQSLPSDLVQASREDLIVWPPTVIIHNTSTGRKKDGRLEGLGNKEMDKKMTELGFSGGKSKSLYGKEGHMGLTLIKFANNSSGLKEAERLAEYLERQDRGRIEGVIFRNPCVNLREVEDDKGSEWISHELMLRSQLDLKRPKSRCDKCADQMCDEGN

SEQ ID NO: 57503 - protein, 57 aa, Zea mays
  Coding DNA Sequence Number=SeqID_15724
MDKLETVLRPKEESVQSDRYEPYPYDVPTTFFRFLASGLRKYHIKPHMRTQEYAILP

SEQ ID NO: 57504 - protein, 153 aa, Zea mays
  Coding DNA Sequence Number=SeqID_15725
MSYIESLRDFDIDCGKGLSSYSTISQVIDHPTMIGRLSASIKVSACEALVLDLEHGRLTLSLERSSGGCRALVTTAREEYQSRKQRQGVRSRSGAEPVLSMPGLVLGLWWASTSARGGRAAGHTRDSEEHAKPRIAPLPLLCHWCFTLCIVEG

SEQ ID NO: 57505 - protein, 217 aa, Zea mays
  Coding DNA Sequence Number=SeqID_15726
  Homolog annotation: Hit_ID=Q41745; Match level="QueryCoverage=26%, HitCoverage=15%, E-value=3e-23, Identity=96%"; Hit description=1 -acyl-sn-glycerol-3-phosphate acyltransferase PLS1
MEIINSAPDQGPNFLFFLLQQRNINLALLCEMLQLAEKPTVFIQTSHARVKEFFGFDKLVAKSCCLKKTIVHEFKQDFEQLEHNNVVMSDRQGAQLHGPKIQALLINELLKGFHNVYRANLPINRAQNHISTLRFHSFLTRFRAALAELDRSAWENMMKTCMTPVTSAIPAAVNATHLHVERSYVHLKNSMAPNNSRHDQNRVTCSISGNRKSVARG

SEQ ID NO: 57506 - protein, 427 aa, Zea mays
  Coding DNA Sequence Number=SeqID_15727
  Gene Ontology: Cellular component=chloroplast; Biological process =translation
  Homolog annotation: Hit_ID=Q6YTV7; Match level="QueryCoverage=59%, HitCoverage=83%, E-value=4e-89, Identity=72%"; Hit description =Putative Ribosome recycling factor, chloroplast
  Pfam annotation: Domain name=RRF; Domain location=109-292; Score =225.6; E_value=1.1e-64; Accession=PF01765.9; Description=Ribosome recycling factor
  Subcellular localization annotation: CTP_CleavageSite=51; ConfidenceScore=5.52e-01
MALHAVSSAAVSSPLRALSRSLPQRPGCGCLPKQSVMIYSTKFARPQAGPVDFAGRPLVLGRSDKRRVVTDRDIFPIAVLMHATIEEIEAEKSLIEDQAKEKMEKAIETVQANFNTVRTGRANPAMLDRIEVEYYGTPVNLKSIAQISTPDATSLLIQPYDKSSLKLIEKTIVAANLGVTPSNDGEVIRVTVPPLTSDRRKDIFSLTFTMVTPWKQKYMQELSKTVAKLAEDGKVAIRNIRRDAIKAYDKLEKEKKLSEDNVKDLSADLQKVTDEYMKKIESIQKQKEQNSDEAQSKDSIQPKRGLQERLSWRCFLVTMHGSLPAWKLESVSMHEYIACLESTRGVGQRLDVAIGINSLIKRSQSRTAHGSAVALHPSSALDPQFPRLPSSSRIGSHPRTPPADQAVAVPSILESSSSILEPSGSHS

SEQ ID NO: 57507 - protein, 476 aa, Zea mays
  Coding DNA Sequence Number=SeqID_15728
  Gene Ontology: Mol. function=oxidoreductase activity; Cellular component=integral to membrane; Biological process=electron transport
  Homolog annotation: Hit_ID=Q84S04; Match level="QueryCoverage=81%, HitCoverage=68%, E-value=1e-54, Identity=35%"; Hit description =Putative cytochrome P450
  Pfam annotation: Domain name=p450; Domain location=10-463; Score =45.6; E_value=4.8e-13; Accession=PF00067.12; Description=Cytochrome P450
MQLDMRLSSPSEPTIALYEYSTNATTKLQLSLHSGPSRAPSSSGRRYHNINSAPYGQLWRALRSNLTSGVLHPTRLRHYAAARRRALHRLAADLREQQLADDGVEALAAESIRSAVFGLVSTMCFGDGGVDAAVVRAMADVQTELVLSLSAVRTFAFVPFLAVSKLVYRGRWNKLAAIRRKQEELYLPLIDGCRRRRGRDDDDSDGTPPSYVRTLLDLRVPVELDGDHDSSGGEQTQQRRLEDGELVGLCSEFLGSGTESVSAALQWIMANLIKRPDMQDAVRREIDAAVDADAEEVGEEVLGKLDLLNAVILEALRLHPTIKFGFREVMQEDQVVHDGHRIPVGTKMVFPLEALARDKTAWDEPDEFMPERFHGCCAGGESTKKLLSVAAEMKMLPFGGGRRMCPAIGVSLLHIGYFMANLVREFEWREAEGGEHAGVQLHPDATVEMFNFMERPLRARLVPLRRPGGKKFRYVH

SEQ ID NO: 57508 - protein, 157 aa, Zea mays
  Coding DNA Sequence Number=SeqID_15729
  Gene Ontology: Mol. function=sequence-specific DNA binding; Cellular component=nucleus; Biological process=regulation of transcription, DNA-dependent
  Homolog annotation: Hit_ID=Q8L887; Match level="QueryCoverage=79%, HitCoverage=61%, E-value=7e-47, Identity=72%"; Hit description=MADS -box transcription factor 26
  Pfam annotation: Domain name=K-box; Domain location=19-111; Score= -22.8; E_value=0.036; Accession=PF01486.8; Description=K-box region
MEELIERYKAASAGEATTDGCGRHNRMDPKHETTVLQQEINLLQKGLRYIYGNRANEHMNVDELNALERYLEIWMYNTRSAKEGMLKAANEILQEKIVEQSSLLDVGMVVADQQNGRFSTVPLVEEALDKPFRSAPGIVSSCLLLLQNEEILSIEEI

SEQ ID NO: 57509 - protein, 397 aa, Zea mays
  Coding DNA Sequence Number=SeqID_15730
MAGRLSAPVHRLPPVHAAQCSAEMQGGHSQMRAVVEGIVWSPTLVLTLVAVSAQRSHILIEATDHGFLLGSSYDCERQREVFKVTAWCSSPNSIPREFKLEIVDPVTTDGGMLRRSTVYPIRVSVKIIDRPNMLQSLQPSPPLAEDDPDQGRRRRRRRSRRSSFGITAPRKSSTAVVLPRLSVHQRLGPRVQSFVKEGVRVPRLPVHKRLGPLGIFNAEKGAFKKVKRVCIPKRRLKSSVSVWIPKTSSAFVSPLPAAVDDALLEATSSIVVTEDALAGSPSTVLCQEVIPVDVGACSEAAIISDAIGDVLATYPLSSQSRIPMVESELQDVTVYSGGVGLPIVESKLQDLHLMESSLTRNHLMSPSLLVYSRKRPQKIQLIDDIAENGSVGLQQML

SEQ ID NO: 57510 - protein, 105 aa, Zea mays
  Coding DNA Sequence Number=SeqID_15731
MAFEDEELLQLLSRAEAMEAKQIEVISLLMLATAESLASGELAPEDPKWKALGSRCSTRQRNRWRGPRGWRVAAEYVVRGWPGGESVVVDAHRRLAVSTVASSKS

SEQ ID NO: 57511 - protein, 105 aa, Zea mays
  Coding DNA Sequence Number=SeqID_15732
MAKFCASEQFLEPSASPSPDDCPLATRMVCLLPRNASQEERVTQIYSQQVHPNNPDGKNHGRESVSRRSQAGRRRNRDVVPISVEKGCVAHRPHMAEAVTSQARA

SEQ ID NO: 57512 - protein, 218 aa, Zea mays
  Coding DNA Sequence Number=SeqID_15733
MKTAGSLREEPEEEHHLCVEKGHQRGLVGTLHGFRYLGKNTGVVHISKIFRSPNLPPLRRPCSFQRVMDTFGFEYSDYHNQTQEVEAGVKQERKLVFSNGRLLSWYMVVFDSNAKSMHSETKKTSLAQEEKKKAISREVEKGEVNSVEGENGCRGKKSEGSASASSLGATQILENKGGRELARDEAKANMQKVEVIAKKAKTVIESRKAPEDVTPLSN

SEQ ID NO: 57513 - protein, 116 aa, Zea mays
  Coding DNA Sequence Number=SeqID_15734
MAARLLTPSSLEALQKEGIASDTKVMYGLASGAPVQPRGGELTVNVRKRQTYEEDEPESDTKKGNVADEVMSHAETGDVESGEQNTGSKKEKALEEENDLRHTRDSYIEMGKSIFT

SEQ ID NO: 57514 - protein, 45 aa, Zea mays
  Coding DNA Sequence Number=SeqID_15735
MELGVKQRRSLAIAFSGQCKFAGGLANLKKILENDKIIGPILLDS

SEQ ID NO: 57515 - protein, 116 aa, Zea mays
  Coding DNA Sequence Number=SeqID_15736
MAAEAMRRRRKGKIWLSHDPFIYEGKERGVRRLHVHEIVHGQLMMKWFLKSFELYDSNILMKWFLIQEHTDEVVSNTRTEEVVTGGLGVSHHRLLRQKLVVLFQQEQHRLHALLDV

SEQ ID NO: 57516 - protein, 98 aa, Zea mays
  Coding DNA Sequence Number=SeqID_15737
MAIWPRLLLGEDWASGEPKIVHGQLLMKWFLKSFELYDSNILMKWFLIQEHTDEVVPNTRTEEVVTGGLGVSHHRLLRQKLVVLFQQEQHRLHALLDV

SEQ ID NO: 57517 - protein, 34 aa, Zea mays
  Coding DNA Sequence Number=SeqID_15738
MALSATLRISLSVAFFGVLAFVLGVIAENKKGYT

SEQ ID NO: 57518 - protein, 142 aa, Zea mays
  Coding DNA Sequence Number=SeqID_15739
MEVGGLSPVELSLPQLRTQLLLQPNEFATDRADWSNRRIEDLKIWTWPIARKILGEEAKTRKTPADRLGRRLGWTEGVHHRTVPRPRFWAPTRVFLPPTNQAPRASPSPPAHAHAANAAQLAFALPWRATAFALPLPPPCPH

SEQ ID NO: 57519 - protein, 92 aa, Zea mays
  Coding DNA Sequence Number=SeqID_15740
MVGNDIMLWKLAGAKGMSQWLLQQLTFKSILYLFSSFLMSETRIEYFLMKFEAVNLLLALILLFTSYKIFEYRERDLEDVVGEEGDIEDGIF

SEQ ID NO: 57520 - protein, 37 aa, Zea mays
  Coding DNA Sequence Number=SeqID_15741
MYVFGYGKYGDYISENYGLKAPADPYFASLANVEREP

SEQ ID NO: 57521 - protein, 89 aa, Zea mays
  Coding DNA Sequence Number=SeqID_15742
MNQRGKDEPKGVPGAGDVMELTEGISVTRAQRRSWNGQRTSGERARLRVQVSTGKWASGVWALKGQGREEVAEERTDVGASMAGTWARG

SEQ ID NO: 57522 - protein, 708 aa, Zea mays
  Coding DNA Sequence Number=SeqID_15743
  Gene Ontology: Mol. function=steroid hormone receptor activity; Cellular component=nucleus; Biological process=regulation of transcription, DNA-dependent
  Homolog annotation: Hit_ID=Q6EPQ3; Match level="QueryCoverage=99%, HitCoverage=100%, E-value=0.0, Identity=67%"; Hit description=SPX (SYG1/Pho81/XPR1) domain-containing protein-like
  Pfam annotation: Domain name=MFS_1; Domain location=263-663; Score =67.4; E_value=4.6e-17; Accession=PF07690.6; Description=Major Facilitator Superfamily
  Pfam annotation: Domain name=SPX; Domain location=2-148; Score=129.8; E_value=7.5e-36; Accession=PF03105.10; Description=SPX domain
  Pfam annotation: Domain name=Sugar_tr; Domain location=263-708; Score= -138.8; E_value=0.016; Accession=PF00083.14; Description=Sugar (and other) transporter
  Pfam module annotation: Pfam domain module=MFS_1::SPX::Sugar_tr; Domain location=263-663::2-148::263-708
MVNFGKKLMADQIPEWKGYYINYKLMKKKVKQYGQQLQQGEKDRRRVLKDFSKMLDDQIEKIVLFLLEQQGLLASRIEKLGKQRAILQEQPDISGIAELREAYREVGINLIKLLKFVDLNATGIRKILKKFDKRFGYRFTDYYVTSRSNHPYSQLQQVFKHVGVGAVVGALSRNLAELQERQGSYLSIYDQPSSALKLTVFGFDPLQDPIIDMINSSVDKLTRSTNFLRFLGQHAMIVDEESPSTAGEEEIEDQKYHFMSLMLNLVNTFLYMVNTYIIVPTADDYSVSLGAASTVCGVVIGSMTVAQIFSSIYFSAWSNKSYFKPLVFSSIVLFLGNICYAMAYDMKSLTVLIIGRLLCGMGSARAVNRRYISDCVPARIRMQASAGFVSASALGMACGPALAGLLQWKFKVYMVTFNQSTLPGWVMAVAWLLYLIWLWFSFKEPNRATEVNEAPQNPASGQTVDIGRLENGIAQPLLKDSVDKQNEDEDEVDDIEETADDSRKPATSIGSAYRLLTPSVKVQLLIYFMLKYAMEILLSESSVITNHYFSWNTSAVAIFLAILGLTVLPVNAVVGTYISNMFEDRQLLMVSQITLLVGIIFSFKVTSTYYVVQYVVSALVTFVSAEVLEGVNLSLLSSVMSSRLSRGTYNGGLLSTEAGTLARVVADCTITAAGYLGVGKLLNVTLLPSLVICVASIACTFLTYNSLF

SEQ ID NO: 57523 - protein, 566 aa, Zea mays
  Coding DNA Sequence Number=SeqID_15744
  Gene Ontology: Mol. function=binding; Cellular component =mitochondrion; Biological process=protein amino acid phosphorylation
  Homolog annotation: Hit_ID=Q5JL31; Match level="QueryCoverage=79%, HitCoverage=76%, E-value=2e-60, Identity=32%"; Hit description =Putative DNA-binding protein
  Pfam annotation: Domain name=PPR; Domain location=150-184; Score =32.7; E_value=1.3e-06; Accession=PF01535.11; Description=PPR repeat
  Pfam annotation: Domain name=PPR; Domain location=185-219; Score =26.3; E_value=0.00011; Accession=PF01535.11; Description=PPR repeat
  Pfam annotation: Domain name=PPR; Domain location=220-254; Score =23.7; E_value=0.00066; Accession=PF01535.11; Description=PPR repeat
  Pfam annotation: Domain name=PPR; Domain location=256-290; Score =17.2; E_value=0.061; Accession=PF01535.11; Description=PPR repeat
  Pfam annotation: Domain name=PPR; Domain location=291-325; Score=3.2; E_value=3.1; Accession=PF01535.11; Description=PPR repeat
  Pfam annotation: Domain name=PPR; Domain location=326-360; Score =16.7; E_value=0.078; Accession=PF01535.11; Description=PPR repeat
  Pfam annotation: Domain name=PPR; Domain location=410-444; Score =17.5; E_value=0.048; Accession=PF01535.11; Description=PPR repeat
  Pfam annotation: Domain name=TPR_2; Domain location=255-288; Score =17.8; E_value=0.039; Accession=PF07719.7; Description=Tetratricopepti de repeat
  Pfam module annotation: Pfam domain module=PPR::PPR::PPR::PPR::PPR::PP R::PPR::TPR_2; Domain location=150-184::185-219::220-254::256 -290::291-325::326-360::410-444::255-288
MATRMKDVARRSTKKYVEEALYRRLFRKGSTPQAVREEVDGFLDSRKRAFKWEVGVCVRRMRRNALYRPSLKPEQMQNTTPSQARGRCLGRAYALVQDCRLVLSEVMARRGMNPTVSDQAIRLDLIAKSRGIAAAEKYFLDLPETSKTHLTYGALLNSYCKELMTEKAESLMEKMKELNFAFTAMSFNSLMTMYTKVNQAEKVPSIIQDMKADDVLPDVFTYNVWMRALAALKDIPGVERVIEEMKRDGRVAPDWTTYSNLASIYVEAGMFEKAEAALKELEKRNTSNDIEAYQFLITLYGRTQNLVEVHRVWRSLKRDNPRMANMSYLNMIQVLANLKDLSAAEACFKEWEARHIHPPKTNTKGSGADNTPGADPKSPSNPPNNQSGTKETGDETAEDLQPKHPKYDIRVANAMIKAYITEGMLDKAVAMKKRAKMRGGRLNAKTWEIFMEHYLKTGDLKMAHWCADRAMKKGHSSGRIWVPPPAVTETLMSYFEENKDVDGAERYVGALKKVQKDLGAPVFEPLVRTYAAAGKKFPGMRQRLKIENVEVGEGTAQLLDSICADQ

SEQ ID NO: 57524 - protein, 259 aa, Zea mays
  Coding DNA Sequence Number=SeqID_15745
  Homolog annotation: Hit_ID=Q5TJC3; Match level="QueryCoverage=68%, HitCoverage=52%, E-value=4e-51, Identity=63%"; Hit description =Impaired sucrose induction 1-like protein
MSRKEAEPAGQDGSSSSATDGGGGSGSGRELADALARRRLYREVTLALHSGLRDAKADFSFLRARGLRSLLGFLRSTASAADDALLLLFRHSQSIPDLQGNVRIWWVDRIADPTGDVAQREWVVTVNSLHQPKQDPVVTLDHIFGTEPMKITSPPTGSEIALALRVLEGCCLLYSRCTALAHKYKAVKVLLNILASRGPTEQGVCLDTLISLMLDSPSNQMCASLIWAASRFGSTLDAEQRQTTLQIQAMRVVESLEPY

SEQ ID NO: 57525 - protein, 522 aa, Zea mays
  Coding DNA Sequence Number=SeqID_15746
  Subcellular localization annotation: CTP_CleavageSite=32; ConfidenceScore=5.22e-01
MGFWVTTLIFLLAGVAASLFTLLCCNRGPSTNLSAYASPTLKPTGFWPKFHPSTWSISDSTLLLLSCAAQPCPAFSADPPATSHHHSVRSSAPPTYQLQPPAMAVSLPVPIPPALLHAAAALALAAAAHFLHLPSLFLYALHTYIHPDAVPSNTPRAVLRPPGSNAGPAPGSSKRGAAKDKDPFDATSAQLYRLRLSHATLASRPHFAAYHLALLLPLALLLPALLLPAAPGASPLAPLVPAAYLFVALLRHVVVPSPRPALLAAALGALLVTTLLSSSPFAGALASLAALPAARFARAFWLGTDQPRTGLAVLSSSAPARLIFHLTVLVSSTATILRCCGFMDGAEQEAKLLAAAAGLQLLAARPAVQMYLNEAVFCWYQRLHASRAPDTEYGRAKVFLHNHHLCAVATQLVAPPLLVLSLLALWRVQGKDFFEGLEGMYWLVGWSVAMKEAALLAARWIVAVWSAATGDSKKRKPETLVFALHKWYFTAFQSLLHIVYKVDYALTTYWCWMLDHYAVQGL

SEQ ID NO: 57526 - protein, 135 aa, Zea mays
  Coding DNA Sequence Number=SeqID_15747
  Subcellular localization annotation: CTP_CleavageSite=42; ConfidenceScore=5.11e-01
MEIEGFVGAQSTAGKQNTTSTSTRREARAGNCAEAAIRALVRCRSVETWMPMNVGWLTSTSEEGGGGGGASDHGRGSRANASCGSESVSDPGSTVEAGAGTNSDRGCVAGAVGAEEVTDTATAAVVTTGAGGTGG

SEQ ID NO: 57527 - protein, 192 aa, Zea mays
  Coding DNA Sequence Number=SeqID_15748
MSTSPLRPKNGVELEVTVLSADSLRLPTSYWPLPRRLRPTRGGATLVVPVGAGFLEGRADVRVSVLSEPAACCRLVGATPLGWCGIPAADVLDGLRPPRALRRLSYSLRCPRRCGGGGAPGRGHGVVHLAVRVLGLRDDAPARTAATAPLAAATAPVQRGWCRVAMGIPVSGAASAVVGVPLSSWGASATSR

SEQ ID NO: 57528 - protein, 42 aa, Zea mays
  Coding DNA Sequence Number=SeqID_15749
MTPLYGKDPQALDAHRLERAWEKDLRTTWDHRSVGGVYVCSS

SEQ ID NO: 57529 - protein, 65 aa, Zea mays
  Coding DNA Sequence Number=SeqID_15750
MPKALTEKSTFSTSQIGFVKLSTVVFVVALPLGVGDLSEDVTSDALEDMEDDFGISTWSLLTSFR

SEQ ID NO: 57530 - protein, 432 aa, Zea mays
  Coding DNA Sequence Number=SeqID_15751
  Gene Ontology: Mol. function=oxidoreductase activity; Cellular component=proton-transporting two-sector ATPase complex; Biological process=flavonoid biosynthetic process
  Homolog annotation: Hit_ID=Q6YYX9; Match level="QueryCoverage=82%, HitCoverage=89%, E-value=1e-132, Identity=68%"; Hit description =Putative iron deficiency protein Ids3
  Pfam annotation: Domain name=2OG-FeII_Oxy; Domain location=276-375; Score=157.2; E_value=4.2e-44; Accession=PF03171.10; Description=2OG -Fe(II) oxygenase superfamily
MAIVELANAQLQQQAAAAAKKDGGGHELEDGAADADTSTTMGMSCKRSEQQQQLVESSSSYDYDYGALMKGVRHLSDSGITRLPDRYVLPVSDRPGVGLIAASSTAAAAGGVGRVKLPVVDLAGLRDPSQRAAVLATLDDACREYGFFQVVNHGVGSDVSGGMLDVARRFFELPLAERARHMSADVRAPVRYGTSFNQAKDAVLCWRDFLKLVCQPLREVVPRWPQQPADLRDVATGYAAASHALFMEVMEAALEALGIPAPAAGGGVLGELAALASHMMTVNCYPACPQPELTLGMPPHSDYGLLTFVLQDHVEGLQVLHAGRWLTVDPVPGSFVVNVGDHLEIYSNGRYKSVLHRVRVNSTRPRISVASFHSLPAERAIGPAPELVDDEAGNPRRYMDTDFATFLAYLASADGKNKTFLQSRKLPLHTSS

SEQ ID NO: 57531 - protein, 206 aa, Zea mays
  Coding DNA Sequence Number=SeqID_15752
  Subcellular localization annotation: CTP_CleavageSite=48; ConfidenceScore=5.52e-01
MPGKANCCCPPGCSIPSSVRAMVAPRKGRPCPGLPRADSRARGLPGTSCATRAALMFWGGLGEGGSEELPTRFGAPGTRWCGVEVVAAGEGFSADEIAYSAHTPGPPFPWLKWLVLVLRGREPFSRSIRPEAVAAAVSPPGAEVVVAATGVGAGEFPGVLSPRRPSNMGGCLYLRGWNLSSVCNGTLSAGPCFSLIPSTRTLLSAN

SEQ ID NO: 57532 - protein, 251 aa, Zea mays
  Coding DNA Sequence Number=SeqID_15753
MAPLVTWSIRALGRARRRLLRGRGRVRALGSGEAEFAVFRGRARAEPWGRARRSSSSSGAEPESEPWGRARRSSSSSGAEPESEPWGRAKRSSSSSGAEPESEPWVGRGGVRRLPRPSPSPSPGVGQSRVHRLPGPSPSPSPGVRQGGVSYGARGQTWLLSASLFEWHSSRSDAGGAVFLSGRIRCQVILALNAPAIWLVGVAIWPRLLLGEDCASGEPKLSADGGYQLRLGVLGVPLIMVPDNGLLYKFV

SEQ ID NO: 57533 - protein, 159 aa, Zea mays
  Coding DNA Sequence Number=SeqID_15754
  Gene Ontology: Mol. function=zinc ion binding; Cellular component =intracellular
  Homolog annotation: Hit_ID=Q0VJB4; Match level="QueryCoverage=86%, HitCoverage=59%, E-value=3e-25, Identity=45%"; Hit description =Putative zinc-binding protein
  Pfam annotation: Domain name=PLATZ; Domain location=1-99; Score =113.8; E_value=4.9e-31; Accession=PF04640.4; Description=PLATZ transcription factor
MRKAGCQRAREIAPIYFKQIRRSSYHDVVRVSEVEDVLHISGVQTYVINSARALFLNERPQPRGAGAAAGKAAASPYNCEICGRALLDPFRFCSLGCKLVDTKRSNGHAASSADGGGGGGGAASGNDETTEAGGSKNGPGARPHGRRRKGTPHRAPFWS

SEQ ID NO: 57534 - protein, 250 aa, Zea mays
  Coding DNA Sequence Number=SeqID_15755
  Homolog annotation: Hit_ID=Q9S7M0; Match level="QueryCoverage=40%, HitCoverage=38%, E-value=4e-35, Identity=85%"; Hit description=Type III chlorophyll a/b binding protein
  Pfam annotation: Domain name=Chloroa_b-bind; Domain location=3-131; Score=-46.2; E_value=0.054; Accession=PF00504.12; Description =Chlorophyll A-B binding protein
MVSSPPHWGRWVASPRRCSRAGCAWTSGRPCGKFKAGAQIFSEGGLDYLGNPNLVHAHSILTVLGSQVVLMGLVEGFRVNGHDGVDDGNSLYPGGQYFDPSVSPTTPSPSPSSSQRWSKARGFAGFTERALVAAGAAVVSAILVNPLDVAKRVPVVHLSLLLNATSPPSLRRCACLDRGDVPKHVTEANLLPLFCEVATVDEVTIIKDKATKVSREVILLENVELTLEAFDYMQLPFTLKGGINFLIRLH

SEQ ID NO: 57535 - protein, 410 aa, Zea mays
  Coding DNA Sequence Number=SeqID_15756
  Gene Ontology: Mol. function=galactosylgalactosylxylosylprotein 3 -beta-glucuronosyltransferase activity; Cellular component=membrane; Biological process=cellulose and pectin-containing secondary cell wall biogenesis
  Homolog annotation: Hit_ID=Q10N05; Match level="QueryCoverage=81%, HitCoverage=81%, E-value=1e-118, Identity=67%"; Hit description =Glycosyltransferase family 43 protein, expressed
  Pfam annotation: Domain name=Glyco_transf_43; Domain location=121 -340; Score=107.5; E_value=4e-29; Accession=PF03360.6; Description =Glycosyltransferase family 43
  Subcellular localization annotation: CTP_CleavageSite=51; ConfidenceScore=5.38e-01
MGSSTDHGGAGWRGKKQGSQLWKKALLHSSLCFVMGFFTGFAPSSVSDWTSAAAAAGSSSSSSHVVRALPAGGALNRSLLAHGAGPGYDRAASPRPLLVVVTTTESTPVASGERAAALTRTAHALRLVAPPLLWVVVEAAPDAPATARQLRATGLMYRHLTYRDNFTAAGAGKERHHQRNVALGHVEHHRLAGVVLFAGLDDVLDLRLFDQIREISAFGAWPVATMWRDEREVVVRGPACSSSAVTGWFSQDLSDGTAAAASTTSTARARPSGEVDVHGFAFNSSVLWDPERWGRYPTSEPDKSQDSTKFVQQVVLEDLSKVKGIPSDCSEVMKFTPMQCNAMQGVQFVERIDTCTNKHASEAHKAKALFLVAPLYPLLSAMAWAVGCCFVGPSPSCGKINYGERLGSRN

SEQ ID NO: 57536 - protein, 71 aa, Zea mays
  Coding DNA Sequence Number=SeqID_15757
MTQPLDFPPEPEPEPEPEPFGPAMRPARQVTPAPDLNYYTIGVFQFRRSLKDQIKPPYSPAHGTTPSIPLS

SEQ ID NO: 57537 - protein, 562 aa, Zea mays
  Coding DNA Sequence Number=SeqID_15758
  Gene Ontology: Mol. function=hydrolase activity; Cellular component =cellulose and pectin-containing cell wall
  Homolog annotation: Hit_ID=Q10N00; Match level="QueryCoverage=99%, HitCoverage=98%, E-value=0.0, Identity=70%"; Hit description =Hydrolase, alpha/beta fold family protein, expressed
  Pfam annotation: Domain name=Abhydrolase_1; Domain location=212-518; Score=45.3; E_value=2.1e-10; Accession=PF00561.10; Description =alphabeta hydrolase fold
MTWHEDLATHVGNTGVRLPGAGGHAPAAANVAAAGAGWYGEEEEGRAEEGWAQQAKGFAESTAEMLRELGRGLWDVAAQSLAGAEDSEVARRLRKRAAATGKRLSFMNEYLPEERDPVRCWLTVAAVAFVSLLVLGFGSGNETPVELPKKLIIGPPSADRIQLPDGRHLAYQEQGVSANRARFSLIYPHSFLSSRLAGIPGIRASLLEEFGVRLVTYDLPGFGESDPHIGRNLNSSAMDMLYLANALNIPEKFWVVGYSGGGMHAWSALRYIPDRIAGTYFMFFLLHCFGFSKALIAFLFKEHRPYMLIVYVTGAAMFAPMANPYDSKMTKDERRKTWDSWSTKRKLMHILARRFPSLLPFFYRQTFLSGKQGHPESWLSLSLGKKDKTLLEGPAFNAFWERNVAESVRQGDARPFVEEAVLQVSDWGFSLSDIQMQKKEARGFFELIKSLFNQAEREWVGFLGPIHIWQGMDDRVISPSVAEFVRRLVPGATVHKLLDEGHFSYFCFCDECHRQIFSTLFGIPQGPMNPAPQPSEVVSELNEEITVPDNVTDQEQGKSGLP

SEQ ID NO: 57538 - protein, 156 aa, Zea mays
  Coding DNA Sequence Number=SeqID_15759
  Homolog annotation: Hit_ID=Q10N14; Match level="QueryCoverage=42%, HitCoverage=23%, E-value=1e-08, Identity=52%"; Hit description=RNA recognition motif family protein, expressed
MPRGQAAAAGTAAGSYLQLQGHLAYQAAPAQGGMVPVYPFYHYPYHASHSQGLGVPAAHFLPPVSAAAVVSSKPTVVATPKGRQHIIVQHLNLYKRNTSHMCNRCGATRAAQLCMCSQWSGAGDGLQLKARGDGGGGGGDYGRRNERRSALLTSCT

SEQ ID NO: 57539 - protein, 122 aa, Zea mays
  Coding DNA Sequence Number=SeqID_15760
MHMSHARERMAGEGPRAARQALGARSSWAHRAESTHLLAQKLCRAAGQCALNVVVDVLFKEKDVSKSRFTTRNWLKNVGEKPSNLISKFDGPHVLKVKNVGTVELNIKNVGTVELKVKNVGF

SEQ ID NO: 57540 - protein, 50 aa, Zea mays
  Coding DNA Sequence Number=SeqID_15761
MLPEDAEWAAIAGLGFRGAMLGAIFVTRYFGRRRWLLQFPVVQSLIGFHF

SEQ ID NO: 57541 - protein, 111 aa, Zea mays
  Coding DNA Sequence Number=SeqID_15762
RRAIIHRTVRCTPDSVRCAKEERPQELASFGKLQWLVRYNSPDCPVQLRSNGYLRANGYLQRINCARRSQVRPYWHTGQGTVHVRKPTVGLTTHALHSVTVNRVAGSKRQE

SEQ ID NO: 57542 - protein, 163 aa, Zea mays
  Coding DNA Sequence Number=SeqID_15763
  Gene Ontology: Mol. function=oxidoreductase activity, acting on single donors with incorporation of molecular oxygen, incorporation of two atoms of oxygen; Cellular component=chloroplast; Biological process=abscisic ...
  Gene Ontology: Biological process=acid biosynthetic process
  Homolog annotation: Hit_ID=Q5MBR3; Match level="QueryCoverage=87%, HitCoverage=27%, E-value=1e-59, Identity=73%"; Hit description=9-cis- epoxycarotenoid dioxygenase 5
MPRVGHDRGLLERPRALVRSADPAVQIAGNFAPVGEQAPVRSLPVSGRIPPFILGVYARNRANPYFEPSTGHHLFDDDGMVRAERALGRAVFPKAIGELHGHSEIARLTLFYARELCGLVDPSRGTGVANAGLVYFNGRLLAMSEQALIAAVGSPLLQFWVKK

SEQ ID NO: 57543 - protein, 183 aa, Zea mays
  Coding DNA Sequence Number=SeqID_15764
  Gene Ontology: Mol. function=mismatched DNA binding; Cellular component=MutSalpha complex; Biological process=mismatch repair
  Homolog annotation: Hit_ID=Q9M5L9; Match level="QueryCoverage=87%, HitCoverage=25%, E-value=4e-84, Identity=95%"; Hit description =Mismatch binding protein Mus3
MSYDFALPFESSSFQGVGQDCAAQFRKDLSRLPDMERLLARLFSSCDENKRSSSVVLYEDASKKLLQQFTSALCGCQQMFHACSSISTLICSEGSQLIDLLSPGKGLSNISSILDRFRDAFDWSEADRNGRIIPSEGCDPEYDATCNAIEEIKSSLKEYLKEQRKLLRPASVVLHHTSFSSFA

SEQ ID NO: 57544 - protein, 247 aa, Zea mays
  Coding DNA Sequence Number=SeqID_15765
  Gene Ontology: Mol. function=mismatched DNA binding; Biological process=mismatch repair
  Homolog annotation: Hit_ID=O04716; Match level="QueryCoverage=39%, HitCoverage=7%, E-value=7e-13, Identity=39%"; Hit description=DNA mismatch repair protein MSH6-1
  Subcellular localization annotation: CTP_CleavageSite=51; ConfidenceScore=5.87e-01
MASRRASNGRSPLVRKQSQITAFFSSPTPSPSPSGPSPGASKPSPSPLNPSARTRSPLAAVSPSSPKLPQPQQKQKEVKKVKEEHDAALVPAPAAAEVVGRCLRVYWPLDDAWYKGKVEAYDAASRRHRVKYDDGDEEEVDLRKEKFEWAAVVEESTLLPARKLRRLRRMSDISVAKSPAEAEDGAGDSTEDEDWKRDTVVEDASEEVELDEEDEEEVVAGQTTGNDYTAPTGDAAERFGQRELRFA

SEQ ID NO: 57545 - protein, 126 aa, Zea mays
  Coding DNA Sequence Number=SeqID_15766
  Homolog annotation: Hit_ID=Q5I7L4; Match level="QueryCoverage=40%, HitCoverage=23%, E-value=2e-13, Identity=72%"; Hit description =Ribosomal protein L6
MDDLGIEAKEAAAREVVTEPKFYPTDDVKPRVHSIRKPKPTKLKSGIMPRTVLILLVGRFMVKRVVFLKQLKSGLLLRLGVIARLGLGLSPQKTANSAPPDPGLGLGLSPGRRRTPLRPTQGSDSG

SEQ ID NO: 57546 - protein, 106 aa, Zea mays
  Coding DNA Sequence Number=SeqID_15767
MRLELVNEPWDQAYQQGFSVRTHGDCLNCHLTFFLELEGECPGRLDPATAPRDWAPSRQILADSLDLSGRAFWICCVRGRSNPTGLRAKRSATQHLENQRMSSDSS

SEQ ID NO: 57547 - protein, 137 aa, Zea mays
  Coding DNA Sequence Number=SeqID_15768
  Gene Ontology: Cellular component=integral to membrane
  Homolog annotation: Hit_ID=Q69IU6; Match level="QueryCoverage=78%, HitCoverage=18%, E-value=2e-33, Identity=64%"; Hit description =Ankyrin-like protein
MVERRAKKRMVFVMNKLMWLVCLFISVAFIALTYVVVGHDDWWLAWCTMGIGAAIMLTTLGSMCYCIVAHRLEEKNTRKIRRASASQSRGSWSRSVDSDKEILNSEYKTKIGCGTTSVFFNQRTEGPSCGTKFRSLD

SEQ ID NO: 57548 - protein, 81 aa, Zea mays
  Coding DNA Sequence Number=SeqID_15769
MSGDHTKREIVTGDKAIGSERTLSRESGDKYKEEYSSSFKSYIKDEDPFGTRHPNEYGYMMNLIPIMGMEIKIVIALWEWV

SEQ ID NO: 57549 - protein, 282 aa, Zea mays
  Coding DNA Sequence Number=SeqID_15770
  Gene Ontology: Mol. function=structural constituent of cytoskeleton; Cellular component=microtubule organizing center; Biological process= microtubule cytoskeleton organization and biogenesis
  Homolog annotation: Hit_ID=Q60F24; Match level="QueryCoverage=91%, HitCoverage=37%, E-value=1e-125, Identity=87%"; Hit description =Putative gamma-tubulin complex component 4
MLSYGMKSSTSQKDLQKPNASELPSQGKAASELTLDGWDSIALEYSIDWPLQLFFTPDVLSKYRKVFQYLIRLKRTQMELEKSWAAVMHKDHADFSDYCKDRKNNSATQLRRQRSKPLWRVREHMAFLIRNLQFYIQVDVIESQWNVLQSHVQDSHDFTELVSFHQEYLSALVSQSFLDIGSVSRILDSIMKLCLQFCWSIEQYETRPNISEIDHITEEFNKKSNSLYTILRSSRLADHRKGSDEFRKAATNHCRCSAVTVMFLWPELYLRKLYARSPWGSG

SEQ ID NO: 57550 - protein, 547 aa, Zea mays
  Coding DNA Sequence Number=SeqID_15771
  Gene Ontology: Mol. function=structural constituent of cytoskeleton; Cellular component=microtubule organizing center; Biological process= microtubule cytoskeleton organization and biogenesis
  Homolog annotation: Hit_ID=Q60F24; Match level="QueryCoverage=68%, HitCoverage=57%, E-value=1e-158, Identity=71%"; Hit description =Putative gamma-tubulin complex component 4
  Pfam annotation: Domain name=Spc97_Spc98; Domain location=1-494; Score=75.8; E_value=1.3e-19; Accession=PF04130.4; Description=Spc97 Spc98 family
MLHELLLALLGFTGDFVLDVSLPRRRAASQDAGEDGNGDGEVGPSFRLAPDLTFLQPSERTAIERLISLGFYYRELNRFATESRDLSWIQSSIDVSSPHSDNTQKGKVRKGSVYRRAIANGITEILSVYRSAVLQVEQNLLSDPLPILATVTHGLNKHKDIKGGQLLNLLHKRCHCGVPELQSCIQRQDDRDVENESSQRDVSDKLKQKLAKDTSLASWHTGFHVSLDMLPEYIHMRIAESILFAGKAIRVLRNPSPSATLQDPVIRTVGSHGMQSSVGGSGVPKELANFSNIRAEELLPQAEADKIDSMLKELKHSSEFHKRPFESAVGSIRTIAANHLWQLVVVRADLNGHLKALKDYFLLAKGDFFQDSLAREHQAASDLERTAVVAHNAAFPPPQGGVPTNDASAVEDPNFKASLIANLNAQARVSRTFVPFMNAVVLSCVLGTLSPELMESARSSGGIARHAWLAIEEQFLGNREARALCLDVEFRVFMQRDISIGDCCRKMKGMAEALVILALRRLSGALARLGALRTRLYPRLERAAWPE

SEQ ID NO: 57551 - protein, 192 aa, Zea mays
  Coding DNA Sequence Number=SeqID_15772
MERYLRIVRSAEPFPHGFSNSMLHSLLSSSPHDALPSPKTAALHDERPEDSKEGRVGQDADLHEDPNRSVGMAAVAEQEKELLSSVVDDTSSYSGSDPLHPWLWYGTTAYRSIPETLTNRRVVSFRSGTVALGRVSRKLSVPPSPSMRQRNPARVCANRWRWSGSVTRPHQALEMHLKRWRELASIGGRTSR

SEQ ID NO: 57552 - protein, 64 aa, Zea mays
  Coding DNA Sequence Number=SeqID_15773
MEDLSYDRTKGNKEWETKLEDKGLQLNMLTKLNKTNVQGNNSDLSIGALNKVRLWVDILNETFG

SEQ ID NO: 57553 - protein, 100 aa, Zea mays
  Coding DNA Sequence Number=SeqID_15774
MTYGPNFASQCEPPADHGLYCAWGQPVRVAFPGELRRGQVLGSDYFGLLIREPMISRPASLPAALPSHTSLTSWELGRRRRAREVRPSGNPITDTIRAHC

SEQ ID NO: 57554 - protein, 161 aa, Zea mays
  Coding DNA Sequence Number=SeqID_15775
  Subcellular localization annotation: CTP_CleavageSite=55; ConfidenceScore=5.26e-01
MSGVVSDGSSDPSLRLLLLRELCVVARTATGTIVVVSVSVRGKTTSQTPPLAKVRGKSPAAPATGVGAPAPRAGDDAVSPVSKALIPLMSHSVSKGKPNANHAAPLLLLGGEVAEDKGNEHGRALGVRGKAQACLGRYGGLSHGRNTGAGAPEGEEHGEAA

SEQ ID NO: 57555 - protein, 118 aa, Zea mays
  Coding DNA Sequence Number=SeqID_15776
MSLGSDDSLNTYVQIGARKRVRVRRDEPWLGAHTRELRGERRGELGSRSRGWASCKGGARHGRGHGDARIEDLGWGHGEAMASKDLGTVHMETREKRPSAREEEEERAGDKHREQGKR

SEQ ID NO: 57556 - protein, 134 aa, Zea mays
  Coding DNA Sequence Number=SeqID_15777
MKSIKRSKSLLKEQRKKSETIVPVVCSENYLCDANRSGELPNNLYLLVAQFFLVEVWALDTMNSHMAVWRFTFFPCSTGALDCIEKEVDVLDEVITNHRDFYVLVVSRGIAAAFMKAGMMALRVDKPKLLLKSR

SEQ ID NO: 57557 - protein, 108 aa, Zea mays
  Coding DNA Sequence Number=SeqID_15778
MAGRPTLWGEGCARLELVEHGDEQLHGEGSSGMARAQVETGRETTGPVATTTNVRPTSTRGELALELQIDGVRAEQGAAIGRRFGDLVANPSWGWPSSIKESGRDWTP

SEQ ID NO: 57558 - protein, 55 aa, Zea mays
  Coding DNA Sequence Number=SeqID_15779
MCRPCYEYNRKDDTQACPQCKTNKLHQGLEVKPGPTVKCVLGHDFILHFPVYISL

SEQ ID NO: 57559 - protein, 139 aa, Zea mays
  Coding DNA Sequence Number=SeqID_15780
  Gene Ontology: Biological process=lipid metabolic process
  Homolog annotation: Hit_ID=Q69VY8; Match level="QueryCoverage=70%, HitCoverage=7%, E-value=3e-42, Identity=82%"; Hit description =Putative calcium-independent phospholipase A2
  Subcellular localization annotation: CTP_CleavageSite=26; ConfidenceScore=5.30e-01
MPPPPGARAATASSLQPVRAAAAPPQAGHATAPTHRRTTPVGAWRERIIVCSGKYGLAHGLVKAFMDCGAKAVISSSIEPPDSQTIVYHGMDVNGSLENGKFVIGDEEADESEPEPVSPVSDWEDNDVEKGGNHDMDDE

SEQ ID NO: 57560 - protein, 76 aa, Zea mays
  Coding DNA Sequence Number=SeqID_15781
MTARGDMPQLMIVAMILVDVGTAGVGCSCGEKKGGKGLTGETRPCSPIVILMDKTRCCNKPFLWYIVTLIYNKRVM

SEQ ID NO: 57561 - protein, 41 aa, Zea mays
  Coding DNA Sequence Number=SeqID_15782
MGVANLLDTGFFHADPHTGDMIRTPVEDYVAELYQLSLDQF

SEQ ID NO: 57562 - protein, 63 aa, Zea mays
  Coding DNA Sequence Number=SeqID_15783
MGLGVCGSLCQGGDEEDGYDYAYGTGTPEHSLHGDATRRRNGHHPLHCPKLQIDDVYSFQRIR

SEQ ID NO: 57563 - protein, 281 aa, Zea mays
  Coding DNA Sequence Number=SeqID_15784
  Gene Ontology: Mol. function=hydrolase activity; Cellular component =mitochondrion; Biological process=metabolic process
  Homolog annotation: Hit_ID=Q1STY4; Match level="QueryCoverage=92%, HitCoverage=75%, E-value=6e-69, Identity=52%"; Hit description=HAD -superfamily hydrolase subfamily IA, variant 3; Epoxide hydrolase N -terminal domain-like phosphatase
  Pfam annotation: Domain name=Hydrolase; Domain location=23-256; Score= 45.0; E_value=2.6e-10; Accession=PF00702.16; Description=haloacid dehalogenase-like hydrolase
MPSADAGDADAMPAPPPQTRAAISHVIFDMDGLLLGIFSPPLSRLLPFTGFLARDANVLWLIFFSNFTMVSPLRAGADTEGFYTTVQEKILMRFGKVFDWSVKAKMMGKTTAESTRILFEEFGLAGLLTPEQFLEERETMLKKLLPTCVAMPGLLRLINLLHTNGIPIAVATGTHKHHFALKTQNHEDIFSLMHHIVTGDDPEVKAGKPSPDIFLAAMRRFEANVEPSNCLVFEDAPLGVAAAKTSGNPRLDVSHHKGADQVLTSLLEFNPSEWGLPPFVD

SEQ ID NO: 57564 - protein, 121 aa, Zea mays
  Coding DNA Sequence Number=SeqID_15785
  Pfam annotation: Domain name=zf-CCHC; Domain location=55-72; Score =21.2; E_value=0.00032; Accession=PF00098.13; Description=Zinc knuckle
MERGVRKPPFFDGTNYPYWKEQVESLVDEELSLVASQFTRFHNNCMSQRRGGLNDGCYNCGNPHHFVASCPKKGKQEAGPHDHHLGRCKGKMGKLNFFLGLQIKQTQAGPLCIKASIQRTS

SEQ ID NO: 57565 - protein, 67 aa, Zea mays
  Coding DNA Sequence Number=SeqID_15786
MAVVACTDAVGADTARMEHGLDFERLRLERPRARMAPTVGAPTVTGGFMASGGGSRFPAFVPVASYT

SEQ ID NO: 57566 - protein, 162 aa, Zea mays
  Coding DNA Sequence Number=SeqID_15787
MARRSRRAGRDGFIATTDLLLLFLLARRERDMERGRRRRWWWPRGMGMGNGSSVGSSGGGGRPQRDEEDGIREVVAFKGTEERSSVQSRRDLRCVRKQHDELKRNLPRSNLFLHCQCQIRLGQGTARMDTKSASNKSSSRKERDHTDYAQFLPQKSAWIEKQ

SEQ ID NO: 57567 - protein, 73 aa, Zea mays
  Coding DNA Sequence Number=SeqID_15788
  Homolog annotation: Hit_ID=O24587; Match level="QueryCoverage=62%, HitCoverage=4%, E-value=2e-17, Identity=82%"; Hit description=Pol
MALRNNGPEAFREAFLPSSGPMGDLSPTDPKECHLMAVKRILRYLVSTPCFGIWYPKGSTIDLIEYSDFDYAG

SEQ ID NO: 57568 - protein, 119 aa, Zea mays
  Coding DNA Sequence Number=SeqID_15789
  Homolog annotation: Hit_ID=Q6QP51; Match level="QueryCoverage=48%, HitCoverage=32%, E-value=3e-08, Identity=64%"; Hit description =Putative growth-regulating factor 1
MAAPRTARPVALTPRRDRRRLWQGKRATHRLRHNDRVKKGTGKRGIPRKRILLREGNRLRASLLIRGSKAGPSEGSTAASERVGSTPTTGQMFEGQPLGRVQRLPQATRAPRPLLIRGS

SEQ ID NO: 57569 - protein, 256 aa, Zea mays
  Coding DNA Sequence Number=SeqID_15790
  Homolog annotation: Hit_ID=Q7XJ13; Match level="QueryCoverage=15%, HitCoverage=5%, E-value=5e-11, Identity=82%"; Hit description =Chloroplast nucleoid DNA-binding protein-like protein
MGICPCASTISVVFINEKEKEFDIPSVASTTGGVGHEAVTWPGSSDRRRRGHEAMGGLGSSGGLQNGGGKSEGRRRLGRRDRRMRASVPSPEPDSHDALLDPPGNQTLSTPRPLSPHLNRHHDGTPPRRKNHHLKFNARTASATRQHPRPDAAFAFPPREGDSRGERFSPSRLRLLGAESSQMDRYQRVEKPREESPIGANEIRITAQGRPRNYITYALALLQGFKCGFGEHAVVRVARAQIAVTNYCSNGGEEGP

SEQ ID NO: 57570 - protein, 240 aa, Zea mays
  Coding DNA Sequence Number=SeqID_15791
  Gene Ontology: Mol. function=nucleic acid binding; Biological process= proteolysis
  Homolog annotation: Hit_ID=Q2RA28; Match level="QueryCoverage=42%, HitCoverage=37%, E-value=4e-37, Identity=74%"; Hit description =Expressed protein
  Pfam annotation: Domain name=Alba; Domain location=1-65; Score=51.3; E_value=3.1e-12; Accession=PF01918.11; Description=Alba
MPLCMGGAGVRGFLDLCEKDNATDDIVIKAMGRAINKTVAIVELLKRRIAGLHQNTSIESIDITDTWEPLEEGLVTLETIRHVSLITIKLSKKELDTSSPGYQPPIPADQVRPAADFDQDAGRTKWSWKRTWSSQQGQGKGKGSGVDYDDEIGEPEEAPRGYRGRGRGRGGRGSFAVGRGYGGDNYAMEEAGSNIMKVAEEGAEGVDAVVGGEGKAMDLLRSSRLVGTSPLGCHNLHFFP

SEQ ID NO: 57571 - protein, 78 aa, Zea mays
  Coding DNA Sequence Number=SeqID_15792
MVIAESISGGAQFGEGALATGGRGGSLVRAFVAFTEAVSQVMNQLPKAAYCDVVKLQGTWHSRGRQQNPARLPGPTAR

SEQ ID NO: 57572 - protein, 94 aa, Zea mays
  Coding DNA Sequence Number=SeqID_15793
MHDLLLALELLGCSGWLLGQDGEVSGCSDVDIDFLPAGCSDGTANAVEETASSTAASSSGADAGADRGHVTPQVLLRVFTQAYTIEPIITCGLV

SEQ ID NO: 57573 - protein, 52 aa, Zea mays
  Coding DNA Sequence Number=SeqID_15794
MTKATSKGWLSKLRVYKAFGSQNTCGDFYPKHMWMSPKAKKHMVKGVFKGLF

SEQ ID NO: 57574 - protein, 276 aa, Zea mays
  Coding DNA Sequence Number=SeqID_15795
  Homolog annotation: Hit_ID=Q8SA97; Match level="QueryCoverage=38%, HitCoverage=15%, E-value=8e-08, Identity=42%"; Hit description =Ornithine carbamoyltransferase
SRGDRCHSTAPLASLTEGQRRLRHSDCSATRQSESDRQSGLAKGATANSAPPDPRARTRAKTRKTANSAPPDPRARTRAKTRKTANSAPPGPPGLGLGEKTQGGGEIPFRPTPRAGTRGKTPEDGRTPPRPDPQGSDSGLRPGRRRFFVSARPQGLGGGGKKKKKGANSRSDRPQGSDSGLRPGRRRNSASPDPRARTPPWPRPNDFRIARPLGSGSATTTEGRLNLGFGGNPTSPCLGHKPPRQQEAPSSSHPEEDSGHGEQDRRLIRPAPPERQ

SEQ ID NO: 57575 - protein, 54 aa, Zea mays
  Coding DNA Sequence Number=SeqID_15796
MNANTDKLVSSDETIVSTNESHSSGKHLVKGLPPKYQATRQFVSNAKEAKLGLQ

SEQ ID NO: 57576 - protein, 264 aa, Zea mays
  Coding DNA Sequence Number=SeqID_15797
MTLTAPQTQRLNWIDFLERLHGKRMLLMDNSMNWNQFESMLYARLYGTRPDVRDALALSGSIFFTYNAVIEVMSLTSRTIESMIMDSCDFGIMTPRDLHEAVALCRGLKELRLVGFPKSVQAYHMEHILCDICDILYYNGIRKVELQSYHFTDTHVCTVACSCQGALQELILDECPNVLGNFVVCLRESWPNLTKLTLNRIGISDVQIRILMLVGFDQLEEFNLTWCWCPLITDRLLAILHASTLPNVTQESVDYYQHRCEVEY

SEQ ID NO: 57577 - protein, 284 aa, Zea mays
  Coding DNA Sequence Number=SeqID_15798
  Gene Ontology: Mol. function=unfolded protein binding; Cellular component=mitochondrion; Biological process=cellular protein metabolic process
  Homolog annotation: Hit_ID=Q43831; Match level="QueryCoverage=45%, HitCoverage=26%, E-value=1e-51, Identity=84%"; Hit description =RuBisCO large subunit-binding protein subunit beta, chloroplast
MSRIVMSMRFGGFPSMVGTWYSAARWAVVKPQSSSAQDPEASGRLFGLKHTLRGSLKIAAIKAPGFGERKTQYLDDIAILTGATVIRDEVGLSLDKADKSVLGTAAKVVLTKESTTIVGDGSTQEEVTKRVAQIKNLIEAAEQEYEKEKLNERIVKLAGGVAVIQRDGRWSSLSRAVLRPQEASGRLFGLKRTVGAAFSEAGARRRDGRWSSLSRAVLRPQEASGRLFGLKRTVGAAFSEVCEPTCQKLGLPSNTIVLRPQEASGRLYLCSIIGRYSIVWSENF

SEQ ID NO: 57578 - protein, 131 aa, Zea mays
  Coding DNA Sequence Number=SeqID_15799
MSGDHTKREMETGDKPTTSQGSTSSEESRTKRKEKKKDSSKRKEKRSSSSHHKEKKEKSSSHKSHRKGDKHKRMRKVVYYETDTSSTSTSVTPGFGRQTECELFLTERYSGNSLSPLEYHKIINIIRITVS

SEQ ID NO: 57579 - protein, 455 aa, Zea mays
  Coding DNA Sequence Number=SeqID_15800
  Gene Ontology: Mol. function=3-dehydroquinate synthase activity; Biological process=aromatic amino acid family biosynthetic process
  Homolog annotation: Hit_ID=Q651F0; Match level="QueryCoverage=52%, HitCoverage=56%, E-value=1e-108, Identity=82%"; Hit description =Putative dehydroquinate synthase
  Pfam annotation: Domain name=DHQ_synthase; Domain location=273-454; Score=86.8; E_value=6.7e-23; Accession=PF01761.10; Description=3 -dehydroquinate synthase
MSGAPEDSGFKLVTFGNFQRPLRYNSPDCPVCTGHVRCSKEGRPQELASLGFSFQPLRYNSPDCPVHLRSNGYFRRQRLPAAHLLRASTRREPPSVNRHRRQPSRRPHHPPRSLPTAVPSQPSIHNANCPDRPVPLITVLLTHLPRHSPPQIPGSETTTDHTTTLPSPSPPARRHRFPSYLMAASASSLLADAASSSCGAISPRPRLLRGAPAAAFVPSPSRHSCCSLRASPARRHRSRFVASAVPTMQPPAESRVSTVVDVDLGDRSYPIYIGAGLLDEPDLLQRHVHGKRVLVVTNTTVAPLYLEKVAWALTHNNPNVSVESVILPDGEKYKDMDTLMKVFDKAVESRFDRRCTFVALGGGVIGDMSGSDVARMTALGGFICWRGKTGINHPLGKNLIGAFYQPQCVLIDTDTLNTLPDRELASGIAEVVKYGLIRDAPFFEWQEKNMPELLA

SEQ ID NO: 57580 - protein, 145 aa, Zea mays
  Coding DNA Sequence Number=SeqID_15801
  Gene Ontology: Mol. function=protein binding; Cellular component =nucleus; Biological process=regulation of transcription, DNA -dependent
  Homolog annotation: Hit_ID=Q8LPU3; Match level="QueryCoverage=97%, HitCoverage=41%, E-value=2e-43, Identity=61%"; Hit description =Nucleosome/chromatin assembly factor 104
MEYRNWKRNAAVLYDLVISHPLEWPSLTVKWLTRSHRSPRLVVGTHTSDEANGLGRAAAASGGAVLFPSMSVSSVAPHRARSTARAACRRPQRPYTVPTKMCVDEVHVYHLGDGYDNGKSDAAVVLRGHEAEGYGLSWSPTKEGL

SEQ ID NO: 57581 - protein, 279 aa, Zea mays
  Coding DNA Sequence Number=SeqID_15802
  Gene Ontology: Mol. function=kinase activity; Cellular component =integral to membrane
  Homolog annotation: Hit_ID=Q69JE2; Match level="QueryCoverage=85%, HitCoverage=48%, E-value=1e-109, Identity=82%"; Hit description =Putative CLB1 protein
  Pfam annotation: Domain name=C2; Domain location=179-251; Score=57.3; E_value=5e-14; Accession=PF00168.20; Description=C2 domain
  Pfam annotation: Domain name=C2; Domain location=28-104; Score=70.2; E_value=6.6e-18; Accession=PF00168.20; Description=C2 domain
  Pfam module annotation: Pfam domain module=C2::C2; Domain location =179-251::28-104
MDVMCGDHQETSSKHVFVAEDTRSTYNGSLKVVRAQNLRKKDLLGKSDPYVKLKMSDDKLPSKKTTVKRSNLNPEWGEDFKFVVTDPENQALEVGKHEKMGMNMIPLRELLPEGTKVTTLNLLKTMDPNDVQNEKSRGELTLELTYKPFKEEDIEKEDTQGADVIEKAPDGTPAGGGLLYVVVHEAQDLEGKHHTNPYAKIIFKGEEKKTKVIKKNRDPRWEDEFEFVCEEPPVNDKLHVEVINPDRVAVENFLDRKEPECLDVPLFSLRISVIEIEVM

SEQ ID NO: 57582 - protein, 361 aa, Zea mays
  Coding DNA Sequence Number=SeqID_15803
  Gene Ontology: Mol. function=transcription regulator activity; Cellular component=nucleus; Biological process=regulation of transcription
  Homolog annotation: Hit_ID=Q8LQG2; Match level="QueryCoverage=75%, HitCoverage=54%, E-value=2e-27, Identity=43%"; Hit description =Selenium-binding protein-like
  Subcellular localization annotation: CTP_CleavageSite=69; ConfidenceScore=5.14e-01
MVHISDIKLIRTDTTLDLSQKAEKGPPPTRSCATRPRPPPQFGPPRRLPAAALRLSNLIGLASLPAPPRSLAPSSRASRSPPPATHSPGTRRSASTLPRRAALLRADAPLRRVAGRLHVPRCPQGMRPRPWLQRRTPGSRRGREEVWARTPSVFAVNALISFYCRILDYRLGRQRVLRGRRGLMELHSRWVRRVPGDGARAGAVRRNATERRVLLGVSIDGYGWKQGGAGVDRARELSDQMPKRNFGMSSVGRPMRLWFGVFSKYAAAVAVAAVGVVTTCAQLGALEQGRSGVVAQTALIDMYMKCGRLDLAMLAFGSMAERSVVTWNVIIVGHATHGYGLDAVMLFHPKEAERVTVDDLS

SEQ ID NO: 57583 - protein, 73 aa, Zea mays
  Coding DNA Sequence Number=SeqID_15804
MACLMPQQTTPPMLSRPGAEARLLSTKPTVIDVIDIDLGTIICSRFRAFVYIEKKDTRGVLGPGNPRVIPKVT

SEQ ID NO: 57584 - protein, 123 aa, Zea mays
  Coding DNA Sequence Number=SeqID_15805
  Subcellular localization annotation: CTP_CleavageSite=27; ConfidenceScore=5.58e-01
STSHAFLCHAPTPTSSIRATAPPPRCRAAALQPHRPRVPPGAAALACAVFARLPGAHRPRPISPGTRRSASTLPASRLLYFARMRPLRRVAGTPTRSFAVPKAMPAAAPGCQRPDSLVSRRGR

SEQ ID NO: 57585 - protein, 263 aa, Zea mays
  Coding DNA Sequence Number=SeqID_15806
  Gene Ontology: Biological process=mRNA editing
  Homolog annotation: Hit_ID=Q8LQG2; Match level="QueryCoverage=65%, HitCoverage=28%, E-value=7e-24, Identity=47%"; Hit description =Selenium-binding protein-like
  Subcellular localization annotation: CTP_CleavageSite=69; ConfidenceScore=5.14e-01
MVHISDIKLIRTDTTLDLSQKAEKGPPPTRSCATRPRPPPQFGPPRRLPAAALRLSNLIGLASLPAPPRSLAPSSRASRSPPPATHSPGTRRSASTLPRRAALLRADAPLRRVAGRLHVPRCPQGMRPRPWLQRRTPGSRRGREEVWARTPSVFAVNALISFYCRILDYRLGRQRVLRGRRGLMELHSRWVRRVPGDGARAGAVRRNATERRVLLGVSIDGYGWKQGGAGVDRARELSDQMPKRNFVCWNLMIDGDAGQGRMH

SEQ ID NO: 57586 - protein, 202 aa, Zea mays
  Coding DNA Sequence Number=SeqID_15807
MACLMPQQTTPPMLSRPGAEARLLSTKPTVIDVIDIDLGTIICSRFRAFVYIEKKDTRGVLGPGNPRVIPKLSMWHCSDELWIRVDESHCYSRKAAKHYIVELPKSCVDLELLEEHVVTALSVESYYRMPSLSTRADGQLVRTIRLQQTGNLESRHFSVLKPKNPNKTYYRVSNYQLLFPVSGIFHFVIRKQEHSYKMKCRK

SEQ ID NO: 57587 - protein, 367 aa, Zea mays
  Coding DNA Sequence Number=SeqID_15808
  Homolog annotation: Hit_ID=Q53M47; Match level="QueryCoverage=36%, HitCoverage=13%, E-value=1e-24, Identity=42%"; Hit description=HAT family dimerisation domain, putative
MVGNKNVKNKAAQKDLKSYFSQGSSGSSPSAHGSVVAIVEEVEDVHLEENVRPTAEEGVGIEGDVLPSVEEDEEDEQVQEGITDFNPDYIISNPGLHIPIKIFSPNLRDEVRRAFIAKGPTQLGGLRFPPSSDKRNFQKKWFNQYSMLEYSVEKNVTFCFYCYLFKNDRMDEKFGYDVFTKVGFSNEKNAYLALPKHVGGPSSIHNVASTSFHNFYNQSRKPLGFASAATSGVVPSPLHLARTRYIHATANAQSAIIQTQYGLVYDFALIVVMGNDSAMNVDDIYDIDNNESNGDEMHGIDGVDGNITNCMVKEEHVPAEPTRSEVNVIIQQVGRGKKSRRRPSCSETSTNNQFIQCPYKQVYGICV

SEQ ID NO: 57588 - protein, 347 aa, Zea mays
  Coding DNA Sequence Number=SeqID_15809
  Homolog annotation: Hit_ID=Q2HT37; Match level="QueryCoverage=29%, HitCoverage=53%, E-value=2e-09, Identity=38%"; Hit description=IQ calmodulin-binding region; Apoptosis regulator Bcl-2 protein, BAG
  Pfam annotation: Domain name=BAG; Domain location=125-201; Score =47.5; E_value=4.5e-11; Accession=PF02179.6; Description=BAG domain
  Pfam annotation: Domain name=IQ; Domain location=99-119; Score=16.9; E_value=0.074; Accession=PF00612.17; Description=IQ calmodulin -binding motif
  Pfam module annotation: Pfam domain module=BAG::IQ; Domain location =125-201::99-119
MKKEVGFRNVTVEAASVEHLQEEEAPTSKDGQKVQAASTTVGDQENAALKSIEEDHVQENAGAGSLNGCDKRKNEDGTVIESETAKDDARTYGVNLSESDAAVGIQSAYRGYDVRKWQPLDKLWKIKHVHEQMQVVRKQIQCLLDSCSKPTQKEQVAIGETIMNLLLKLDAIQGLHPSVREARKSVARELICLQEKLDTLCKASSGDLNHTDSNDDESEGTKNIIQTAAPTVITEASDRKRTVELGKVQEPCSVDSMEPCNAVPSGVSWEVRPDVDASEEKNEKQESCSTTVDEAHEEGWRGLTKGVATSRVGAAQVEVELTAVFHRALGERRGHGFGTGMLLYRSG

SEQ ID NO: 57589 - protein, 462 aa, Zea mays
  Coding DNA Sequence Number=SeqID_15810
  Pfam annotation: Domain name=DUF506; Domain location=214-422; Score =179.9; E_value=6.2e-51; Accession=PF04720.3; Description=Protein of unknown function (DUF506)
MTQQTRHEPRRGRPAPRACSLFRGTSPCECDTYRARAASRLLHGAGCSAETAKGLGTWAATSDQPQGNSKQAERAAKAKPWVSRRKPVVRAPCWTQVTQHVGHREPRRQWAGRPLPRERKGKVPVSGTRLGRTASTSSDAPTAAPRASQSQPRHMRRAAQHHRTAPAPPLLAADMAAYIRLDDAVRARLRGGAHAAGCTTSSSSGSDHDASACLSELVQAFLETGAGGTAEEGSRAAPKEYGSDDEDGAAASAAATVRSLLDPPAEEDAFRIRLAAAVAAAVEAEAALRTHGVAFRRALTRRLRGAGYDAGVCRSRWEASGGAAAGTYEYVDVVAVAPAAARYIVDADFRAALEVARATPEYAAVVAAVPAPAVVAREEAVGRAVRVASDAARRSLRAHGLHVPPWRKTRYMLAKWLGPYKRSTSSAAGGVMSMPGGAGLDVKCRAVGFFAPPAAAPAARIK

SEQ ID NO: 57590 - protein, 399 aa, Zea mays
  Coding DNA Sequence Number=SeqID_15811
  Homolog annotation: Hit_ID=Q4FZ47; Match level="QueryCoverage=31%, HitCoverage=80%, E-value=2e-42, Identity=75%"; Hit description =Putative cystatin
  Pfam annotation: Domain name=Cystatin; Domain location=297-397; Score= 27.7; E_value=4.2e-05; Accession=PF00031.11; Description=Cystatin domain
MVFVGSFHFKVLIKIKGIPFLGTSCKRDEKVVVIPKPIVSFVVDVEGPATTIQLRTKGSPKHRKDLCLSSVLCAVPLLIFQAEAWVIALLSKHSQACIITGATRQAAELSKGRGDTEPEPWCRSLRPPHSRWRRDKTLSLLVTNNPSPRHVIAHQEPTPRRTQPRLRGTTPSQARPTCPPLRCRRPYPSRAPPPRDAQFMHPLRAAPRLAAPHRAFQNWRRLSVPSRRAAASRYEREDTRRGLRWARALGACVLLAVLLGALAPAPAPAAAARAHDDQGSGAGIRQPSGEYRGRKVGARTEVRDVEGDGEVQELGRFSVAEYNRQLREGGGGGGRLEFGRVVAAQRQVVSGLKYYLRVVAVEEGGGAGNGGERVFDAVVVVKPWLDSRTLLTFAPAAAK

SEQ ID NO: 57591 - protein, 633 aa, Zea mays
  Coding DNA Sequence Number=SeqID_15812
  Gene Ontology: Mol. function=RNA-directed DNA polymerase activity; Cellular component=nucleus; Biological process=RNA-dependent DNA replication
  Homolog annotation: Hit_ID=Q8S472; Match level="QueryCoverage=99%, HitCoverage=58%, E-value=0.0, Identity=81%"; Hit description =Putative gypsy-type retrotransposon RIRE2
  Pfam annotation: Domain name=Retrotrans_gag; Domain location=121-212; Score=69.9; E_value=8.2e-18; Accession=PF03732.7; Description =Retrotransposon gag protein
MREASVHPGRTRNTVPAAPGRLGNEHHHCNRRAHLDEKVRRGYHPRRGGRYDSGEDRSPSPEPPGPQAFSRAIRRALFPTRFRTPTTITKYSGETRPELWLADYRLACHLGGTDDDNLIIRNLPLFLSDTARAWLEHLPPGQISNWDDLVQAFAGNFQGTYVRPGNSWDLRSCRQQPGKSLRDYIWRFSKQRTELPNVTDSDVIDAFLAGTTCRDLVSKLGRKTPTRASELMDIATKFASGQEAVEAIFRKDKQPQGRPPEDVPEASTQHGTKKKGKKKSQAKRDAVDADLVVAAEYKNPRKPPGGANLFDKMLKESCPYHQGPVKHTLEECAMLRRHFHKVGPPTEGGRAHNDDKKEDHKSGEFPEVHDCFMIYGGQVANASARHRKQERREVCSVKVAALVYLDWSDKPITFDQGDHPDRVPSPGKYPLVVDPVIGNVRLTKVLMDGGSSLNIIYAETLGLLRIDLSSVRAGATPFHGIIPGKRVQPLGQLDLPVCFGTPSNFRRETLTFEMVRFRGTYHAVLGKPCYAKFMVVPNYTYLKLKMPGLNGVITVGPTYRHAYECDVECVEYAEALAEFEALIADLESLSKEAPDVKRHAGNFEPAETVKSVPLDPRSDASKQIRIGSELDPK

SEQ ID NO: 57592 - protein, 401 aa, Zea mays
  Coding DNA Sequence Number=SeqID_15813
  Homolog annotation: Hit_ID=Q53M54; Match level="QueryCoverage=96%, HitCoverage=63%, E-value=1e-131, Identity=66%"; Hit description =Expressed protein
MDKLLNTGEVNLLSEATPSTGAPPPVHASISPEVAAACGSATPACFAAGHHVVPGVGDHRKCRPRGILAITGEGLTSQDLDEELSRASIHWLSSPSGAVAWTSSTKCGNEEASVNWLVSSHDEGGVDLLEDEIFVPRCSSEDAFWRFSPDCTRLLGLPLLSGLLDSGTPSSEMSGATPSSGFLPVQKTPSSGNSISPFSLIVKRASESSARFRTLCAQQGLGSIYWYDSVADPTPISGESWPESVSNYTRSGLTRTGSRPLKMMDPVMECLEMMSLSPRPGDDDYDGTGTLPAPLPQHSFQFPGDPTPLESIDLTSFKRSPRDIELKAKDTSFRKSVMADTRISWQEGLVSRMFDMGDLDCCKWLSDDEDSPVFLHTDKALAVGTNFEPCNGCCLHEGGDQ

SEQ ID NO: 57593 - protein, 115 aa, Zea mays
  Coding DNA Sequence Number=SeqID_15814
  Homolog annotation: Hit_ID=Q6ZIB4; Match level="QueryCoverage=57%, HitCoverage=33%, E-value=8e-08, Identity=44%"; Hit description =Putative proteasome subunit beta type 1
MAPVARLPIARRDTHNERRSGQSWTVVLIAKNHVVYATKLGLGLEISNSEIGVRKRVPLAMSCSINADNFGSKIKKIFYEHNNNKKMSYPAMAQLLSNTLYYKRIRLGNIEIGSR

SEQ ID NO: 57594 - protein, 965 aa, Zea mays
  Coding DNA Sequence Number=SeqID_15815
  Gene Ontology: Mol. function=RNA-directed DNA polymerase activity; Cellular component=intracellular; Biological process=RNA-dependent DNA replication
  Homolog annotation: Hit_ID=UPI00005A975E; Match level="QueryCoverage =98%, HitCoverage=55%, E-value=0.0, Identity=86%"; Hit description =PREDICTED: similar to Retrovirus-related Pol polyprotein from transposon 297
  Pfam annotation: Domain name=RVT_1; Domain location=56-225; Score =149.8; E_value=7.5e-42; Accession=PF00078.17; Description=Reverse transcriptase (RNA-dependent
  Pfam annotation: Domain name=RnaseH; Domain location=455-582; Score =9.8; E_value=7.1e-06; Accession=PF00075.14; Description=RNase H
  Pfam annotation: Domain name=rve; Domain location=780-939; Score =124.0; E_value=4.2e-34; Accession=PF00665.16; Description=Integrase core domain
  Pfam module annotation: Pfam domain module=RVT_1::RnaseH::rve; Domain location=56-225::455-582::780-939
MPGIPRDVAEHSLDIRAGARPVRQPLRRFDEEKRRVIGEEIHKLMAAGFIKEVFHPEWLANPVLVRKKGGKWRMCVDYTGLNKACPKVPYPLPRIDQIVDSTAGCETLSFLDAYSGYHQIRMKESDQLATSFITPFGMYCYVTMPFGLRNAGATYQRCMNHVFCEHIGRTVEAYVDDIVVKTRKASDLLSDLEVTFRCLKAKGVKLNPEKCVFGVPRGMLLGFIVSERGIEANPEKIAAITSMGPIKDLKGVQRVMGCLAALSRFISRLGERSLPLYRLLRKTECFAWTPEAEEALENLKALLTKAPVLVPPADGEALLVYVAATTQVVSAAIVVERQEKGHVLPVQRPVYFVSEVLSEIKIRYPQVQKLLYVVILTRRKLRHYFESHPVTVVSSFPLGEIIQCREASGRIAKWAVEIMGETISFAPRKAIKSQVLADFVAEWVDTQPPTAPIQPELWTMFFDGSLMKTGAGAGLLFISPLGKHLRYVLRLHFPVSNNVAEYEALVNGLRIAIELGVRRLDARGDSQLVIDQVMKNSHCRDPKMEAYCDEVRRLEDKFFGLELNHIARRYNEIADELAKIASGRTTVPPDVFSRDLHQPSVKIDDAPEPEAPSAQPEAPSARPEAPSAQPEEPSAPKAEVLDVEEEQRGATPDRNWQAPYLRYLRQGELPLDQAEARRVARRAKSFVLLGDEEELYHRSPSGILQRCISIAEGQELLQEIHSGACGHHAAPRALVGNAFRQGFYWPTAVADATRIVRTCEGCQFYAKQTHLPAQALQTIPITWPFAVWGLDLVGPLQKAPGGYTHLLVAIDKFSKWIEVRPLNNIRSEQAVAFFTNIIHRFRVPNSIITDNGTQFTGKKFLDFCEDHHIRVDWAAVAHPMSNGQVERANGMILQGLKPRIYNGLNKFDKRWMKELPSVVWSLRTTPSRATGFTPFFLVYGAEAILPTDLEYGSPRTRAYRSKQPS

SEQ ID NO: 57595 - protein, 103 aa, Zea mays
  Coding DNA Sequence Number=SeqID_15816
  Subcellular localization annotation: CTP_CleavageSite=26; ConfidenceScore=5.26e-01
MNVCELTLAVSHPPQVKNSTPGDYVRARVLVPRNPGVTVSNLSTASHCYPLRITAFGWGFEHGSQVWGSASHGSAVLALCRRAGAANGEDDVCIVHLLLNGGD

SEQ ID NO: 57596 - protein, 109 aa, Zea mays
  Coding DNA Sequence Number=SeqID_15817
MAWHLELGRAGPAAGEGDAVWAVERWGSPLVDRVSAGRTCLRVRKAGAGIEREPVREGMEKQSDLLGAHTNSISKLRQADTGDGERETGKQWAWEEGGGCKGETEANNS

SEQ ID NO: 57597 - protein, 141 aa, Zea mays
  Coding DNA Sequence Number=SeqID_15818
MDNNRRHPDLVARPKLAIAHQPVDVGSGSTWLSPHAVDVGAGSAWRRPKVHLRDSEIGIAPNDDDVQACVDSDAETEDESVVEGNDVSPVARSVRAQGRARRRLLLRLRPGSGEDAIPPEAEAEAEPWGRARRRPPSKAEA

SEQ ID NO: 57598 - protein, 366 aa, Zea mays
  Coding DNA Sequence Number=SeqID_15819
  Gene Ontology: Mol. function=L-lactate dehydrogenase activity; Cellular component=cytosol; Biological process=tricarboxylic acid cycle intermediate metabolic process
  Homolog annotation: Hit_ID=Q08062; Match level="QueryCoverage=81%, HitCoverage=86%, E-value=1e-149, Identity=90%"; Hit description =Malate dehydrogenase, cytoplasmic
  Pfam annotation: Domain name=Ldh_1_C; Domain location=190-359; Score =146.0; E_value=1e-40; Accession=PF02866.8; Description=lactatemalate dehydrogenase, alphabeta C-t
  Pfam annotation: Domain name=Ldh_1_N; Domain location=35-188; Score =98.7; E_value=1.8e-26; Accession=PF00056.13; Description =lactatemalate dehydrogenase, NAD binding do
  Pfam module annotation: Pfam domain module=Ldh_1_C::Ldh_1_N; Domain location=190-359::35-188
MATGQGCSPPPSESALGHRANSDPKSYCRFVDQDTGQIGYALVPMIARGVMLGADQPVILHMLDIPPAAEALNGVKMELVDAAFPLLKGKLKTIGVVATTDVVEACTGVNVAVMVGGFPRKEGMERKDVMSKNVSIYKTQASALEAHAAPNCKVTQFSHVLVVANPANTNALILKEFAPSIPDRNVTCLTRLDHNRALGQISERLSVQVSDVKNVIIWGNHSSTQYPDVNHATVKTSTGEKPVRELVADDEWLNGEFITTVQQRGAAIIKARKFSSALSAASSACDHIRDWVLGTPEGTFVSMGVYSDGSYGVPSGLIYSFPVTCSGGEWKIVQANIKVLKKSRADPDNQDYSPQFETLRLQLMKS

SEQ ID NO: 57599 - protein, 75 aa, Zea mays
  Coding DNA Sequence Number=SeqID_15820
MAPKSLDADGDNERVRQQAGELVTDVAGPTGEGAMGFLAYRGGGLNCAWELIRSCPCRPIVLGTQPRPGNDRVVL

SEQ ID NO: 57600 - protein, 158 aa, Zea mays
  Coding DNA Sequence Number=SeqID_15821
  Gene Ontology: Mol. function=orotidine-5'-phosphate decarboxylase activity; Cellular component=phagocytic vesicle; Biological process ='de novo' pyrimidine base biosynthetic process
  Homolog annotation: Hit_ID=Q9LKI4; Match level="QueryCoverage=69%, HitCoverage=24%, E-value=5e-35, Identity=70%"; Hit description=UMP synthase
  Pfam annotation: Domain name=Pribosyltran; Domain location=35-139; Score=26.8; E_value=2.9e-05; Accession=PF00156.17; Description =Phosphoribosyl transferase domain
MPTPEQAGGDLALAVPVMHGSLPPPCHARRVADLANTPVDLSLLRRALGPYSLIYVVPYTALPIVVVLSVDCSIPILMRRKEAKAHSSSKSIEVSFLIIEDLVTSGSSMLETAALLHVEGLVVADAIVVVNPEQGNRKNLTANGITLHSLMTLIEFLK

SEQ ID NO: 57601 - protein, 101 aa, Zea mays
  Coding DNA Sequence Number=SeqID_15822
MAHRIDRPTRSGGRPKSGDGDLAVPVRQGFNPCLEKLHGSSGKFSKGSIEAEGLWKWLAAVAGARVARAGVGDNSLVVNRFISGHPIFTGLGFRAIPSGMC

SEQ ID NO: 57602 - protein, 197 aa, Zea mays
  Coding DNA Sequence Number=SeqID_15823
MAGGPASRCQDFVPRPGGKGQELSVDDYLVGGVTMFGAQTGLPPAGVEDGQLVVAPSKVPAGLGVPAKGDTETSLDPWLKFCVAADGGSEVNLDAAADGAATSIAQQLRYVEDDMLKRSTGALYDRMWGPHGRGVIRERANRALAQAMMDEEVEDLAGLESSVAQKDAKVEMGAEEQSSLKDGSAEGPSAAGTSAQF

SEQ ID NO: 57603 - protein, 133 aa, Zea mays
  Coding DNA Sequence Number=SeqID_15824
MQYKGSSSLISFEKQTIRIEFLTLQVPAVEERAEGLTGGEVAPVGELVGGEGSGLSRAGLDSCLEKLHGSSGKLSRGAGEARGLWKWLATEASARVARAGGAELAGAKDGVCTTLSMGADGFELGIKVNVLKF

SEQ ID NO: 57604 - protein, 360 aa, Zea mays
  Coding DNA Sequence Number=SeqID_15825
  Homolog annotation: Hit_ID=Q10E61; Match level="QueryCoverage=23%, HitCoverage=15%, E-value=2e-23, Identity=60%"; Hit description =Expressed protein
MIGEGAENCSLGDPSLRDSGKQSRYVVLAQQERSIFLSSLLPLLSEYDDLQPSVLDAQSIVSNLKERLIVTEDRLRESRYQITPWHTELSNNTSNPVSTNPPAGKALVTTSKSSLDIVSQMVYPHVQSPMSSPVQARGDWGAFGNKNHQDISNEVPIRNAGHDDKGGTSLSSRSQYRTDVPPQVSQGDSSAVHFDFETQSQNPPFKGLSRNDVLDGSDSAEAQNTQEPSTRWGLGDSSNLASGLEDANPSYPYLPTVLEEPGSSFSEAAEDDPLPGIEGLRITGEPFPGQELQAGGYSINGTTTCNFEWVRHLEDGSVNFIEGAKQPSYVVTADDVDTLLAIEVQPLDDRKRKVLILSYD

SEQ ID NO: 57605 - protein, 198 aa, Zea mays
  Coding DNA Sequence Number=SeqID_15826
  Gene Ontology: Mol. function=transcription regulator activity; Cellular component=nucleus; Biological process=regulation of transcription
  Pfam annotation: Domain name=HLH; Domain location=26-77; Score=31.1; E_value=3.8e-06; Accession=PF00010.16; Description=Helix-loop-helix DNA-binding domain
  Subcellular localization annotation: CTP_CleavageSite=23; ConfidenceScore=5.04e-01
MEMRAKKSSRSSTSNTSGSTTTTAVERKEIERRRRQQMKSLCAKLASLIPKEHYSSKDAMTQLGSLDEAATYIKRLKERVEELRHKSASARLLAAGSGTRRGGGGGGASTSSAATTTASGGAGSSEEAGRREDDMPPAVVEVRQHNDGSSLDVVLISSAARPFKLHEVVTVLEEEGAETVNANLSVAGTKIFYTIHCK

SEQ ID NO: 57606 - protein, 80 aa, Zea mays
  Coding DNA Sequence Number=SeqID_15827
MDRLADGLAAASLSDPADQSAATAGLPSADYLLSVMRAVEGADATIRTQLEENSRLKEELMRKTQQLQRMFGNQGAKNLS

SEQ ID NO: 57607 - protein, 71 aa, Zea mays
  Coding DNA Sequence Number=SeqID_15828
MAAAAVCGQNAAATWDWPTVREFGLTSAVDRVVYAVDLAQTNLIRAIYGRSNGRDPCIPLRVATSQKSPSG

SEQ ID NO: 57608 - protein, 124 aa, Zea mays
  Coding DNA Sequence Number=SeqID_15829
MRSGSTGLWVAVAEFYTPMPGILQSRDSVRSAPDAALVDANPADMVLAPLSNRVRVRCEIRAVEEPLDDGTHHQRLGATAPPKQAEITRRQIAIFWAAGISAGEETSDELDQPSATRRIGPAWQ

SEQ ID NO: 57609 - protein, 166 aa, Zea mays
  Coding DNA Sequence Number=SeqID_15830
  Gene Ontology: Mol. function=protein transporter activity; Cellular component=nuclear pore; Biological process=intracellular protein transport
  Homolog annotation: Hit_ID=Q9SLX0; Match level="QueryCoverage=99%, HitCoverage=34%, E-value=2e-42, Identity=55%"; Hit description =Importin alpha-1b subunit
  Pfam annotation: Domain name=Arm; Domain location=91-132; Score=36.4; E_value=1e-07; Accession=PF00514.13; Description=Armadillobeta -catenin-like repeat
  Pfam annotation: Domain name=IBB; Domain location=4-93; Score=31.3; E_ value=1.3e-07; Accession=PF01749.10; Description=Importin beta binding domain
  Pfam module annotation: Pfam domain module=Arm::IBB; Domain location =91-132::4-93
MSLRPSEREQMRKGNYKQTVDAEESRRRREGQMMDMRKAKREESLQKKRCDGFPASAAGVPPMGHSTALQQKVRCPLPCSSWPRSDPLSVLGPPIEEVISTGVVSRFIEFLTREDHPQLQFEAAWALTNIASGTSENTKVVVESGAVRLCPSLSSYSTPSSEDVRE

SEQ ID NO: 57610 - protein, 106 aa, Zea mays
  Coding DNA Sequence Number=SeqID_15831
  Subcellular localization annotation: CTP_CleavageSite=58; ConfidenceScore=5.06e-01
MIKRQLMFMRSNVLSTICTPNRFPLHLSNDSPRLKGSRSLEQQVPQRDSPLDPKSNVQGQEGAFIVAMVLDTTIVIGIGLKAFLGFMGKFHHAAIDGFPHPATVIP

SEQ ID NO: 57611 - protein, 108 aa, Zea mays
  Coding DNA Sequence Number=SeqID_15832
MEERGEEEGCAGEDEVGPAGHGRGRTGARGAAVAAGEERARARSAGARSSLPATAAASREGERGAAGRANGGGGAPPPGMTSGVMMMYTYVTLQCSHLPVRSNVIFGI

SEQ ID NO: 57612 - protein, 100 aa, Zea mays
  Coding DNA Sequence Number=SeqID_15833
MPITDSDEGLLLEQEHARGILHANGHICSPKKGHGGGHWKMKEQTLAISATTTRAQKEAKSMWEMALHHRKEATMLLIVTSKKDETSTWVEEDLATYIKA

SEQ ID NO: 57613 - protein, 139 aa, Zea mays
  Coding DNA Sequence Number=SeqID_15834
  Gene Ontology: Mol. function=ATP binding; Cellular component =membrane; Biological process=apoptosis
  Homolog annotation: Hit_ID=Q2R4B8; Match level="QueryCoverage=52%, HitCoverage=25%, E-value=2e-24, Identity=67%"; Hit description =Disease resistance protein RPM1, putative
MGITVEEDGGGGGGARAVARPRHVDVSPPRLIVGILSVLIPLVKSHNLSPTVQKYFGFPCESKATKEYALIRGVRGDIQFITDELASMQAFLSSLSKCEEGHNNQTEDWMKQIWDVAYDIEDCIDDFAHSLRPDPRGSG

SEQ ID NO: 57614 - protein, 296 aa, Zea mays
  Coding DNA Sequence Number=SeqID_15835
  Gene Ontology: Mol. function=zinc ion binding; Cellular component =cytoplasm; Biological process=protein amino acid methylation
  Homolog annotation: Hit_ID=Q6L4V6; Match level="QueryCoverage=81%, HitCoverage=28%, E-value=2e-66, Identity=58%"; Hit description =Putative zinc finger protein
  Pfam annotation: Domain name=zf-C3HC4; Domain location=53-88; Score =18.9; E_value=0.0017; Accession=PF00097.15; Description=Zinc finger, C3HC4 type (RING finger)
MPLQIESRRELLQRSGRSPDGISSVILVEKDRSFIKSKVVIRIMEYLNLFEIHGIIRKTRTVMECLHRFCRDCIDKSMRLGNNECPACRTHCASRRSLRDDPNYDALIAALYPDIDKYEEEEFAFSEQERIQNKKIQETIEETFRRQSDAIGKKRSMAKATATAFARKYRRTRGRVRTIPPDITPTGSSEEERGEGNSKETIREQSSTDDHSPDLRQKRCRKRSGPQGSPAGTIGSIDYSFEENDELVGGKEILATSPLQGEMLAWGGKWCTEPKSTWQCWFKWQDWKEWAHCKIG

SEQ ID NO: 57615 - protein, 181 aa, Zea mays
  Coding DNA Sequence Number=SeqID_15836
MGCCNASDANADPDKRAGRPPVCSQKSKTPSSREATRWREATKDPKDPMAKIIAVMENGKLGFALIKIMVHCEEDHLPSTTTKIWELITILHNLEDLSQMTLTNVIGKIVTFEVSWKMGQEEELNYSKTYAFACDGHKRMKGKKKALSSSSSNEEEEEDDENNDEENDQDSTSSSEDEETV

SEQ ID NO: 57616 - protein, 387 aa, Zea mays
  Coding DNA Sequence Number=SeqID_15837
  Gene Ontology: Mol. function=DNA binding; Cellular component=nucleus
  Homolog annotation: Hit_ID=Q5Z818; Match level="QueryCoverage=93%, HitCoverage=94%, E-value=1e-46, Identity=33%"; Hit description =Squamosa promoter binding protein 2-like
  Subcellular localization annotation: CTP_CleavageSite=65; ConfidenceScore=5.11e-01
MGLRIGKACMIGTSKTQKDPMVWDWEHLVPSVSNAVTRHGSANSSGGTLTSNSELGHGSSKSSISASIDSPSGVGNSLEFNFAAVERHVKNTGTNGRVDDSGNSPSSMIAFNQGEPLISLKLGKRAYFENACGGQDAKVSAASDVTSAASVVKKTKVSQQNAKNWYCQVEGCKVDLSSAKDYNRKHKSVGFVNSVADTRQRTNLFFSQPLYGQVRSNAGSSWDNLGGLKFMETKHPPVHPTKTASPDELHFSALQITSAAAHTGHHHDLDGFMAFKGTSTKVLNQGVEAWAAASSSNNGGPEGGRALSLLSDGSWGSSSAVIQQPTSHADAGALLPPLATVAVSNAAAAAGHPLDPSPGRFWPQDDHPPLVDGPATQIPELAHLRIW

SEQ ID NO: 57617 - protein, 52 aa, Zea mays
  Coding DNA Sequence Number=SeqID_15838
MVQPPTQDEDQVPQDDANNQRGAHEEEDKEDEEEVHDGLGEAQSHFAYVTQF

SEQ ID NO: 57618 - protein, 134 aa, Zea mays
  Coding DNA Sequence Number=SeqID_15839
  Gene Ontology: Mol. function=nucleic acid binding; Cellular component= intracellular; Biological process=translation
  Homolog annotation: Hit_ID=O24586; Match level="QueryCoverage=60%, HitCoverage=13%, E-value=6e-26, Identity=69%"; Hit description=Gag
  Pfam annotation: Domain name=zf-CCHC; Domain location=113-130; Score =15.8; E_value=0.0025; Accession=PF00098.13; Description=Zinc knuckle
MAGKISDRVAAGIITPPYHGDLILLQEYRREEMPIDSSARPRHRSVIGGEPPSTEPQVAFKATNDKEAVPSKVAQVEVASLNDEEIALAIKQFKVTLKGHKDYNNKNKSKGKRVCFKCGKSGQYIANCPDNDDK

SEQ ID NO: 57619 - protein, 468 aa, Zea mays
  Coding DNA Sequence Number=SeqID_15840
  Gene Ontology: Mol. function=nucleic acid binding; Cellular component= ribonucleoprotein complex; Biological process=RNA processing
  Homolog annotation: Hit_ID=Q5JM05; Match level="QueryCoverage=90%, HitCoverage=100%, E-value=2e-89, Identity=47%"; Hit description =Putative RNA-binding protein homolog
  Pfam annotation: Domain name=La; Domain location=124-230; Score=42.7; E_value=1.2e-09; Accession=PF05383.7; Description=La domain
MDGQAPPLLDAVVLEPLAVGDELHPRRPVEVEDAPAAAPPSGMDGQVPPLYNVTRDPLTVSDELQPTGEVVDDALLVAPDIVKGEVMEDDILPVATDIINDAASECPEAGSDGVVLTDELRNRIVKQVEYYFSDENLPTDEFLLNYVKKNNKGFGCEFYDYYSGVRDNVFGVPVLSFFSRDSNFTQAYAFIVCVSALDIGAFPIEIIASFRRMKKLVQDLSVIEAALRTSSKLVVSSNGKRVRRLHPLPHKELKDSKKSTVLVENLPPDFSMESIQEKFATVGKVVNITINDPESVKEFSTAKKPDFNLSFKVTALSDESNWRTGMKVRLLSKQSVMGPGKYKKPSKENQDAVSKMIDQNQHSKEDQLKTLEKISGADAVGITKDRDNLKPVFITETEHQDQKPNARGRKGWYKGQGQMQQNANKQGSCGSESLNKPISGPRMPDGTRGFTLGRGRSLPLQKSEKAEE

SEQ ID NO: 57620 - protein, 317 aa, Zea mays
  Coding DNA Sequence Number=SeqID_15841
MVSDLLLLLFLSLSLSFSHSRAYLLGKKSTYYSLATVLINYTHMDSSQQQQKQDDVDVDVMEVPEVHGDLLMELLDASLAAENAAHHHHHHHHHQQLGLAPDGDGDGDCWIDDNQENYDNMHAHQGCEDCRGLLDGILSDFDDYDGGPSRPRSPPAPYRVVFGHDDDTLLELEWAEEAAMDPFATSESAGGWYMDGLVMAMAWDEQQDGGGFPFEPCYGYEGEAGAAGQLYDASPLWEFALLPAGCVRMVYALESKTEVVENVLHIRRRTAKNRAYREPARITVTLLALEHAENSLTPVTGNCAVCPHRANHCTSSS

SEQ ID NO: 57621 - protein, 234 aa, Zea mays
  Coding DNA Sequence Number=SeqID_15842
  Gene Ontology: Mol. function=metal ion binding; Cellular component =integral to membrane; Biological process=ubiquitin cycle
  Homolog annotation: Hit_ID=Q8S1W2; Match level="QueryCoverage=88%, HitCoverage=86%, E-value=2e-50, Identity=56%"; Hit description=RING zinc finger protein-like
  Pfam annotation: Domain name=zf-C3HC4; Domain location=110-151; Score= 31.4; E_value=3.1e-06; Accession=PF00097.15; Description=Zinc finger, C3HC4 type (RING finger)
  Pfam annotation: Domain name=zf-RING-like; Domain location=110-151; Score=2.1; E_value=0.08; Accession=PF08746.1; Description=RING-like domain
  Pfam module annotation: Pfam domain module=zf-C3HC4::zf-RING-like; Domain location=110-151::110-151
  Subcellular localization annotation: CTP_CleavageSite=62; ConfidenceScore=5.40e-01
MKASDPGSAWFGSGARAPAAAAGTGHNVRLITTAVAAFVSVLGLALFLHLYVCHVRRRNRRRAAAIAAALPTTAAAPAPKGGLDPAAIAALPTTLYRNDAAEAGAGSDECTICLGAVQDGEVVRALPACGHVFHVPCVDTWLASSSSCPVCRAEVEPPPPTAVGSARFVQEKVQDAVKQEAGSSTPDRGIGACASLIKMLSRERPAPRRPQGAYADAGDLDDLERQQYAVAVNN

SEQ ID NO: 57622 - protein, 43 aa, Zea mays
  Coding DNA Sequence Number=SeqID_15843
MVSQKKKKRVPEFRVPVSDPGFSGTDRVLVIPYPTRIRGSISG

SEQ ID NO: 57623 - protein, 486 aa, Zea mays
  Coding DNA Sequence Number=SeqID_15844
MRHLKRGRGGFDPGDAVVLDVVGLGEFARLSLPEPPPDELGLSAAYDDASGRIMVSICGDAVSASPADLAVALGLPLGPVGLLAGWDAAVFSTAEAIGAVRRFVCDRVLLGWGESGFTVSMEVAAALRLVEEGKAYEVDWAGLIWATVKREVVAGTTRRYAPYLLHLMVRQRPERFVEGNGSLALEKGLKGQVLQQCQLEDEEETSLVFWGTQNFGDLEEMPIFGSQNISFFPQPQEVGGNCSYQTISRFQALMQRIQGYVSDMESKYLDKEKTCRDTQHEVECIKNMVMEKDQQIEATVNAIRQELLERSVVMRTLEADKDQLSRSVQQYDKLLKKSLAKFQEYMNMVTRGEGVDSYLENLGLTGGQNLTWVCQMRYQCQMTRIQETCDSNSLKLLENITEMDRSIASLNREVEGLKNCVEDDGEGKASLAMTLGASWTGEGDHVSNTTQGGKQLVGLVGKPDKRNDIRESMDLDGVRSGAKLRK

SEQ ID NO: 57624 - protein, 83 aa, Zea mays
  Coding DNA Sequence Number=SeqID_15845
MEIPRGMGKLCMESVWRKFILGCDDCSPEMVFRRGAARCREPMSVREESRIFGTLQGGAWGTDFVISGEATSAYGVCAAIEWS

SEQ ID NO: 57625 - protein, 1099 aa, Zea mays
  Coding DNA Sequence Number=SeqID_15846
  Gene Ontology: Mol. function=hydrolase activity, acting on acid anhydrides, catalyzing transmembrane movement of substances; Cellular component=integral to membrane; Biological process=metal ion transport
  Homolog annotation: Hit_ID=Q9SZW4; Match level="QueryCoverage=73%, HitCoverage=86%, E-value=0.0, Identity=49%"; Hit description =Putative cadmium/zinc-transporting ATPase 3
  Pfam annotation: Domain name=E1-E2_ATPase; Domain location=172-391; Score=267.7; E_value=2.3e-77; Accession=PF00122.10; Description=E1 -E2 ATPase
  Pfam annotation: Domain name=Hydrolase; Domain location=395-621; Score=108.9; E_value=1.5e-29; Accession=PF00702.16; Description =haloacid dehalogenase-like hydrolase
  Pfam module annotation: Pfam domain module=E1-E2_ATPase::Hydrolase; Domain location=172-391::395-621
MGDAAAAGTLHKSYFDVLGICCPSEVPLVEKLLRPLPGVRTVTVIVPSRTVIVLHDAAATSPAQIVKALNQARLEASVRAYGGGSDGRQAAGSKRWPSPYVLLCGLLLVVSLFERLWPPLKWCALAAAAAGLPPIALRSFAAARRLTLDVNILMLIAVSGAIALKDYSEAGFIVFLFTTAEWLETRASHKATAGMSSLMSMAPQKAVVAETGEVVAAQDVKVGTVLAVKAGEVVPIDGVVVDGRSEVDESTLTGESFPVAKQPESQVWAGTLNIDGYIAVRTTAMADNSAVAKMARMVEEAQNSRSRTQRLIDTCAKYYTPAVVVMAAGVAVVPVVVRAHNLKHWFQLALVLLVSACPCALVLSTPVATFCALLTAARTGLLIKGGDVLETLARIKIAAFDKTGTITRGEFSVEEFQAVGERVTTPQLLYWVSSIESRSSHPMASVLVDYAQSKSVGPKSDNVAEFQIFPGEGIYGEIDGEGVYIGNKRILSRASCETVPDMKDMKGVTVGYVACKGQLIGVFTLSDSCRTGSDEAIRELRSLGIKSVMLTGDSSAAASYAQNQLGNILDEVHSELLPEDKVRIVDELKAKHGPTLMIGDGMNDAPALAKADVGVSMGVSGSAVAMETSHITLMSNDIRRIPMAVQLARRTHRTIVVNIVFSVITKLAIVGLALAGHPLIWAAVLADVGTCMLVIMYSMLLLRSESNGGRKVKKCCASSQHGSHSHARKKHCVSHHCSDGPCNKSTAGCSKESPSAGKHACSDHGHAHTHCKEPSNHRPERHACHDHGHSHNHCKEPSSHVVTEKHVCHDHGNTHSHCEEAGNQLLLVESHGCNDHGHGHSHDRCKELSSPRFTSKHECHDHEHSHCKEPKTPCADSEAACHGHGHGHEHRHCEGDSHSHATGEHGCHEHDAHSHCEEHGHSDTAVEHACEHECHGEHQTVHAVETHHCHDHDHEHGQHELGEIEEPEKDCHDHSHHCCHEPHGKDKVAAEPVEEVTISIAALPKDEGHHHSEEQHNGEHCRKAKDCGGGGGAAPTDCAASKNCCGVKGGDACSSVQAARARETGPCCRSYVKCPRTAAASRSSCCGHSMLKLPEIVVE

SEQ ID NO: 57626 - protein, 250 aa, Zea mays
  Coding DNA Sequence Number=SeqID_15847
  Subcellular localization annotation: CTP_CleavageSite=84; ConfidenceScore=5.44e-01
MPYGTSELYLALSTLYNYIGYLTVSAASPASSRQSTPALVSGAFRMGCIFSSPGSARALRPCAGVRVIHTNGFVEDFEGPGVVTVAHVTRCLGGPGGPASAANAAGKGYVLCSSAHLLQPGRGPFRPDDALQPGTVYFLLPQSVFQAESSAVDLACLMNRLTALARKGGASAAPKPSPLDALFDAAAAAAAASGSHRQHNQQRMPVAAAAREKKGQPWRAAPWKPCLERIDESVGRASMRSASSGCSSEA

SEQ ID NO: 57627 - protein, 335 aa, Zea mays
  Coding DNA Sequence Number=SeqID_15848
  Gene Ontology: Mol. function=glutamyl-tRNA reductase activity; Biological process=tetrapyrrole biosynthetic process
  Homolog annotation: Hit_ID=Q9LVD1; Match level="QueryCoverage=83%, HitCoverage=73%, E-value=3e-88, Identity=52%"; Hit description =Arabidopsis thaliana genomic DNA, chromosome 5, P1 clone:MJB24
  Pfam annotation: Domain name=DUF266; Domain location=120-207; Score =160.3; E_value=5.1e-45; Accession=PF03267.4; Description=Arabidopsis protein of unknown function, DUF266
MAPRSRAPSRRPLWFIVLVAFVCVVAIGAYLYTPQHYTACYLVPSEACNSRPPPEPARVYTDDEIAARVIMRDIIRARPVQSKNTKIAFMFLTPSLLPFEKLWEKFFMGHEDRYTIYVHASRDIPSHSSPIFAGRDIRSEKVIWGTISMLDAEKRLLAHALQDPENQHFVLLSESFDDPGPHGAGRYSEHMLPEIVKKDWRKGAQWFTVKRQHAILILADTLYYGKFKRYCKPGNEWHNCYSDEHYLPTLFNMVDPTGISNWSVTHVDWSEGKWHPKVYRAADTSFDLLKDIAHVAQRRPCVWNGMKRPCYLFARKFYPEALDNLLNIFSNFTII

SEQ ID NO: 57628 - protein, 521 aa, Zea mays
  Coding DNA Sequence Number=SeqID_15849
  Gene Ontology: Mol. function=binding; Cellular component =intracellular; Biological process=protein kinase C activation
  Homolog annotation: Hit_ID=Q5Z851; Match level="QueryCoverage=91%, HitCoverage=97%, E-value=1e-135, Identity=56%"; Hit description =Pentatricopeptide (PPR) repeat-containing protein-like
  Pfam annotation: Domain name=PPR; Domain location=183-216; Score =26.8; E_value=7.5e-05; Accession=PF01535.11; Description=PPR repeat
  Pfam annotation: Domain name=PPR; Domain location=292-326; Score =30.7; E_value=5e-06; Accession=PF01535.11; Description=PPR repeat
  Pfam annotation: Domain name=PPR; Domain location=327-361; Score =15.7; E_value=0.1; Accession=PF01535.11; Description=PPR repeat
  Pfam annotation: Domain name=PPR; Domain location=363-397; Score=4.6; E_value=2.1; Accession=PF01535.11; Description=PPR repeat
  Pfam annotation: Domain name=PPR; Domain location=44-78; Score=9.0; E_ value=0.64; Accession=PF01535.11; Description=PPR repeat
  Pfam annotation: Domain name=TPR_4; Domain location=149-174; Score =5.5; E_value=8.4; Accession=PF07721.5; Description=Tetratricopeptide repeat
  Pfam annotation: Domain name=TPR_4; Domain location=182-207; Score =9.8; E_value=2.5; Accession=PF07721.5; Description=Tetratricopeptide repeat
  Pfam annotation: Domain name=TPR_4; Domain location=258-283; Score =3.1; E_value=16; Accession=PF07721.5; Description=Tetratricopeptide repeat
  Pfam annotation: Domain name=TPR_4; Domain location=291-316; Score =4.6; E_value=11; Accession=PF07721.5; Description=Tetratricopeptide repeat
  Pfam annotation: Domain name=TPR_4; Domain location=394-419; Score =6.4; E_value=6.4; Accession=PF07721.5; Description=Tetratricopeptide repeat
  Pfam annotation: Domain name=TPR_4; Domain location=43-68; Score=5.6; E_value=8.2; Accession=PF07721.5; Description=Tetratricopeptide repeat
  Pfam module annotation: Pfam domain module=PPR::PPR::PPR::PPR::PPR::TP R_4::TPR_4::TPR_4::TPR_4::TPR_4::TPR_4; Domain location=183-216::292
MTHKRHAATGLRTGGTILHALSAASAAHLHAHALKVGVLFTCLHLCSGLLKTYASSGRIAAARQLFDEAPRRNVPLWNTLVSAYARCGHPRSALAAASAMARGGGGGAGARPNVVTVAILMSACAKLRRPAPGREVHGYAARNVAALDLHALNALVHMYGRCGRLRDARTAFAGIGAGARNAVSWTAMIDACRENGRPAEALGVFEEMRRLAGAEVDEAALLAAVSACASLDCAAGLGDWVEACAAESGFLRRGTTSARVANALIHMHGKAGQVERSCAIFDSMGAARRTVVSWTAMVQALATNGHAVAALVRFAQMLREGFVPDEVAFLSAIGACACAGLVSEGRRLFESMVEEHRIAPQMEHYGSMVELLCRAGSLADAFEFVLAMPVAPDPVIWRALAGACRDHGDAGLARRVMDHVIAMEPHHAGNYLLASNLCAADEDWGRVVDVRLEMGARKATISRTASGAVSSVQVNGCVVAHINHPLDPPLGVMCLQPAGGQIGGHSNISKAVRSRMLERVL

SEQ ID NO: 57629 - protein, 130 aa, Zea mays
  Coding DNA Sequence Number=SeqID_15850
MEKKTLCSIMDRPASGADRPEACKGGSALAPRPRIVRPCVADHLRLRREHHQVVRSSVWHPDQRQHTFWWLHWGQGCLDLLKIDPHMAGSNDHTNVFTTNIIKPAMEALPADDQYPFEDLIGYEEKKVMR

SEQ ID NO: 57630 - protein, 193 aa, Zea mays
  Coding DNA Sequence Number=SeqID_15851
MTDEEKDVATKRRLESPPRCDYGDRAFICEDSVKYFVCPNIDYPYGWRKCHFLEWLYGPMSHWPEPEAKEKKKNEWAEELKSDPELYKCGIEVKYGLVPSEFGVSYFCGHMVDYNEETRRCSWERYGEEEEVMHTIKSKRLMGHKMCCRSHLIDSYIKDWSQDMRRFAKSMWFDSSMEEENTSRLSELIALVE

SEQ ID NO: 57631 - protein, 263 aa, Zea mays
  Coding DNA Sequence Number=SeqID_15852
  Homolog annotation: Hit_ID=Q7FS87; Match level="QueryCoverage=36%, HitCoverage=7%, E-value=3e-22, Identity=51%"; Hit description =Putative glycerol 3-phosphate permease
MPLDSFTCDNCILQIEETSIHLFFRCNFAKRCWLLLGLLPPCATDLLHTLLRIRRRLQVPWRLEAIIIMTWCIWRSTPFHVVPTVVNGRNHGILLSSYGVKDFLAWWPTSDSFGSEPIEKARQTFGVKEMVVPITAGILSALRRVLARRVSLKGSASDSIVKFQLPNWAYLSTVLFGMVLIFYVDNVTEEKLHLVFSSPRHLMVSTGCIIVLEIVYQMDFSLFGFLVFLKQPPWNAQRKALWRPMNYRMGVFHNQLPITELPS

SEQ ID NO: 57632 - protein, 451 aa, Zea mays
  Coding DNA Sequence Number=SeqID_15853
  Gene Ontology: Mol. function=tRNA isopentenyltransferase activity; Biological process=tRNA processing
  Homolog annotation: Hit_ID=Q5N7L0; Match level="QueryCoverage=61%, HitCoverage=77%, E-value=1e-95, Identity=67%"; Hit description =Cytokinin synthase-like
  Pfam annotation: Domain name=IPPT; Domain location=178-384; Score =9.9; E_value=1.5e-11; Accession=PF01715.8; Description=IPP transferase
  Pfam annotation: Domain name=IPT; Domain location=144-376; Score= -112.0; E_value=0.00063; Accession=PF01745.7; Description=Isopentenyl transferase
  Pfam module annotation: Pfam domain module=IPPT::IPT; Domain location= 178-384::144-376
MEEKRYYNKKKGGEAHIGREWDSDESSTDSSDDEDAANIAVNKGLLFPNVGHKCLMAKDNKKKKIGLGGGEGYMSGLITRIGTVARSPMAAAAVAGIGSNDVPRKRLRRPSSVRIMERRSRGGSDGDCSCSSSGKELEPAEPTTRLVVIVGATGTGKTKLSIDAAVALGGEVVNADKIQLYAGLDVTTNKVPHADRRGVPHHLLGAVRADAGELPAPSYRALASAAAASVAARGRVPVVAGGSNSLVHALLADRLGDGDPFEADGGYRPSLRFPCCLLWVDVDGAALDDYLDRRVDDMVREGMVEELREYFASTSPAERASHAAGLGRAIGVPELGAHFAGRKTLAAAIDEIKVNTRVLAAAQVRKIRRMADAWGWPVRRLDATPTIRARLAGAGCAAEAAAWERDVGGPGLAAMRQFLDCHEQQQQQRWPLTAEFWRCPEATGHRSTGRT

SEQ ID NO: 57633 - protein, 35 aa, Zea mays
  Coding DNA Sequence Number=SeqID_15854
MAGRGQGPIERWPSARPPLPAVEPVSGEAAMQLVK

SEQ ID NO: 57634 - protein, 264 aa, Zea mays
  Coding DNA Sequence Number=SeqID_15855
  Pfam annotation: Domain name=DUF1639; Domain location=210-259; Score =114.7; E_value=2.7e-31; Accession=PF07797.4; Description=Protein of unknown function (DUF1639)
MRASTRLDCSARTSVGREESCPATADPRAEPPPPAASHTSSRGRPRRLAPTACLLPSRPQGPAVTGGGAARDRRRSSSSSHRRVGAVQQQEMPCDGRVKDLRAKLMGHLRDAADRLHLPPPSSPRRPQPQPRSPEPEPPAPPTRPTPSQKEEATAARPWNLRDRKCRRPTARGAAAAAALELDASPAWEAGVEKARRSVPRERAPFALALTAGEVEEDVYALTGARPRRRPRKRPRVVQRQLDSLFPGLWLTEITTDVYKVPDE

SEQ ID NO: 57635 - protein, 119 aa, Zea mays
  Coding DNA Sequence Number=SeqID_15856
MRIQELASSNLVQPMRDEEPQILEGLPVSIKGERKPCCNFGRPRHANSPQCCCRHWESGMRIAASSAAAASRMRIAANGAAATAGMRNYERDWGGNCGLVGCGHVGQWDFCGVTDGLGH

SEQ ID NO: 57636 - protein, 232 aa, Zea mays
  Coding DNA Sequence Number=SeqID_15857
MAKVKVMQVGDDGLRAVKDERWVLTEGLEKPVSQELHELACGRAKDGYFNWRDPNHFIANYTKMKGKLEASKHEHHSSWCKRPHHDSDDTSSLSDDELERWLEDKVNGLYFFTDIMRHLYTIALGEDVEGDNDKDIDDDSTLEVSLFADDFTTKIYELTTTLVGKDKLVRLAAHERKEYKHKYEAMLRELEPARASMVVSYETHCDECTLHMSNITTLQTMYATLLDECDEL

SEQ ID NO: 57637 - protein, 144 aa, Zea mays
  Coding DNA Sequence Number=SeqID_15858
MAPRTLYDDDDTQPPYGSKRTSARTRQPRQLSFARLQRSSDDHDTTRTGRQDLFGCHDGMEGNENDRYRMVADWQNMGMDCAREEGIGKLGIGCMGEMGMGMCFAGRGMRMIDIEWWQTGRTWEWTVRGRRESERQNREWQNTE

SEQ ID NO: 57638 - protein, 1070 aa, Zea mays
  Coding DNA Sequence Number=SeqID_15859
  Gene Ontology: Mol. function=monooxygenase activity; Cellular component=nucleus; Biological process=electron transport
  Homolog annotation: Hit_ID=Q339A6; Match level="QueryCoverage=90%, HitCoverage=98%, E-value=0.0, Identity=72%"; Hit description=Anther ethylene-upregulated protein ER1, putative, expressed
  Pfam annotation: Domain name=Ank; Domain location=698-730; Score=2.1; E_value=16; Accession=PF00023.20; Description=Ankyrin repeat
  Pfam annotation: Domain name=Ank; Domain location=731-763; Score =36.0; E_value=1.3e-07; Accession=PF00023.20; Description=Ankyrin repeat
  Pfam annotation: Domain name=CG-1; Domain location=110-228; Score =281.6; E_value=1.5e-81; Accession=PF03859.7; Description=CG-1 domain
  Pfam annotation: Domain name=IQ; Domain location=893-913; Score=24.8; E_value=0.00032; Accession=PF00612.17; Description=IQ calmodulin -binding motif
  Pfam annotation: Domain name=IQ; Domain location=916-936; Score=29.1; E_value=1.6e-05; Accession=PF00612.17; Description=IQ calmodulin -binding motif
  Pfam annotation: Domain name=TIG; Domain location=496-582; Score=9.5; E_value=0.1; Accession=PF01833.14; Description=IPTTIG domain
  Pfam module annotation: Pfam domain module=Ank::Ank::CG -1::IQ::IQ::TIG; Domain location=698-730::731-763::110-228::893 -913::916-936::496-582
MRVSPRRKHLSTSRARVSSEPVVTGDCGCLVLCVGVGTLGVSYFVLVPARRRRQVGPAVAAEQEGLCDAFLVQDRYAEIGDHGNFGIIHGFGRFGALWVYGQELGNIEQILKEAQHRWLRPAEICEILKNYRNFRIAPEPPNRPPSGSLFLFDRKVLRYFRKDGHNWRKKNDQKTVKEAHERLKSGSIDVLHCYYAHGEENINFQRRTYWMLEEDYMHIVLVHYLETKGGKSSRARGNNMIQEAAVDSPLSQLPSQTMEGESSLSGQASEYEEAESGNYHGLHATQNTSFYPVNQLNSPVILNGSSAMLGTNGCANQTDLPSWNSVIELDHEPVQMPDLQFPVPPDQGTSTEGLGVDYLTFDEVYSDGLSLQDIGATGTHGESYLQFSSGTGDLAATVNSFPQENDGSLEAAIGYPFLKTQSSNLSDILKDSFKKTDSFTRWMSKELPEVEDSQIQSSSGAFWSSEEANNIIEASNHEALDQFTVSPMLSQDQLFSIVDFSPNWTYVGSKTKILVAGNILNDSQITERSKWSCMFGEVEVPANILADGTLICYSPQHKPGRVPFYITCSNRLACSEVREFEFRPTVSQYMDAPSPHGETNKVYFQIRLDKLLSLGPDEYQATVSNPTLEMVDLSRKISSLMASNDEWSNLLKLAVDNEPSTADQQDQFAENLIKGKLHIWLLNKVGMGGKGPSVLDDEGQGVLHLAAALGYDWAIRPTLAAGVNINFRDIHGWTALHWAAFCGRESTVVALIALGAAPGALTDPTPDFPGSTPADLASSNGQKGISGFLAECSLTSHLQVLNLKEANMAQISGLPGIGDVTERDSLQPPSGDSLGPVRNATQAAARIYQVFRVQSFQRKQAAQYEDKGGMSDERALSLLSVKPPKSGQLDPLHSAATRIQNKFRGWKGRKEFLLIRQRIVKIQAHVRGHQVRKHYRKIVWSVGIVEKVILRWRRRGAGLRGFRSQEGSVESSSGGTSSSSIQNKSSGDDYDFLQEGRKQTEERLQKALARVKSMAQYPEARDQYQRIFTVVSKMQESQAMQEKMPEESAEMDMSEFKELWDDDAPIPGYF

SEQ ID NO: 57639 - protein, 150 aa, Zea mays
  Coding DNA Sequence Number=SeqID_15860
MYVVNPFEKKNVTNSQSMESEDMKAISPQDPHCEKIYMSILLTKYLKHKASKNTRHKIYPEVRPHHKGVLLPVEEPTRVVSFSTIILQIPTTKVKGFLISNVAHKSRITNFLGSSTNLGTPKKPQIVLKLRVSRTPRMHKRYLQQAQDLK

SEQ ID NO: 57640 - protein, 168 aa, Zea mays
  Coding DNA Sequence Number=SeqID_15861
MEARGGAGTGRHATARGQGGARRRWGRGWRSAVVGERVALGGGGGEGGAGIGRCAAAGGRNARIQEAEACSRCYCRYLGRIIQQLQSHLMRGTWRRAAARGQGGTRRRGDREALDSGGEEGGARRRWGRGWHSAAVGERVARGQGGARRRGAGMRAYRRPRRARGVIA

SEQ ID NO: 57641 - protein, 108 aa, Zea mays
  Coding DNA Sequence Number=SeqID_15862
MEARDGAGTGRHATTRGQGGARRRWGRGWRSAVVGERVALGGGGGEGGAGTGRRAAAGGRNARIQEAEACSRCYCRILPNLIYLFLFTHGTTIINSCRRAILLDQHGE

SEQ ID NO: 57642 - protein, 75 aa, Zea mays
  Coding DNA Sequence Number=SeqID_15863
MTIEQMFLMQTQAVQAIGQTLAAMQQVQYQQPPPPQSKVQVQMPQLATHADPEAITWEEFRDNFRCYHVPKGLMI

SEQ ID NO: 57643 - protein, 163 aa, Zea mays
  Coding DNA Sequence Number=SeqID_15864
  Homolog annotation: Hit_ID=Q9SJF0; Match level="QueryCoverage=24%, HitCoverage=3%, E-value=3e-13, Identity=87%"; Hit description =Serine/threonine-protein phosphatase BSL2
  Subcellular localization annotation: CTP_CleavageSite=33; ConfidenceScore=5.43e-01
MDVDSRMATESDSDARGGSGSGSDTTMASLSPSASLSPSTPGTPTIAVASPASVAGPRPAPGFAGATADVHCYDVLSNKWTRLTPLAEPPSRRAAHVATDVGTMVVIQVSADAIVNITYPFAFCLGFLRRQRVVVAVLAAGDRTASRPTKLVLSDASKSKSFF

SEQ ID NO: 57644 - protein, 161 aa, Zea mays
  Coding DNA Sequence Number=SeqID_15865
MGRPTKREVDDTGGQRCCAGVDDGESNIAEAGGRSRGAPATKGKPASQCRLCGSTHDIGGWGRGGRGGECSQQGEVGGQRRPSAGNNRDGERPRRRVWEMGPDGWERGDQRLTGTWGGGRRQLGKRMSRRGALAAGRWCRRRPMAGDQRLTRTRGGGRRRL

SEQ ID NO: 57645 - protein, 664 aa, Zea mays
  Coding DNA Sequence Number=SeqID_15866
  Homolog annotation: Hit_ID=Q6YPG7; Match level="QueryCoverage=38%, HitCoverage=69%, E-value=1e-72, Identity=59%"; Hit description =Putative GT-2 factor
MQSGYGGVSEFQQFIMDGGFAMSAPPQQQQPPATAQEMGGPFRYQPLHHHALPPPHHHHHAQHMPPHFAHFGAAPPPPPFTQQLLHQAAAGGHHHLQLFHEQQHHHKPQPPARWAPHPHHHHHHHHLGFDVEAAVPESSGAAGGGSAGASAGAAPSGVPPFLAAAMNFKLAVDAGGGSGATEGTDDGGGAAGSGMMLHVGSGGGGGDEAATESRLRRWTGDEETSIKEPTWRPLDIDYLQSSSSSKRTGKEKVATPAAPANYFKKGDAAAAGGGNYKLFSELEAIYKPGSGGAQTGSGSCLTGDDNAILEPAVADLPAVGPQQLNTSETSAGEEAAAVVQPQQQPQASADAARRKRKRRRQEQLSASASFFERLVQRLMEHQESLHRGFLEAMERRERERAARDEAWRRQEADKFAREAGARAQDRASAAAREAAIIAYLEKISGESITLPAPPAAAASGDDATAAGKELVPYDGGDATAAEGGGGSLHLSSTSRWPKHEVEALIRVRTGLEGRFQELGLKGPLWEEVSARMAAAGYGRNAKRCKEKWENINKYFRKAKESGKKRPAHAKTCPYFDELDRLYSRSADGGGGEARQLGSSELLDAVIKYPDVRYGPPVFGGGNANNEGGEDDDSDGEEEEEEEEDGIGKGRAGDDQDDEVDNDDE

SEQ ID NO: 57646 - protein, 103 aa, Zea mays
  Coding DNA Sequence Number=SeqID_15867
MEARDGRGDREARDDAGTGRRSTAVGKRVALGGGGGEGGTRRRWGRGWRGDREARGGGGQECAHTGGRGVLEVLLQDSAKSHILIPVHPRHNNHQFMQEGNPS

SEQ ID NO: 57647 - protein, 567 aa, Zea mays
  Coding DNA Sequence Number=SeqID_15868
  Gene Ontology: Mol. function=ubiquitin-protein ligase activity; Cellular component=ubiquitin ligase complex; Biological process =protein ubiquitination
  Homolog annotation: Hit_ID=Q84QD7; Match level="QueryCoverage=77%, HitCoverage=60%, E-value=3e-44, Identity=31%"; Hit description =Avr9/Cf-9 rapidly elicited protein 276
  Pfam annotation: Domain name=Arm; Domain location=290-330; Score =27.1; E_value=6.1e-05; Accession=PF00514.13; Description =Armadillobeta-catenin-like repeat
  Pfam annotation: Domain name=Arm; Domain location=331-372; Score =21.0; E_value=0.0042; Accession=PF00514.13; Description =Armadillobeta-catenin-like repeat
  Pfam annotation: Domain name=Arm; Domain location=415-457; Score =11.1; E_value=0.51; Accession=PF00514.13; Description=Armadillobeta -catenin-like repeat
  Pfam annotation: Domain name=U-box; Domain location=159-230; Score =70.3; E_value=6.3e-18; Accession=PF04564.6; Description=U-box domain
  Pfam module annotation: Pfam domain module=Arm::Arm::Arm::U-box; Domain location=290-330::331-372::415-457::159-230
MAPRPRRRMLALPAVYPASADAEELAGLVSRQAWRAASRLRPDPEDDRAARAVRSVLARFASGVSPDAEDARLVLACVGVDTWLDCSEEAAFLEAELLERLETGSDSDNDNDLVLIGGLMAFLLYCRVVLFDRIDDSGKAATANRLPPRWAAGVNLNLEALQCPITLELMTDPVTVATGQTYDRASIKKWIKSGCRTCPVTGERLRSAELVPNVAARAVIEQLLLSRGVPLHEPSSKHRCAVDKTATPFGAAAAGGVRLSAAFLMARLSSGAPEDQKKATYEARKLSKRNVFYRACLVEADAVPWLLHLLSSTDASVQDNSVAGLLNLSKHPAGRRALVEAGGLGLVVDAVNVAAKVEARQNAAAILFYLSSNLEYCEEISRMPEAVPTLVRLAREGAYRGRKNALVSLYGLLQCADAHGRAVSAGAVDALAGLLGSSAGDDDLALDAVALLARLAEQPAGARAVMESSELVTRLVDLFGEAASRSAKEHCVALLALLGRHCGDKVLTLLGKLPGLMPALYAVIADGTPQAGKKARWLVNEIHRHYEQRQTPASAPAPTTGDRVIHV

SEQ ID NO: 57648 - protein, 140 aa, Zea mays
  Coding DNA Sequence Number=SeqID_15869
MNLCAIVDRPSPSRRRSRRTQRRRRSCVQVVDLTRLRIEHHEVELHHSMKRAVYKQEHWIFDLHAQVAAICGNHSPSIDSKVANVCFMLRGTTKFADSAWISLLAGILSGRRDPRLYLGIDRPPKTLLVDVEPKRGEDLR

SEQ ID NO: 57649 - protein, 517 aa, Zea mays
  Coding DNA Sequence Number=SeqID_15870
  Gene Ontology: Mol. function=RNA-directed DNA polymerase activity; Cellular component=intracellular; Biological process=RNA-dependent DNA replication
  Homolog annotation: Hit_ID=UPI00004C1733; Match level="QueryCoverage =99%, HitCoverage=38%, E-value=0.0, Identity=89%"; Hit description =UPI00004C1733 related cluster
  Pfam annotation: Domain name=RVT_1; Domain location=56-225; Score =142.0; E_value=1.6e-39; Accession=PF00078.17; Description=Reverse transcriptase (RNA-dependent
MPGIPRDVAEHSLDIRAGARPMKQPLRRFDEEKRRAIGEEIHKLMAAGFIKEVFHPEWLANPVLVRNKGGKWRMCVDYTGLNKACPKVPYPLPRIDQIVDSTAGCETLSFLDAYSGYHQIRTKESDQLATSFITPFGTYCYVTMPFGLRNAGATYQRCMNHVFGEHIGRTVEAYVDDIVVKTRKASNLLSDLETTFRCLKAKGVKLNPEKCVFGVPRGMLLGFIVSERGIKANPEKIAAITNMGPIKDLKGVQRVMGCLAALSRFISRLGERGLPLYHLLRKVECFTWTPKAEEALENLKALLTNAPILVPPAAGEALLIYVVATTQVVSITIVVERREEGYALPVQRSVYFISEVLSETKIRYPQIQKLMYAVILTRRKLRHYFESHPMTVVSSFPLGEIIQCREASGRIAKWAVEIMGETISFAPRKAIKSQILADFVAEWVDTQLPAALIQPELWTMFFDGSLMKTGAGAGLLFISPLGKHLRYVLHLHFPASNNVAKYEALVNGLRIAIELGV

SEQ ID NO: 57650 - protein, 133 aa, Zea mays
  Coding DNA Sequence Number=SeqID_15871
MRKELKDGVTTSAWRGMSTNGDDERRFQGGRIGEGMETWRWRGGDLGAACLMVHLSSTSMKLSRRESTLRVGERAGTRTGNKAEKKWIGWRKLKGVGAASSNCVRDFPLVKRLGSVGSIWHINEREREGPTRK

SEQ ID NO: 57651 - protein, 90 aa, Zea mays
  Coding DNA Sequence Number=SeqID_15872
  Subcellular localization annotation: CTP_CleavageSite=60; ConfidenceScore=5.58e-01
MAGRAPFIHGGSSLLGLLGRPSRFPMAGSLRRPSPSVAPNVVAEAEKAGMAPPCGRIACRASMVVAHLYFVGARAFYCTSYVWSPKIDSC

SEQ ID NO: 57652 - protein, 396 aa, Zea mays
  Coding DNA Sequence Number=SeqID_15873
  Gene Ontology: Mol. function=hydrolase activity, hydrolyzing O -glycosyl compounds; Cellular component=anchored to membrane; Biological process=carbohydrate metabolic process
  Homolog annotation: Hit_ID=Q33AW5; Match level="QueryCoverage=77%, HitCoverage=80%, E-value=1e-143, Identity=77%"; Hit description =Glycosyl hydrolases family 17 protein, expressed
  Pfam annotation: Domain name=Glyco_hydro_17; Domain location=29-322; Score=339.6; E_value=5.1e-99; Accession=PF00332.9; Description =Glycosyl hydrolases family 17
  Subcellular localization annotation: CTP_CleavageSite=50; ConfidenceScore=5.09e-01
MAAFHHLLPALLLLLLLPSTPEATSSALLGISYGRVGNNLPAATSVPQIVASLGVGRVRLYDADSTTIRAFANTGVELVVGVPDECLATVSTPTGAASWVRSNISPALPATKIAFLTVGNEVLTGVNSSSLSRYLLPAMRCLHDALAQAGLDKQVAVTTAHNLGVLATSYPPSSAYFRKDLLPMLCPILDFHARAGSPFLVNAYPYFAYAEEPTGVELEYALLEPGHAGAAARAVEVRVSETGWPSAGDANETGATPQNAARYNGNVMRLVAQGKGTPLRPAAPLRVYMFALFNENMKPGPTSERNYGLFKPDGTPAYELSYRLPLDNTTSSSSAGGSITGGGGYNGHGYGSSDNGGYYSISAAAKVTPRMNFSFPSHPVLVLRSSVGLAQNQKCE

SEQ ID NO: 57653 - protein, 83 aa, Zea mays
  Coding DNA Sequence Number=SeqID_15874
MGKEEDAVGEVLVVEEAREFGGGGRRTGEEEVYIFGVVISVKLEQEGETILLSSENLAMMAYSKYTIKFNHDGLLEVLDLGLI

SEQ ID NO: 57654 - protein, 152 aa, Zea mays
  Coding DNA Sequence Number=SeqID_15875
MGKNNKRKREPTPQSEDFGDSEYSEEEFSSVSEGSLAPIPLRESSDDSDDSQGLAAEVWAYIRAVERSELEGSDELEYSSYEEDLSEEDGGGDGEDDDDDDEGGGGGDGDGGGSGGGKGDDGGSSRGGSGGGGSSRGSNRGGSGRGSNRASG

SEQ ID NO: 57655 - protein, 54 aa, Zea mays
  Coding DNA Sequence Number=SeqID_15876
MEIGQRLVVEKWRLVVEMRIDGIVIPGCQGLCTLRLRVYKSMVKTKLDWDERRS

SEQ ID NO: 57656 - protein, 54 aa, Zea mays
  Coding DNA Sequence Number=SeqID_15877
MGKLGDAELVALHKPREREVGGPKPCRRQAQGDALQQYIQHLRTKRRPPIMRDW

SEQ ID NO: 57657 - protein, 103 aa, Zea mays
  Coding DNA Sequence Number=SeqID_15878
MVIDSVASPVTDPEENDCVCCVATVKDGKRREVPWERREVPIWPKTENVDGSGHPEVGTGRHGEHVHDKLLRVRALTSCERDRQRSATRPANGVGVNGYFRWV

SEQ ID NO: 57658 - protein, 75 aa, Zea mays
  Coding DNA Sequence Number=SeqID_15879
MAQGDDGGPSSGSGGGSGELNSREEVEEGENGPRVAHGDCGEPQSRRRSQYVPQRGEEKADLSSNNPAGTKSGDI

SEQ ID NO: 57659 - protein, 173 aa, Zea mays
  Coding DNA Sequence Number=SeqID_15880
MGNSHLSNWVERKGRLLEDKFKDRILEILENRHNVVIKVGSRDEKGRHKKYDSMRDFKEMSIPIPRDKKLSKDSDLTKEEERVSKDTKVSGPTVSKALIPLMSHPVLEGKPNANHSEHYALTLIDGPLAKPTTPQVHLINQLRASHSTLMAAQLFRVVTPRIGTYREVLKKKA

SEQ ID NO: 57660 - protein, 308 aa, Zea mays
  Coding DNA Sequence Number=SeqID_15881
  Gene Ontology: Mol. function=protein binding; Cellular component =integral to membrane
  Homolog annotation: Hit_ID=Q8S8G6; Match level="QueryCoverage=83%, HitCoverage=64%, E-value=4e-63, Identity=47%"; Hit description =Expressed protein
  Pfam annotation: Domain name=DUF829; Domain location=21-290; Score =264.0; E_value=3.1e-76; Accession=PF05705.5; Description=Eukaryotic protein of unknown function (DUF829)
WDPPPGEGGPAPLAGGGAAGGATLVVLLGWLGARQKHLRRYADLYRERGVGAVRFVVPVRELVGLDLGRRVERRVADLSEQVAAWCDADRRRTLLFHTFSNTGWLAYGAVLENLQSRADLTERIRGCIVDSAPVLEIRPEVWAAGFSAAMLKKSSSMTGPTTESLDGPVVNGTLNRVGSNVTQPSWGECFLLSTLRKFFEIVLYVPDVNKRLCKVLSVLSEQQPPCPQFYLYSSADRVIPAECVERFVESQRSLGRSVFAHDFVSSPHVDHYRSFPHVYSAKIDEFLKRCEAAIVQRFRSRGSAAALG

SEQ ID NO: 57661 - protein, 270 aa, Zea mays
  Coding DNA Sequence Number=SeqID_15882
  Gene Ontology: Mol. function=pantetheine-phosphate adenylyltransferase activity; Cellular component=cellular_component; Biological process =coenzyme A biosynthetic process
  Homolog annotation: Hit_ID=Q1RVE8; Match level="QueryCoverage=56%, HitCoverage=90%, E-value=1e-52, Identity=66%"; Hit description =Cytidylyltransferase
  Pfam annotation: Domain name=CTP_transf_2; Domain location=50-190; Score=40.3; E_value=6.8e-09; Accession=PF01467.16; Description =Cytidylyltransferase
MAMEEGSGAVEKGPAVGTVADASASVIGEGAVKEEAGGRRQPPAGYAAVVIGGTFDRLHQGHHLFLKAAAELARERIVVGVCDGPMLAKKQYADLIQPIEKRMQNAMDYIKFIKPDLDVRVEPIVDPFGPSIVDQGLEAIIVSKETLPGGHAVNRKRAERGLTQLQIEVIELVPEESTGDKISSTAFRKMEAERALQQQNKQDDTAVGTPAINWRCARNSWEILDDDLTSIAKDSSSVLFVAALRHPRKDSAALALKPGRAKALRRQLRM

SEQ ID NO: 57662 - protein, 36 aa, Zea mays
  Coding DNA Sequence Number=SeqID_15883
MEQQRFQHPILETLHLITYRLDLLRLTAYHLKSYKI

SEQ ID NO: 57663 - protein, 62 aa, Zea mays
  Coding DNA Sequence Number=SeqID_15884
MAIAACTDAVGANTSRSEHDVNFGKPQLERLRARMVVAVGAPAIIGGFMASGGVARFLGRSV

SEQ ID NO: 57664 - protein, 90 aa, Zea mays
  Coding DNA Sequence Number=SeqID_15885
MTSFNINVHRSLKGKCALGPFLSILVIECQHKCFYANLCKVVDKVKILSKAKVCSVWEHRTVRWCTGQCPVHQADLGKQAALGTSTAVYG

SEQ ID NO: 57665 - protein, 137 aa, Zea mays
  Coding DNA Sequence Number=SeqID_15886
MSAMRPEGSVGHEWEADRRSGCGSVLGVVNAALPHLTLGSMPRGSTKGPSDQGSSLSVLTNWWVPRIGDRFPSNLHKLVILEALGGTPIKRCLDRGAIKTIYSHLSSPCPRSYRCAAEHASQITVEAFLQPMVEHRS

SEQ ID NO: 57666 - protein, 250 aa, Zea mays
  Coding DNA Sequence Number=SeqID_15887
  Gene Ontology: Mol. function=sequence-specific DNA binding; Cellular component=nucleus; Biological process=regulation of transcription, DNA-dependent
  Homolog annotation: Hit_ID=Q5NB09; Match level="QueryCoverage=99%, HitCoverage=100%, E-value=5e-50, Identity=41%"; Hit description =Putative MADS-box protein AGL35
  Pfam annotation: Domain name=SRF-TF; Domain location=9-60; Score =61.5; E_value=2.7e-15; Accession=PF00319.9; Description=SRF-type transcription factor (DNA-binding and dimerisation domain)
MARKKVTLQWIANDSTRRATFKKRRKGLMKKASELATLCDVDACVVVYGEEESQPEVWPDVAEAARVLARFKAMPELDQCKKMMDMEGFLNQRIDKLKEQLHKAQRENRERETTLLLHDAIVGRRPGLAGLSAEEIAGPRVDAASPRQACSCSCPTASSGPAGHTDVHHQAPPPHPHPHPHPQGSWLMEVAKAGGDLGALVYSGFGGGRGSVGGAGGTSTEVADMLPHLGGFGAGFGWPDPGLSPPFPPM

SEQ ID NO: 57667 - protein, 105 aa, Zea mays
  Coding DNA Sequence Number=SeqID_15888
  Gene Ontology: Mol. function=binding
  Homolog annotation: Hit_ID=Q6Z901; Match level="QueryCoverage=77%, HitCoverage=13%, E-value=3e-12, Identity=69%"; Hit description =Kinesin light chain-like protein
MAAGLSCIHLEKEERDHSSPLLSSGSVACCCWSSASTSATGEVPLQRDDSDDALEDRLGVGVATEATLDGCDGVEAHGELDALSMVLIWQASPNEGRRSSAARDG

SEQ ID NO: 57668 - protein, 60 aa, Zea mays
  Coding DNA Sequence Number=SeqID_15889
MRLHTLRGDPKRRLMFAKAQASIFKSYFENKNLLDTLEFNRSEVWETEILPIKKQLSFFS

SEQ ID NO: 57669 - protein, 96 aa, Zea mays
  Coding DNA Sequence Number=SeqID_15890
MEAKSHHQPNQGGAFNARQKRAEVRHAHTGAPDIEQYMSDHAKKEMETGEKPTTSHGSASSEESRTKRKEKKDSLKGKEKKKDSSKGKEKKSSSHK

SEQ ID NO: 57670 - protein, 80 aa, Zea mays
  Coding DNA Sequence Number=SeqID_15891
MELRQDLQVEKRRIHRSARWVNCHSQIEVEERGFLKSRHKHKYQGPKAVTDKGIIERMKAQKSQWYKYNKEWSYVKACKR

SEQ ID NO: 57671 - protein, 124 aa, Zea mays
  Coding DNA Sequence Number=SeqID_15892
MATNDDDGSINDVSNYGFWYFLYEEGLFLSKALRNTTNVEGEATQKEIMKLRYEVSGLRFDCDEKETSFKILEKDFIGSRTKVQAMREEKSKLEASNTEKDNRIASLEVELKRVRENEADASIY

SEQ ID NO: 57672 - protein, 99 aa, Zea mays
  Coding DNA Sequence Number=SeqID_15893
MARVACTLHGKRLDGGVSVLSVGVNPVWWYQRRSQISDRVCGRMFASQFDNTKPLCGRVFCLPGLSEILRTRTAVGGPNTLGGSVIAGIRAKPISSDIT

SEQ ID NO: 57673 - protein, 709 aa, Zea mays
  Coding DNA Sequence Number=SeqID_15894
  Gene Ontology: Mol. function=nucleic acid binding; Cellular component= intracellular; Biological process=DNA integration
  Homolog annotation: Hit_ID=Q8W0X4; Match level="QueryCoverage=99%, HitCoverage=45%, E-value=0.0, Identity=89%"; Hit description =Putative pol protein
  Pfam annotation: Domain name=RVT_2; Domain location=258-513; Score =533.7; E_value=1.9e-157; Accession=PF07727.4; Description=Reverse transcriptase (RNA-dependent
MARTMLGEFKTPERFWSEAVNTACHAINRVYLHRLLKKTSYELLTGNKPNVSYFRVFGSKCYILVKKGRNSKFAPKAVEGFLLGYDSNTKAYRVFNKSSGLVEVSSDVVFDETNGSPREQVIDCDDVDEEDVPTAAMCTMAIGDVRPQEHLEQDQPSSSTMVHPPTQDDEQVPQMEACDQGGAQDDHVMEEEAQPAPPTQVRAMIQRDHPVDQILGDISKGVTTRSRLFNFCEHYSFVSSIEPFRVEEALLDPDWVLAMQEELNNFKRNEVWTLVPRPKQNVVGTKWVFRNKQDEHGVVTRNKARLVAKGYAQVAGLDFEETFAPVARLESIRILLAYAAHHSFRLYQMDVKSAFLNGPIKEEVYVEQPPGFKDEWYPDHVCKLSKALYGLKQAPRAWYECLRDFLIANAFKVGKADPTLFTKTCDGDLFVCQIYVDDIIFGSTNQKSCEEFSRVMTQKFEMSMMGELNYFLGFQVKQLKDGTFISQTKYTQDLLKRFGMKDAKPAKTPMGTDGHTDLNEECHLVAVKRILRYLVATPCFGLWYPKGSTFDLVGYSDSDYAGCKVDRKSTSGTCQFLGRSLVSWNSKKQTSVALSTAEAEYVAAGQCCAQLLWMRQTLRDFGYNLSKVPLLCDNESAIRMAENPVEHSRTKHIDIRHHFLRDHQQKGDIEVFHVSTENQLADIFTKPLDEKTFCRLRSELNVLDSRNLD

SEQ ID NO: 57674 - protein, 124 aa, Zea mays
  Coding DNA Sequence Number=SeqID_15895
MAGGKKGKKGRHPADGKRKRPPIPPLEDFGASEYSEEQSIERAGIGGSDDSKEASSEEEDSSDSEEGSDGNGDEGDSSSGSGGDSSSGDNDSGDDGSEGSDDDGDGKGDDNGDNGKAGGTMLPA

SEQ ID NO: 57675 - protein, 53 aa, Zea mays
  Coding DNA Sequence Number=SeqID_15896
MVGTSAVTARLQPGSVEHCAIQDMVDGVTWPTNLPPGWTVEWDAAPAGEEHEE

SEQ ID NO: 57676 - protein, 122 aa, Zea mays
  Coding DNA Sequence Number=SeqID_15897
MGKSKKRGSSSHHSGDKWKRDPTPPSDDFSDSEYSEEEFSSESEGSLVWTYIRAVKHAGLEGSDELEVSSDSSEEGDGEGDGDSGGGGNGDSDGGEGGGDGGSGDGRDGNKGSSKGSNKASG

SEQ ID NO: 57677 - protein, 132 aa, Zea mays
  Coding DNA Sequence Number=SeqID_15898
MAPTTLELQARGLGGQRAWAGENICADDPGPPINAWLIMASGAAEPTGHRLVLGTHGTGVKPDHAERESSMLAKRPPAPTPHTAAPLLRDGNGYGYGYGYNKVPIDNVFADMDIPVSILITRWVSDMWAILI

SEQ ID NO: 57678 - protein, 82 aa, Zea mays
  Coding DNA Sequence Number=SeqID_15899
MRETLSSDESAAVRRTPPAGRRIESNAHDDIPLRGELDLIWAVGSRSDGLGTARVEEPLAKESGVQQVEVNEQGLIEGKLCR

SEQ ID NO: 57679 - protein, 188 aa, Zea mays
  Coding DNA Sequence Number=SeqID_15900
  Gene Ontology: Mol. function=protein dimerization activity
  Homolog annotation: Hit_ID=Q2QRD1; Match level="QueryCoverage=31%, HitCoverage=5%, E-value=2e-07, Identity=48%"; Hit description=HAT family dimerisation domain containing protein
  Pfam annotation: Domain name=zf-BED; Domain location=136-184; Score =15.1; E_value=0.012; Accession=PF02892.5; Description=BED zinc finger
MARFSFRVLVNLMSENIIHVKILGTGSYRSHTCSCAIVPVSRSRREIIVADEEPVIYGIDDDLQPAVVDEEHRLEDHNEAKDARALFGSSAAIDIDNDNELLGAVAGGQTVIGSTSLIPTGTSTATTSCSKCPARSKGWKDFDELTHLVNGKRVRYDVVCKYCKVTLSGKSSSRTGHLLRHNCSAKKE

SEQ ID NO: 57680 - protein, 105 aa, Zea mays
  Coding DNA Sequence Number=SeqID_15901
MKKVVYYETDSSTPSTSDTESTSSKRQEQPRQCPAHTPHLISLGFTLSRALPMPPAVAGDPSPRFPTIQLARDRFKASPSSTPRGLKLFPECLSVRTCLGSDNPG

SEQ ID NO: 57681 - protein, 147 aa, Zea mays
  Coding DNA Sequence Number=SeqID_15902
MGYMTCGYRVQPLQSVKLMVNTRKGGGIDLPANPFNRRVLRQQQAEMNPPNPPLAWTDLVVAAQMQMLQHMANTMQDMQAQMGHECQEMRQERQEMREEMRQERMVRQQQAPLPPPPPVPPRDKHREFMSHKPPTFASSPNPLHADD

SEQ ID NO: 57682 - protein, 131 aa, Zea mays
  Coding DNA Sequence Number=SeqID_15903
MAVLFSHSEVSLGRSGRRRGRGDGYVSRLNTGRGRNGRGKMVGRTPIPLAAKSDHACVVARRSAVLQPGPARQWKADAMRCDVGPDYRCKVANSFARQQYIVALDCGLISIFCGLSLRKFPSQRVSRYRGC

SEQ ID NO: 57683 - protein, 112 aa, Zea mays
  Coding DNA Sequence Number=SeqID_15904
MGLDQGSEPRWSGRARRSRTRTRNVSVRNRAASAGHDEQHQDPGAEASSVVPRAPGRVRAREEVAGAQSQRREPLAARCSMATQPRPARSQVLPGACGRLPWEVSSAELTAL

SEQ ID NO: 57684 - protein, 768 aa, Zea mays
  Coding DNA Sequence Number=SeqID_15905
  Gene Ontology: Mol. function=RNA binding; Biological process=RNA processing
  Homolog annotation: Hit_ID=Q9FLQ1; Match level="QueryCoverage=99%, HitCoverage=77%, E-value=9e-68, Identity=38%"; Hit description =Arabidopsis thaliana genomic DNA, chromosome 5, P1 clone:MCO15
  Pfam annotation: Domain name=Surp; Domain location=161-205; Score =42.5; E_value=1.4e-09; Accession=PF01805.10; Description=Surp module
  Pfam annotation: Domain name=Surp; Domain location=359-403; Score =45.6; E_value=1.7e-10; Accession=PF01805.10; Description=Surp module
  Pfam module annotation: Pfam domain module=Surp::Surp; Domain location=161-205::359-403
MDLEIVGRHALLFDDDATAELVNSGVSLVPWAAVGAADLLLDRHDVRHLLDRVPPRPHRAYSMALLSAPSPDGVSETELDRERYLDLPAGDGEYEGSGDAAPSGNGSDTGQTDYNVVPFSYGYPAGSDEPNSSNLCYRPSFYVPESLLNKLPPSEKVHQIIARTALFVSEHGGQSEIVLRVKQGDNPTFGFLMPDHHLHSYFRYLVDHPQLLKDGADAVGTNKGNTENEHASSGGALSLLGTTYDSGDENEGTLPRSSEGMNPENSMTLDVQGHVKSASIMPDKKEIGKNQNAPPAVKRKTILMKKNQILTGNSMVAVQHEKVNDAIIASSTSKSHTNSGLSEIKEMILEPPSFMKRTMEKIIEFILTNGKEFEKKLIEQDRTTGRFPFLLSSNPYHSYYLKFLQETEESNSHGRSPNNKDRRGSSDRRGRNSRERADRSSCERADRSSRERADRRCSMERKDINYSMESSASDRSSSGPSEKQLYDKQGKGIFHPVCGVKTRKVTADEAAAIVMAATRGLGAANDSLNTMKGTKDNVRTHVSNDPSSSFGSFSSLQDRNALSKHISNSDVDASLTSSGQPQREGFGIIDDDWIANTIAKAAAAAASKEAGSLEATMTKEQKLKADRLRRAKMFAAIIKSGDNKMNDLAAASNPTSEAAKAIPDMNASGLDLQSVAKEREGSSSVLFDHEGPNLTKHSKDSDDEQNRVRKYRKKHQESDEEKDESEDSYKHSRKKHRPEHSRDQSKDVHKHKNKSHSKDRESYIIDTI

SEQ ID NO: 57685 - protein, 98 aa, Zea mays
  Coding DNA Sequence Number=SeqID_15906
  Subcellular localization annotation: CTP_CleavageSite=60; ConfidenceScore=5.56e-01
MVKTSLRQPSAHLPTAHSRSASLPASQVQPPSLVNTAATEDGLTLIGGCGGGALLQSTTRSSAVAAAVLGCSAAAASLVSVATTRMVLLSASDRGDSN

SEQ ID NO: 57686 - protein, 33 aa, Zea mays
  Coding DNA Sequence Number=SeqID_15907
MAPPALVNATVGVCDWVDIELTRFGSTQLELAR

SEQ ID NO: 57687 - protein, 41 aa, Zea mays
  Coding DNA Sequence Number=SeqID_15908
MAPPTLVNATAGVCDYHYVNWNMERPPGKIVLPEGFMDALG

SEQ ID NO: 57688 - protein, 115 aa, Zea mays
  Coding DNA Sequence Number=SeqID_15909
  Subcellular localization annotation: CTP_CleavageSite=79; ConfidenceScore=5.04e-01
MALRSNGSGAFREVFLPSSGPGGYLSPHNRAPVLGARCCHAPVPLPHVPPKLVVARSPLPTLISSQRVCRHCAERHRATAEMTVAPLAHRTVRWHTGQSALFKLCIGFELNLWHL

SEQ ID NO: 57689 - protein, 550 aa, Zea mays
  Coding DNA Sequence Number=SeqID_15910
  Gene Ontology: Mol. function=calcium ion binding; Cellular component =mitochondrion; Biological process=regulation of transcription, DNA -dependent
  Homolog annotation: Hit_ID=Q6ZKM5; Match level="QueryCoverage=75%, HitCoverage=92%, E-value=1e-176, Identity=75%"; Hit description =Putative drought-inducible protein 1OS
  Pfam annotation: Domain name=PPR; Domain location=258-291; Score=2.5; E_value=3.7; Accession=PF01535.11; Description=PPR repeat
  Pfam annotation: Domain name=PPR; Domain location=294-328; Score =25.1; E_value=0.00026; Accession=PF01535.11; Description=PPR repeat
  Pfam annotation: Domain name=PPR; Domain location=329-363; Score =24.6; E_value=0.00035; Accession=PF01535.11; Description=PPR repeat
  Pfam annotation: Domain name=PPR; Domain location=364-398; Score =14.5; E_value=0.14; Accession=PF01535.11; Description=PPR repeat
  Pfam annotation: Domain name=PPR; Domain location=399-433; Score =38.9; E_value=1.7e-08; Accession=PF01535.11; Description=PPR repeat
  Pfam annotation: Domain name=PPR; Domain location=434-468; Score =10.8; E_value=0.4; Accession=PF01535.11; Description=PPR repeat
  Pfam module annotation: Pfam domain module=PPR::PPR::PPR::PPR::PPR::PP R; Domain location=258-291::294-328::329-363::364-398::399-433::434 -468
MGGDGRRKLDAANPTPATLGSVWNPGPLSGRPGFETWYSKLLRGDTIVRPQVGVRRWEAPWSRYTDCPRLPTRPPARPPDATAAICPPAVIAAGLSRPPSGRHPFSSAHAQSSHPVDFPTIAACRAAISASKGDRRRRPGVGQHSSSPSPSLATAAAKEEQEQPVLVRIKHERDPERLYQLFRANAHNRLLVENRFAFEDAVARLAGARRNDLVEEILEQHKALPRGGGKGSWKAGMPGHALRTFQEMGMYGCPRTAKSLNATMKVLLRARMFDEALSLFEEGPEKYDVEVDDISCNTVVKMFCDMGDLRAAYRVMQGMERAGLRSDVITYMTLMAAFYKCGRHEVGDGLWNLMRLRGWVPTLATYNVRIQFLVNRGRGWQANEMARKIYVAGIKPDEITYNLIIKGFFMMGEHEMAKTVFGAMHGRGCKPNSKVYQTMVHYLCERRDFDLAFRLCKDSMEKNWFPSVDTINQLLKGLMAISKDRNGKEIMKLVTGRKPSYSYGEMKLDSRGGSGGLTICCNANAWDMGCRSKCHPDIRFPFLSKWTFRK

SEQ ID NO: 57690 - protein, 71 aa, Zea mays
  Coding DNA Sequence Number=SeqID_15911
MPVFLEVAIVPLFPCRTALAIVVPRDIAPPPREGVTYYIAYLGTVISGIELSVKICAAELGHVDANIAWGI

SEQ ID NO: 57691 - protein, 150 aa, Zea mays
  Coding DNA Sequence Number=SeqID_15912
  Subcellular localization annotation: CTP_CleavageSite=22; ConfidenceScore=5.11e-01
MQAACNRAKWTRFSDSRHTSMEAQAHASRNRRAGCCMQATAPPLAPPPRLLETGGAFGGSSGRRFAFAVITATKKQGPGKGDTPKRILPREGTRLRASLLIRGSKAGPPKGSTAASDRVGPTPTTGQRFEGRPPEGFHDRLRLLGLRAHY

SEQ ID NO: 57692 - protein, 179 aa, Zea mays
  Coding DNA Sequence Number=SeqID_15913
  Gene Ontology: Mol. function=protein dimerization activity; Cellular component=nucleus; Biological process=regulation of transcription, DNA-dependent
MLPDSPPRRGAGHRRAQSEILLGGAALPDDLTFDADLGVVGEACVAGDEDEEDDDDDEEGVGGAGGSRMFEMFLENGGKLPGPPEPSAHPHSTPPRPRHHHSMSMDGSTSLFGSAAAGTPGRSGADAKKAISDAKLAELALVDPKRAKRRLTRTDHPRILVFLFFKERIFMKTSHRNIV

SEQ ID NO: 57693 - protein, 91 aa, Zea mays
  Coding DNA Sequence Number=SeqID_15914
  Subcellular localization annotation: CTP_CleavageSite=67; ConfidenceScore=5.17e-01
MDSAREPRLSAGAWLLLTFRTCAPRDASAAAVQMPPRSPGRQRNSADRTGSLPRIQLRLPSLIHNTSLGRASDCRIRMLIRTHHSILLVLI

SEQ ID NO: 57694 - protein, 376 aa, Zea mays
  Coding DNA Sequence Number=SeqID_15915
  Gene Ontology: Mol. function=nutrient reservoir activity; Cellular component=cellulose and pectin-containing cell wall
  Homolog annotation: Hit_ID=Q43557; Match level="QueryCoverage=91%, HitCoverage=90%, E-value=1e-106, Identity=56%"; Hit description =Unidentified precursor
  Pfam annotation: Domain name=DUF642; Domain location=48-376; Score =614.3; E_value=1.1e-181; Accession=PF04862.3; Description=Protein of unknown function, DUF642
MAGGTRSRCPVLLLLLLGVTTARLASGVVTDGLLPNGNFELGPAKSDLNGTRVMNQNSVPNWEIFGFVEYIGSGQKQDDMILAVPEGACAVRLGNDATIRQKLEVIRKTTYSITFCAARTCAQAERLNVSVAAESGVLPIQTVYTSSGWDSYAYAFRARHSTAWFSIHNPGHEDNPACGPLIDFIAIKALNPPPLAQGTCSEHAGNMLRNGDFEEGPFIFPDTAWGVLVPPMSEDDVSPLPGWMVMSDTKVVKYVDAAHHAVPRGARAVELVAGREAALVQDVRTVPGRRYRLSLSVGDAANGCEGPMAVEAYAARATLRTTYESLGKGGSRRAAVEFEATANLTRVVLQSYNHHMKPDGTLCGPVVDDVSLVGLR

SEQ ID NO: 57695 - protein, 141 aa, Zea mays
  Coding DNA Sequence Number=SeqID_15916
MWKCALVGGDAPCSVHLESAHGGNQRIAGSNRDGLQLGIENEVLSCSFYPDTVSNTGVCSPTCCGYRGRTGGPGRRASKSSGGSPPRLELPNRRKGAEKAGGGAGVRVPVWASTRHPVYTTHTVYSELKADFDLPLIRVIW

SEQ ID NO: 57696 - protein, 423 aa, Zea mays
  Coding DNA Sequence Number=SeqID_15917
  Gene Ontology: Mol. function=RNA-directed DNA polymerase activity; Cellular component=mitochondrion; Biological process=RNA-dependent DNA replication
  Homolog annotation: Hit_ID=UPI00004C1733; Match level="QueryCoverage =99%, HitCoverage=29%, E-value=0.0, Identity=85%"; Hit description =UPI00004C1733 related cluster
  Pfam annotation: Domain name=RnaseH; Domain location=37-164; Score =10.6; E_value=6e-06; Accession=PF00075.14; Description=RNase H
  Pfam annotation: Domain name=rve; Domain location=284-416; Score =73.9; E_value=5.1e-19; Accession=PF00665.16; Description=Integrase core domain
  Pfam module annotation: Pfam domain module=RnaseH::rve; Domain location=37-164::284-416
MGEKISFAPRKTIKSQVLADFVAEWVDTQLPTAPIQPELWTMFFDGSLMKTGAGAGLLFISPLGKHLRYVLRLHFPVSNNVAEYEALVNGLRIAIELGVRRLDARGDLQLVIDQVMKNSHCRDPKMEAYCDEVRCLEDKFYGLELNHIARHYNETADELAKISSGRTTVPSDVFSRDLHQPSVKTDDTPEPKKASAEPEKASAQPEAPSTQSEAPSARSEAPLARLEAPSAPEAPRALVGNAFRQGFYWPTAVADATRIVRTCQGCQFYARQTHLPAQALLTIPITWSFVVWGLDLVGPLQKAPGGYTHLLVAIDKFSKWIEVRPLNSIRSEQALTFFTNIIHRFGVPNSIITDNGTQFTGRKFLDFCEDHHIRVGWVAVAHPMTNGQVERTNGMILQGLKPRIYNDLNKFGGRWMKELPSVV

SEQ ID NO: 57697 - protein, 106 aa, Zea mays
  Coding DNA Sequence Number=SeqID_15918
MARRVLPLRCKRCNAFTTRHMMCFTRVSLRSPSNAGVGDAASLCCLAGEWLAYGVGLAAGTAAFCLITRQRLEPRRKRIHSAASGSAVGRWGSLELQLLSYKYASS

SEQ ID NO: 57698 - protein, 95 aa, Zea mays
  Coding DNA Sequence Number=SeqID_15919
MACASSPLVSYPQGHLEEECIPRLCRARVATGFGGGAVGAEDVAAEAEVDGNEATKKDADARRFSGGYGCRSDLAVYLATGLDSRAGPYLSRRGA

SEQ ID NO: 57699 - protein, 47 aa, Zea mays
  Coding DNA Sequence Number=SeqID_15920
MAKGYGGMLAMGSKFDGQKFGRCVGEKFGRAVIITTVVSLIRTTRDG

SEQ ID NO: 57700 - protein, 108 aa, Zea mays
  Coding DNA Sequence Number=SeqID_15921
MAMPRESWARLEGAFKGCHQRREKGRASLRRRRRGARAWAELELTVTQKGGRWHPRRGLRAAGAWSAIHRVDAALVQNGESWGTNRFKGAGGCVWLAKRGGVNDWSRA

SEQ ID NO: 57701 - protein, 142 aa, Zea mays
  Coding DNA Sequence Number=SeqID_15922
MATSRGGEERENEVDASGVRIGDILSDAGMRGWLDGTNDVSLRCLHAQQQYEDYMRQAKEKFLSQYTVDRHQKVAKHGGTDVASFLSSLQVSNDTYVQYIGNKWGFAALAIIWYADDLIFRTNTTTVVPSWQIGAPEHGQTV

SEQ ID NO: 57702 - protein, 98 aa, Zea mays
  Coding DNA Sequence Number=SeqID_15923
  Subcellular localization annotation: CTP_CleavageSite=30; ConfidenceScore=5.55e-01
MAPVASAKVPNPAGGLCTPSRRPLRYVLVMASQSRKFAPLPRGGNKGSGDGGPTQKASALEALSSESIVSRKTDRKGSSLISTIEHQQINMRAMTDSS

SEQ ID NO: 57703 - protein, 129 aa, Zea mays
  Coding DNA Sequence Number=SeqID_15924
  Subcellular localization annotation: CTP_CleavageSite=31; ConfidenceScore=5.11e-01
MSGAPRKSGLRNSPASGIHFSCFAKIHRIVRCNSEATAISAPMATCDAFNARQKRAVVRHAGAGAPDNLQFMSGAPPDIKAGLETELQRSNPNGFGDVAVAPDMFGVHRTVRHTKEIKSSPNSTQHPSD

SEQ ID NO: 57704 - protein, 87 aa, Zea mays
  Coding DNA Sequence Number=SeqID_15925
  Gene Ontology: Mol. function=DNA binding; Cellular component =nucleosome; Biological process=chromosome organization and biogenesis (sensu Eukaryota)
  Homolog annotation: Hit_ID=Q8W119; Match level="QueryCoverage=56%, HitCoverage=17%, E-value=3e-22, Identity=100%"; Hit description =Histone H1-like protein
MGAPKQKWTSEEEDALRAGVRKHGAGKWRTIQKDPEFSPVLSSRSNIDLKVSSPASSPPLSIYLAATELAVRRARPYGPVWLWSKEA

SEQ ID NO: 57705 - protein, 404 aa, Zea mays
  Coding DNA Sequence Number=SeqID_15926
  Gene Ontology: Cellular component=membrane
  Pfam annotation: Domain name=DUF81; Domain location=120-343; Score= -55.6; E_value=0.01; Accession=PF01925.9; Description=Domain of unknown function DUF81
  Subcellular localization annotation: CTP_CleavageSite=66; ConfidenceScore=5.25e-01
MWESVALTLAGTAGNNIGKVLQKKGTLILPPLSLKLKVNPMTHPLPSPGSCRPRSQRDPYGVSCPCAQVVKAYASNQLWISGFLMDMCGAALMLTALSQAPVRCLLPLIPVRGDWVVYGPLLTVAQVSVVQPIAGCGLAILCVFSHFYLKEVMNGLDWIAITLAGLGTIGVGVGGEEQKVDQIPLLNIPWLVLSIVILFVLLNTWLHMYKKQRREQELRHPMQTGPEVIEEIIYGLESGILFGISSVISKMGFVMSEMGFPKIVVPAAISCSVCCSAVGFVYQTRGLKHGRAIVVSTCTSVASIVSGVVAGMIALDEHLPKAPTARFFLLLGWFFIITGVILLVSSTRLIARLPRPVQKFLKSNIERTHSIRRPGSARGKDPIPTTTIHTSSLHLLASPTKEKA

SEQ ID NO: 57706 - protein, 173 aa, Zea mays
  Coding DNA Sequence Number=SeqID_15927
  Gene Ontology: Mol. function=DNA binding; Cellular component =nucleosome; Biological process=chromosome organization and biogenesis (sensu Eukaryota)
  Homolog annotation: Hit_ID=Q8W119; Match level="QueryCoverage=83%, HitCoverage=54%, E-value=2e-45, Identity=67%"; Hit description =Histone H1-like protein
  Pfam annotation: Domain name=Linker_histone; Domain location=14-70; Score=-1.6; E_value=0.0081; Accession=PF00538.9; Description=linker histone H1 and H5 family
MDKWRNLSFQCKWTGIKYGAMIMEALLELNEPNGSDIAAIFGFIENNDKLLMLSLVLYAAKIDKSYRLPDSLATRTPAPMNASAPKQKDPSKPSKVSKAIGLFSASSPALEAAMAAAVKVADAEAKAHDAHDQTMEAERIFKMAEDTESLLIIAAEIYDRCTSSSSLPTFISP

SEQ ID NO: 57707 - protein, 191 aa, Zea mays
  Coding DNA Sequence Number=SeqID_15928
MQAACNRTKGAHPFDFDASNMEAQAHTSCNRRAGCYVQETAPPLAPLPCLLDCGTSTATRGNPVYDPTVPARHIGHGSVSRGRRCDGRYDQKWADRTGKGDTPKGILLREGNGPRAPLLIRGSKAGPSEEFNSRLRALGLRAHYWSEVRRMSPRKGSTAASGHSASAPTTDQGFVGWPTKGSQPPQTQSEG

SEQ ID NO: 57708 - protein, 128 aa, Zea mays
  Coding DNA Sequence Number=SeqID_15929
MEPWSSPLTPVVDSPFFSVVPPGIFPDIVLIRAGGVGTKFAAVQGKISPPPPVLFICAHTVVFLLAWLRVQELPSWRSFFPSRAPPPMALGRPALPLSARLAPRPWPRLSSSSPSSPSPDLPVPGRAP

SEQ ID NO: 57709 - protein, 194 aa, Zea mays
  Coding DNA Sequence Number=SeqID_15930
  Subcellular localization annotation: CTP_CleavageSite=52; ConfidenceScore=5.13e-01
SSQAALHLRWRLAAQLSRCPPAWRPDHGRGSPPARPQAPARIFPFLAAPLVPAMAAVPWSEWILSSEASSSSTAHLPARSLLQRLFQLQYAEFLAVCAMELAPTTVSWSSSSRAWCALSLAHVPNAVGSSLSLGVVPSSSSGSTRRSDSRHPLLGHAFNGRHDIPSLSRHAPVVDRLTVVVVFSASLVGQPRRG

SEQ ID NO: 57710 - protein, 227 aa, Zea mays
  Coding DNA Sequence Number=SeqID_15931
LGAKICGAELRGRVAATSALDAERLFLSLVYSVTHHQWRRILLLSLNCPCPAAYRGAWQRRVGRIADDGTSASPSAVCRGSWQWRVGRITDDGTSSSPSAVLALLLLKAHGSGESWQWFEAFADRKGKGDAACGLGVAGLFSMSSMVVWKNLGEGGGDGERDEKLGEKVQFRALFEEKQRSRGEIEKKVHRIDRAAGQQEALGGLVPQTRSMCTGPPVRRNFEASGF

SEQ ID NO: 57711 - protein, 216 aa, Zea mays
  Coding DNA Sequence Number=SeqID_15932
MSRAFDDYYIKYYGVILATEVTQRRTDSNDHLAIAEVAFVLIEEVTVLEGLKQTKETLMCLNSFLMSVIDKIGQEIDVEGRVCSGRLSRNGSLYGPHNSGSRADVTTGPGSDTSPLAKSSSRRGGGAGTPHPAAAAPHDRSPAAAAACPDPHRSPAAAACPDPRCSHARSPPQPHPAAPLTWRPARRSTAAAPLAPPGAPPRACDYAVVQPPLRRL

SEQ ID NO: 57712 - protein, 77 aa, Zea mays
  Coding DNA Sequence Number=SeqID_15933
MARVLLLRACLLLLQADYYRDACMHANRKANHRATTVPSLLRTDVYLFQFQTYVSGSVAILQRRFGLVYPKCVVRLS

SEQ ID NO: 57713 - protein, 142 aa, Zea mays
  Coding DNA Sequence Number=SeqID_15934
MALTTGSQGWDGLDLEGARDAGRGARARGADADAERRGRDAGDQGLVRGRHAARDRVKRQPKASQTLGVAMASGGRLAEERLGAFHMDRGRRAPAAGGSEKRKPTAHLVAALRLATCTCTAPDQTRDSPFFFVRLLPTLGCS

SEQ ID NO: 57714 - protein, 54 aa, Zea mays
  Coding DNA Sequence Number=SeqID_15935
MPWKWDRHTLESLFLSRVYKFDVVLQGKNPIFGKIQGFKVESSTLNFRLRIELR

SEQ ID NO: 57715 - protein, 775 aa, Zea mays
  Coding DNA Sequence Number=SeqID_15936
  Gene Ontology: Mol. function=nuclease activity; Biological process =response to DNA damage stimulus
  Homolog annotation: Hit_ID=A0D0E9; Match level="QueryCoverage=48%, HitCoverage=38%, E-value=2e-11, Identity=17%"; Hit description =Chromosome undetermined scaffold_33, whole genome shotgun sequence
  Pfam annotation: Domain name=Tektin; Domain location=321-692; Score= -199.0; E_value=0.055; Accession=PF03148.5; Description=Tektin family
  Pfam annotation: Domain name=UVR; Domain location=271-306; Score =20.9; E_value=0.0021; Accession=PF02151.9; Description=UvrBuvrC motif
  Pfam module annotation: Pfam domain module=Tektin::UVR; Domain location=321-692::271-306
MASQDDGWGGGEDGSSLFEGMVLFAPEPAAAEDSVPTPAPVPELTSAARPDADAASSAPPPLDEDLFSDLTLLAPQEPLSLEQPPPPPQGEDRSHAALAPAPPAAAAELSRQPSSSSLRKKKRAVRIGYGRLPQPAPPSPPASAAAAAISASSISFLDASPHAAVTRILDQLPDRQVDVYANGYEAHAEAVAVDTSSPRVEAVATEDDGGGKEDEDAAVVALGVEERLALLRSQISSKLDSIQQTAAAVAAKRRLLAGRRRKVAEEAASVASGHKDLERELEEACEAEDFERAERISDSLATLEKEKDRLSTALRGAELDYDSVDSELQEVLESRIAAEEEAAALMEQFAKDATEHANSASEHAQELSSKEIEEWQTSLELLETKKLEMEVETRLVLEARSGLEGSIEHLVEEDKLEKDMLSKKGEILTKELAELLELVRLKEAEIAENNARIHEVQERISAVVSRFHGSQSDIDLKLSSLKEDQSKVDLETEALLLKKNEIDKFITLTDQKDSELRDIIGACSSEAKACRQSVEIRRKLASSILKSREDRIGLLKMEEEILQVIQMQRQKITDARSTLQEVSSRRTSIQQETEALKQKLSFIDKRGPELEAEKKVAAASRNFKEAGRIAAEAKALNSEKDELYGKLEKAATDLETIEKDIVATTNKIQECEGLIELKGRESALTSYRRLRLDCAAARAELTAAAETDDNEEAEILRKEAEAAESKAMELKTCYDLQVVDDEFVFQPVVPIAFITNSTGQHLAEIASSLGLSPQK

SEQ ID NO: 57716 - protein, 542 aa, Zea mays
  Coding DNA Sequence Number=SeqID_15937
  Gene Ontology: Cellular component=plastid chromosome
  Homolog annotation: Hit_ID=Q1SWR7; Match level="QueryCoverage=52%, HitCoverage=51%, E-value=2e-22, Identity=25%"; Hit description =Mitochodrial transcription termination factor-related
  Pfam annotation: Domain name=mTERF; Domain location=14-326; Score =85.0; E_value=2.3e-22; Accession=PF02536.5; Description=mTERF
MAGSVSNGSGKSLARWLRENGFDDDAVARMSRRCRNLHSLDAGEAPGVWDYLLTGVKMERRKLRHVVAKCPKLLTLSVDGKLAPTVQCLATLQARPGEVAQAIAKFPQILFHSVEEKLCPLLAFFQTLGVSERQLAKLLMVNPRLISYSIEAKFSQTVGFLAGLGVDREGMIGKILTKEPYIMGYSVDKRLRPTAEFLKSEVGLQGPDLQRVVMTFPDILSRDVDKILRPNLAFLQSRGFSRDQVTALVAGYPPVLIKSIKHCLEPRIKFLVEEMGRDMGEVVGYPQFFRHGLKRSLEYRHKVLKQMNSSCSLSEMLDCNHKNNQVPGSMWSKNGDVPPAPPLLVAAPSPPPPTNSGAAAPAGRVLAAASVFSLLPSLLCLPAEPCAPEAALPADPAHSARPRATPPRHPHAPAPCAATAPAPFRALPEPTRARKPTSSRHLAQAGPERLGPAAPRRPRAPTVVPRCQQSRPSPRRPTEAPTRQELTPRDNRALPLRVRHRHRAEDRARHPQDPTRPSCSRPSSPRRPGAPVRRTRAPAVPR

SEQ ID NO: 57717 - protein, 119 aa, Zea mays
  Coding DNA Sequence Number=SeqID_15938
  Homolog annotation: Hit_ID=Q84V24; Match level="QueryCoverage=35%, HitCoverage=19%, E-value=2e-10, Identity=46%"; Hit description =Aspartate aminotransferase
MDEVQIDKKNQEKKRIGKELAVYNQLLLSLGAPDSVRCARLGSNELATLGNSSAAYDYNSPDCLVVHRTVRIVVNVVGDPTMFGEWKQEMELIAGRIKNSDNMTDKWHVYMTKDGQIYL

SEQ ID NO: 57718 - protein, 133 aa, Zea mays
  Coding DNA Sequence Number=SeqID_15939
MVQRFLCWSFFLAGIPLNTCAWHITGHQQSYRIWHTIEPPQQRTIQTVQANGRQSISYNITKSGYIKVLISSIRTHSTDLSTLELDSASARTAASVSKITFLIPRTAAYYKRKCRADSRAYAEPAPAATTIPI

SEQ ID NO: 57719 - protein, 248 aa, Zea mays
  Coding DNA Sequence Number=SeqID_15940
VHAMINGRDQIFTPRPTETAAPPLLSPPSAGEIANQRSPGAKHQIKSRFTMREAGRTRGMDFLPREWSAEARPRRRRIRGRARVDGEELLWHRGLSLRLRPRMAPPSANDPPRPFTEVRQPTVTGFAGGGPDFTPRSYPPTYHTRRPGLFKSAEHLFVPCKTPESASEEVGRSLSRPGQLRDLAAAVARVVAIRAVKEMTQTTGARASESCGARRDCLQGPPVGTRRTREVGRAGEKEEMGQNGYSRP

SEQ ID NO: 57720 - protein, 97 aa, Zea mays
  Coding DNA Sequence Number=SeqID_15941
  Subcellular localization annotation: CTP_CleavageSite=29; ConfidenceScore=5.27e-01
MTHSDDFRLGCVNRTLPKNRRPPRTSPVRRNAPSDSICVRPVYKGDGSAASRREVRADPRAAPAGHGDDTGSVDCQLPCRHGDDTRTDEWSVCRRIN

SEQ ID NO: 57721 - protein, 130 aa, Zea mays
  Coding DNA Sequence Number=SeqID_15942
MGHVNSEFVSECPNYLLSNSIDSNYIDGDRCPGRHRKLRLARPQGSGSTSMLDDGLRLARPRARTQPRPRKTVSASLDPGLGLNLDLGRWTPPRPTQGLGLNLDLGGASASPDPGARTDHVTGGPSLPYP

SEQ ID NO: 57722 - protein, 444 aa, Zea mays
  Coding DNA Sequence Number=SeqID_15943
  Gene Ontology: Mol. function=proteasome activator activity; Cellular component=proteasome complex (sensu Eukaryota); Biological process =RNA elongation from RNA polymerase II promoter
  Homolog annotation: Hit_ID=Q6Z8S7; Match level="QueryCoverage=86%, HitCoverage=47%, E-value=1e-158, Identity=69%"; Hit description =Putative signal transducer and activator of transcription interacting protein
  Pfam annotation: Domain name=WD40; Domain location=160-198; Score =3.8; E_value=13; Accession=PF00400.22; Description=WD domain, G-beta repeat
  Pfam annotation: Domain name=WD40; Domain location=207-245; Score =24.9; E_value=0.00028; Accession=PF00400.22; Description=WD domain, G-beta repeat
  Pfam annotation: Domain name=WD40; Domain location=22-62; Score=11.4; E_value=1.7; Accession=PF00400.22; Description=WD domain, G-beta repeat
  Pfam annotation: Domain name=WD40; Domain location=255-293; Score =32.3; E_value=1.7e-06; Accession=PF00400.22; Description=WD domain, G-beta repeat
  Pfam annotation: Domain name=WD40; Domain location=340-383; Score =16.6; E_value=0.089; Accession=PF00400.22; Description=WD domain, G -beta repeat
  Pfam module annotation: Pfam domain module=WD40::WD40::WD40::WD40::WD4 0; Domain location=160-198::207-245::22-62::255-293::340-383
MQTTRIFAPWRNQVNPGDMIYWREIARPQIHGHDLNCVTFIQGSGNHRFVSGADEKVSRVFEAPLSFLKTLQQATLLKPDISEDFDNVQVLGANMSALGLSQKPIYTHGQYLSHDPSESRNPQSVILTMVQILWRQFLMQCLLYSLSLLWRTNLHGILYGPESHKLYGHGNELFSICCDYEGKLVASSCKAQSAAVAEIWLWEVGTWKAVARLQSHSLTVTQMEFSRNNAFLLSVSRDRHLSIFSIRKTEGGAEHRLVAKLEAHKRIIWACSWNPFGYEFATGSRDKSVKICVTALAWMGRDRASNAGIVAAGMDNGLIELWSVSGGRASSGTQLSVACVLRFDPLLCHVSTVHRLRWRCSTDEKSTLELASCGADHTVRVFEVFIDIGHRWVVKLVLLATRTQQQLSSQEIDKAEEPTSNSHESTIGMFRCSRAISIISIKNS

SEQ ID NO: 57723 - protein, 167 aa, Zea mays
  Coding DNA Sequence Number=SeqID_15944
MVVETHEKRPMTPLESRIVTASSSGFLDGAEISWWCGSVTALPPLSMLRLGVGNGTTDERVLIHAGRADEADVRLAAAGEPESVVGGGLGSCVPTARSWDGNAGVGVAAAGRAESVAGSDRGGGCGPSVDGGSSVAGAVVACGVCRAIAWRKGGGTNGLHYLLLNRY

SEQ ID NO: 57724 - protein, 84 aa, Zea mays
  Coding DNA Sequence Number=SeqID_15945
MSPMCTTRGYAGIAAVAAGMAAGGRAVRGDGATTGDSRVEARGAIRGWRRGRRGIRGGGGASGRLDSQAGAVYTAPLIVSRDNR

SEQ ID NO: 57725 - protein, 35 aa, Zea mays
  Coding DNA Sequence Number=SeqID_15946
MAFGQGIPALLFLETVAGEEQVVQEEPYNEEYELI

SEQ ID NO: 57726 - protein, 196 aa, Zea mays
  Coding DNA Sequence Number=SeqID_15947
MGGGVSADPGRREPSARGQRNQSRGIFQGVVNEDDRSGHTCSGTAMEPIPCEGQSRGDAKLRLSIPTTPSHAPTCVTRTGGATAPPTRSLTTARSQRPSSSLSLFTGFRGRLREDEWVTGVPDQGYNLGRKKGGIRQPIGSSSREDYAREAPTMRIRHRRRQTRSPLREQQDDNRGPPVGVRSHGSREQPASELVN

SEQ ID NO: 57727 - protein, 118 aa, Zea mays
  Coding DNA Sequence Number=SeqID_15948
MTARLCLAVAEHGRGRWPSSAGGGFERRRPGDGGAPASLKNGRAQLGKTAPSQSSKQMCCQQACTRKVATFKTATFSEDNYKLSTLSVQLGSKPLVPPFHALRLVSVNFGLAWSPGDV

SEQ ID NO: 57728 - protein, 46 aa, Zea mays
  Coding DNA Sequence Number=SeqID_15949
  Subcellular localization annotation: CTP_CleavageSite=28; ConfidenceScore=5.04e-01
MASGRPAGLSPSGLSTASPKKIRPGAARAHHFASNCSRLVTNAIEV

SEQ ID NO: 57729 - protein, 146 aa, Zea mays
  Coding DNA Sequence Number=SeqID_15950
MHCMRDRTRSGFFFLYSGNRHGEKEREQGVAVWGGLGAWQACPTLLVGLLCCPRCRVRAEVSGRRARPPRRAVPGEDHSRRRAGPGAGREEWCPTRKRRGNGNRVEGRLLCVIWMWEETRVQTGNNLRREETDTRAYAQDDSERNE

SEQ ID NO: 57730 - protein, 71 aa, Zea mays
  Coding DNA Sequence Number=SeqID_15951
MEVATTVVESEVESSCGQRIPEIVALAMARERSIAADVLDYFKVYSHTKPLLMWSNTDADEFIVFNPVYGP

SEQ ID NO: 57731 - protein, 149 aa, Zea mays
  Coding DNA Sequence Number=SeqID_15952
  Subcellular localization annotation: CTP_CleavageSite=60; ConfidenceScore=5.26e-01
MTATWAQNKNLATPLPDSSAAQGSFSLLQSKQDAGKCVASYLLQKNGSLASTISIVRKKRDYVKKPHNQIQRTRRHATHTDTSLPPPRDTDQIKTTGPLCLCTGEGEKITTIVLDSPRRRQIIFVSRPRKESSSSSGQKTSADEIKPPP

SEQ ID NO: 57732 - protein, 345 aa, Zea mays
  Coding DNA Sequence Number=SeqID_15953
MAKECPPAELWLPDEFLDDDFFSEEEKAAVAAKSESDEEEGMDGLSRRAAGLVVGGGGDGSPAKAQVLAGSPQSILCGLHASGEDSPNGAASQVSSPPSSPLEKTPADHWDLLKEAAGQVARMRTTSGILVATNAGAHQRHPVPPLAQKLSAPAEAPKAAGANLPQAQPKNSMEHRRIQIARFNALKQQQLLKHMRERELAVATAAAWGTSVAGSHRAAGYRAPAPHVLSSSAWPTLQKQQQQQQQRAASPAGMRAVFVAPPGAKRECAGTGVFIPRQAGAPAEPKKRPAACAPVLLPARVVQALNLNVEDLGARPIYPGGFVLDHGNYPEYLVINVALSGPTNG

SEQ ID NO: 57733 - protein, 106 aa, Zea mays
  Coding DNA Sequence Number=SeqID_15954
MPKQTGVKANGNLADDETAIRRNWTVRNGDPLVHLHIRQPAPRPRPRGGEERRLVPHRIAKLSWASDPEVFYMLNAVARQKELCVAINVCWGDQREKICKLMKYCY

SEQ ID NO: 57734 - protein, 77 aa, Zea mays
  Coding DNA Sequence Number=SeqID_15955
  Homolog annotation: Hit_ID=UPI00004C1731; Match level="QueryCoverage =65%, HitCoverage=3%, E-value=5e-07, Identity=52%"; Hit description =UPI00004C1731 related cluster
MSCPWRVFHVEDNPERSKITTIASSCGRMTDCDVEKLLCDAGDFAAQLVRKGLTGGPKDECTNDISISDVGKLVALS

SEQ ID NO: 57735 - protein, 59 aa, Zea mays
  Coding DNA Sequence Number=SeqID_15956
MASRIAMANDEPRGLSLTATNIKNVSSESERGHVNPALETQRIELEVYECLRDGVEVAI

SEQ ID NO: 57736 - protein, 449 aa, Zea mays
  Coding DNA Sequence Number=SeqID_15957
  Homolog annotation: Hit_ID=Q6H5X2; Match level="QueryCoverage=52%, HitCoverage=100%, E-value=4e-76, Identity=65%"; Hit description=ABA -responsive protein-like
  Pfam annotation: Domain name=GRAM; Domain location=112-193; Score =41.5; E_value=2.8e-09; Accession=PF02893.10; Description=GRAM domain
MEGSTATEGHVVGIPVSTRAYGIEEPDFSVEETTPDRGEFPSSFQYYSHDAASSTTTAADRPTSNQQATRKGDKIVRGIKEHVTLGPKLSDTVKGKLSLGAKILRAGGSVEKLFRQWFSADKDEKLLRASQCHLWTTAGPIAGVLFVSTARVAFRSDRSLSLAVSTPRGDCSFRAPYKVAVPLRKVGAVRPSENRHRPEQRYVRLATTDGFEFWFMGFVSYNKSLQHLERAVACARQARCNMSLYIWAIGCPGKQVGHRLTGDRSGMWSFGVGQEIHHEFEIESAGVVSGTPKGGLFPALADDRSGRGEAPERAREAAAEEDMESVLKIVAADCTRSVQHDTISGGACPRLETVVAGKPGEEPDARGCPVSPSEQVLRSRDTRSACTKGYGTAEPRPQEGADAGGHDGVHTGVDVGAMRQQGGEASGEVAIATPLVEPEGSGPAIHDVT

SEQ ID NO: 57737 - protein, 217 aa, Zea mays
  Coding DNA Sequence Number=SeqID_15958
MAAQIDDVCWGCADPGRSSLRYFIEHLASVAGMGLALGVVAGMEGSKDEMEVEDGSLTMTAQPVEPWDHHGVGGSPMEINRAQPWRLHRVTTWGRARAGLSVVGKEMGKKTGASALGAGRRAEGQRRAVLGEPTTAQRIGGRGCSHAQGGAEDGRARTFLVAGELKKMKLGRYMESRASTSGVLGMEAKEGRSALGRQKMAAGGNHLREGAAWKDLG

SEQ ID NO: 57738 - protein, 158 aa, Zea mays
  Coding DNA Sequence Number=SeqID_15959
  Subcellular localization annotation: CTP_CleavageSite=65; ConfidenceScore=5.53e-01
MAHPSAWPPAPLTVWLPRPPVQRPLLPPPLARGSLAHPPPTPPARRPRLPVARPQPPARGPGPLRAALGSRRRGPSPNPRRRGSLAPRRGLGPLACGPSVPVRAALHGLALSRLPNAFSRAQPHARGGDEDDGYDYAYGTGEDEFVEDFQEFQEYDEF

SEQ ID NO: 57739 - protein, 143 aa, Zea mays
  Coding DNA Sequence Number=SeqID_15960
MVFAGREDVDFILNEKMKGKNKMDYEAHTHSLVQLWTLVADLKNTIEETIAICEELQKRCASLQEALKIAEGEKWMPGHYRNPALCRVLDALMSVFYRSLDKVTLSVTTAFTESRTWQILLCRVPNTRQKSDIDKGPSAAVYS

SEQ ID NO: 57740 - protein, 110 aa, Zea mays
  Coding DNA Sequence Number=SeqID_15961
  Subcellular localization annotation: CTP_CleavageSite=53; ConfidenceScore=5.33e-01
MAVEVYVPMFAGLQHHLFGAVPTMFVQGYTPEVLAITRSSPSPGSPPQSLTIRTSTAASRCGGFDSSCPISSVEMLERIPHEPRRAMAEALAIATDHKFPCPTVTPGFRR

SEQ ID NO: 57741 - protein, 202 aa, Zea mays
  Coding DNA Sequence Number=SeqID_15962
  Gene Ontology: Mol. function=electron carrier activity; Biological process=electron transport
  Homolog annotation: Hit_ID=Q9FHG6; Match level="QueryCoverage=49%, HitCoverage=33%, E-value=1e-07, Identity=35%"; Hit description =Arabidopsis thaliana genomic DNA, chromosome 5, P1 clone:MRI1
  Pfam annotation: Domain name=DUF828; Domain location=60-200; Score= -117.1; E_value=0.097; Accession=PF05703.2; Description=Plant protein of unknown function (DUF828)
MEADLERGLIVYEEPGPEPTDLLSSAWCSSAAIRVLHAGPKDECSMALVEHPVMALGSGRSDVLAKSGRSRSLVADSSGFSTAQWKYDDLKSWLWLQKAIHPELDYDLCLKKKWLPRKMAAWNGTSLKKWVKERKQRRKEEARLQRAEVHAAVSVAGVAAALAAVAAENAAAAPRRAPGTRGDGGGFLCCSRRGSCAKAILR

SEQ ID NO: 57742 - protein, 76 aa, Zea mays
  Coding DNA Sequence Number=SeqID_15963
MGGGKLQPDLGKERPSAQGARKGAPRKLEPTSMPVAVGRRRQGRKKVAAGKMEGDYQVRDLYESGYEKEATMRSNR

SEQ ID NO: 57743 - protein, 288 aa, Zea mays
  Coding DNA Sequence Number=SeqID_15964
MAAGSTTSRRGCCCARTTTRGGGRARCRGLPTALLRGGDEAGENNRWPWRRNSSAQGTERRGLEIGAGVGRPIWEEQRCHGSGSRASMEAGVGEEDRLFELGPGEVTAAGRLEERSTPRQEQGRGGWPSALDTAREGDAMEALLLRAGEKKRGGRCKEPGVGSSAFGSSQRRGEKLGLMGREAVGGWSRGQRPHVVEQDIKGRGRGEIPLLARCARRAAMGGGKLQPDLGKERRAPRSQEGSAEEAGADLHACCRGEKKTGKKEGGGWENGGVGVQKCIHLLGEGSYL

SEQ ID NO: 57744 - protein, 150 aa, Zea mays
  Coding DNA Sequence Number=SeqID_15965
  Homolog annotation: Hit_ID=Q6QP51; Match level="QueryCoverage=48%, HitCoverage=25%, E-value=1e-09, Identity=63%"; Hit description =Putative growth-regulating factor 1
MEAQAHSSCNRRAECFVHATAPPLAPPPRLLDCGTNTATRGDLAHDPAAPAWRGGTGKGGYPKRILPVKEPRLRASLLIRGSKAGPPEGFDSRLRSRGPYTHYWSEVRRPAPRKGSTAASGYSGSVPITDQGFEGWPPKGSQPPQTPSEG

SEQ ID NO: 57745 - protein, 100 aa, Zea mays
  Coding DNA Sequence Number=SeqID_15966
MAGHQNAIDGHQWSFIMGRKKGKRREKGWRFPVWRGRTDAAGGADGSGSARVRAARRRGRPGARGVGAARRRRPEDEEGGSRGWGLPISERRGGGVRPVA

SEQ ID NO: 57746 - protein, 87 aa, Zea mays
  Coding DNA Sequence Number=SeqID_15967
MEQTVGSAGRREPTGGSGRAVGMSSNSAGAVDSGSRDGGRYLRTWAKTIHDVKSMVEMKADVAPKLRAGELWLNGRKRNRLKGEKVI

SEQ ID NO: 57747 - protein, 67 aa, Zea mays
  Coding DNA Sequence Number=SeqID_15968
MNSTPVLFTPIDTRLCITLVLIPSVKPKRVKAERQRLARLLHPLKKLHECLDTQLNFSSAYHPQTDG

SEQ ID NO: 57748 - protein, 61 aa, Zea mays
  Coding DNA Sequence Number=SeqID_15969
MWGPHGRDTVRERADRALAQMMNDEEVEDFGDLESSMTRTGAWRRGLKGTQRLKSALAKTL

SEQ ID NO: 57749 - protein, 206 aa, Zea mays
  Coding DNA Sequence Number=SeqID_15970
  Gene Ontology: Mol. function=GTP binding; Cellular component =intracellular; Biological process=small GTPase mediated signal transduction
  Homolog annotation: Hit_ID=Q9FLE0; Match level="QueryCoverage=85%, HitCoverage=33%, E-value=6e-64, Identity=70%"; Hit description=GTP -binding protein-like
  Pfam annotation: Domain name=MMR_HSR1; Domain location=17-141; Score =102.0; E_value=1.8e-27; Accession=PF01926.13; Description=GTPase of unknown function
  Pfam annotation: Domain name=Miro; Domain location=18-141; Score= -9.7; E_value=0.048; Accession=PF08477.3; Description=Miro-like protein
  Pfam module annotation: Pfam domain module=MMR_HSR1::Miro; Domain location=17-141::18-141
MKQSRFDFTKVDAALLPTVILVGRPNVGKSALFNRFIRRREALVYNTPGDHVTRDIREGVAKLGDLRFRVLDSAGLETAATSGSILARTADMTGNVLARSQFAIFLIDVRDGLQPLDLEVGQWLRKHASGIHTLVAMNKSESLDEHGFLTAAAGEAHKLGFGDPVAISAETGLGMAELYEILRPLFEEYMFQLRNTPNKFAHIMLN

SEQ ID NO: 57750 - protein, 109 aa, Zea mays
  Coding DNA Sequence Number=SeqID_15971
MDRESHDGLLAGVDGDDNNVDYDEDYDDDDGDDDIDDNDFDDDDDDDDNDDDYMMMMMMMRGCQFVEINSTCSFSKGKVGQNLDELRSFGLRDFRKGAFGAEFEPRTGI

SEQ ID NO: 57751 - protein, 54 aa, Zea mays
  Coding DNA Sequence Number=SeqID_15972
MSGAHQTVRCLMQSLQGSTQVNKCDGPKTRISIDNGHHNSREAHTRMLSPDMWA

SEQ ID NO: 57752 - protein, 314 aa, Zea mays
  Coding DNA Sequence Number=SeqID_15973
  Homolog annotation: Hit_ID=Q6ZKV8; Match level="QueryCoverage=24%, HitCoverage=9%, E-value=7e-20, Identity=63%"; Hit description =Putative adenosylmethionine-8-amino-7-oxononanoate aminotransferase
MPPPSPSRQSRSSARPIPAAVTSAYVEAEHRQRVRGARVPQEEEEGRQRQGGREEDGEGAAQRQEPPQKKQFWAPAPLTTKSWADVEDDDHYFATTASPRPVWGTAGEPAKEEDDVDDVVRAALQEVATLGNKVEKEMEDMAFFFAELALMQYGYGLVTRLPSLVAASAVYAVRLTVKRAPSGPTPSSTTLLCTRCSEERPAKGSGSWSSPIGSVPAGGQPRADNGSTTIEIALKIAFRKFSLDHGIMASSENSTRNERNIKLKVFVLNGSYHGDTLDAMEAQAPSSYTSFSSVAMWFSVPTAVFFVPAFSLVA

SEQ ID NO: 57753 - protein, 40 aa, Zea mays
  Coding DNA Sequence Number=SeqID_15974
MAKKLEILGLWPRWTAGSRRGREERGLGVDLFTVNTLINF

SEQ ID NO: 57754 - protein, 524 aa, Zea mays
  Coding DNA Sequence Number=SeqID_15975
  Gene Ontology: Mol. function=transporter activity; Cellular component= integral to membrane; Biological process=transport
  Homolog annotation: Hit_ID=Q5NKQ7; Match level="QueryCoverage=98%, HitCoverage=92%, E-value=0.0, Identity=71%"; Hit description =Putative phosphate transporter
  Pfam annotation: Domain name=MFS_1; Domain location=32-459; Score =69.3; E_value=1.3e-17; Accession=PF07690.6; Description=Major Facilitator Superfamily
  Pfam annotation: Domain name=Sugar_tr; Domain location=32-497; Score =71.0; E_value=3.9e-18; Accession=PF00083.14; Description=Sugar (and other) transporter
  Pfam module annotation: Pfam domain module=MFS_1::Sugar_tr; Domain location=32-459::32-497
MATGGETRRARKQITVLQALDVARTQVYHFTTIVIAGMGFFTDAYDLFSISLITDLLGRIYYADGKLPEDAAVAVCSIALVGTVLGQVFFGWLGDRMGRKRIYGITLKLMVLCSLASGLSFSRKPKDAIATLCFFRFWLGVGIGGDYPLSATIMSEYANKRTRGAFIAAVFAMQGLGNLAAGTVVLATCARFKGTRAYETDPFGQADYVWRVVLMLGAVPALLTYYWRMRMPETARYTALVAKNLKQAASDMTSVLEVEIPSEGEEVEALAIQDEFGLFSTGFVRRYGRELLSTTVCWLVLDVVFYSLNLFMKDIFSDIGWFEDASSKGPIEQTYDIARTQVIIVLAGTLPGYLFTVVFVDKLGRIRIQIVGFTLMTILMLGLAGPYKFWCSSKSTRIGFAFMYALIFFFANFGPNSTTFILPAEIFPTRLRSTCHGISGAGGKIGAIVGVLWFLRCRTSIQNSLLMLAGCNLVGVIFTLALPESKGMSLEDVTGEIGQRNEELPLESPQMVDGADFIHSVDFL

SEQ ID NO: 57755 - protein, 233 aa, Zea mays
  Coding DNA Sequence Number=SeqID_15976
  Subcellular localization annotation: CTP_CleavageSite=51; ConfidenceScore=5.31e-01
MSGVHQTVRCNCGVTAISAPTATCSALNTRQRAQKSGTPILAHRTLYSTCPVHHRTSRRAQKTVLQRSNPNGFGDVAGAPDCPSKILSWEEEVAKSPPLPSLAFFSWVGSLPACLPPPPGSDIWSRRELNGGKQQQAAVEQQDPADWGDDNDTEWAEQPAAAFWMVAGGPRSRPNRRQQHGGGDFWAVLLGVLGLSRAPSWVGLSGPARHGWACVVPCSDRRVSPSGGTARPD

SEQ ID NO: 57756 - protein, 506 aa, Zea mays
  Coding DNA Sequence Number=SeqID_15977
  Gene Ontology: Mol. function=zinc ion binding
MDHQNLLPNNSNVDEQILLPNALEHEDCPHYLLNGHDVGVPNGSLIGQQNTSLSLWEPAGSSSMSCLVDHDNFFQAKREHLASSLSIGGPLNIDRRRHEGTSSLPLHNLNIDLNINQADQFGSDDVDLVHGNGQSSANTVTAHRGSFITDHIMHHGVSSDATGSSSWNAECFNGAASQHSRHPAFKRKYLDGCQCHAESSANGSSHNCHQNDSTLLPLRTTCESLTMPTTTNFSVPHPPVEQLNQSTNISANSTLIDHYSSYSGPHANEFMRNTRMRINPSDYDQSLPSLLPEGSFRCPAYQHTQQQSSFRPVQPRQVSSSGSHSRPHLPVVTQFSQNLHRPSANISFGSRIGSSSSSGSTVLIPASQDPSTSLIGSDFPEPLLLGSLFTADSTNFLSASGNRSNQQNSGSSSSSMLRPAVNVAAQQVPGFNVSQPSTTLRGSADVSRRSLTAAGVSHFRSSSMALQHRGTSSTPHEIRSHQPGSSSRAHQQSLRPGHSSIDRQSS

SEQ ID NO: 57757 - protein, 96 aa, Zea mays
  Coding DNA Sequence Number=SeqID_15978
  Gene Ontology: Cellular component=integral to membrane; Biological process=protein transport
  Homolog annotation: Hit_ID=Q6Z8F5; Match level="QueryCoverage=72%, HitCoverage=25%, E-value=5e-18, Identity=70%"; Hit description =Putative secretory carrier membrane protein
  Pfam annotation: Domain name=SCAMP; Domain location=6-96; Score= -33.4; E_value=0.00032; Accession=PF04144.4; Description=SCAMP family
MDGVGESGGGGSGPDLPTGRERLPLALAIPVCVPAHFAIERRGREELGGILAAIDTFSEHVIIGIFYFVGFALFCLETLLSIGVLQKVYMYFRGNK

SEQ ID NO: 57758 - protein, 347 aa, Zea mays
  Coding DNA Sequence Number=SeqID_15979
  Gene Ontology: Mol. function=DNA binding; Cellular component=nucleus; Biological process=RNA-dependent DNA replication
  Homolog annotation: Hit_ID=Q9LGH0; Match level="QueryCoverage=89%, HitCoverage=90%, E-value=7e-34, Identity=29%"; Hit description=NAM -like protein-like
MENYNYGQPSQAPGDYVPCTYTEGIDLTEIDDEGNMNFAFTKSMNMEDSQHSTPTNPKLKKVTTRRLRNYTQTEDEILVSAYMNVSKDPAIGTNQSGKAYWCRISDYYNEHKKKANARTQRSLEHRWSDIQRDTTKFCAAYDKVITLKQSGKSEDDQVKDALQMFEGMHKKQFRFMHCWYMLRREVKWTTWLSSCETPHNNIGNVNVNETGSQAKQGEDEFGSPSDTFVRPMGRDRAKKARSTSTSSNSTACMALLEKFQEDTARFEEKATKYEDLAAASTEEDRRDMKMYRDKKIQLSENMFKLHQLERDDRIMNMDLDKVAPYARDYYVYMQKDILVRLPPPSDT

SEQ ID NO: 57759 - protein, 117 aa, Zea mays
  Coding DNA Sequence Number=SeqID_15980
  Subcellular localization annotation: CTP_CleavageSite=14; ConfidenceScore=5.03e-01
MAKGDGQSVKYPVVSSVASGDVGRPFVDATKAATTLGRDGSPPKAMVEPPLGRAVVQGTIEGVASCGIRGGNCWGSWPRASSGEVKFSPRLRPTSGEAEFPLEGETVLYMHVPSGVV

SEQ ID NO: 57760 - protein, 1068 aa, Zea mays
  Coding DNA Sequence Number=SeqID_15981
  Gene Ontology: Mol. function=RNA-directed DNA polymerase activity; Cellular component=intracellular; Biological process=RNA-dependent DNA replication
  Homolog annotation: Hit_ID=UPI00005A975E; Match level="QueryCoverage =95%, HitCoverage=59%, E-value=0.0, Identity=88%"; Hit description =PREDICTED: similar to Retrovirus-related Pol polyprotein from transposon 297
  Pfam annotation: Domain name=RVT_1; Domain location=56-225; Score =148.9; E_value=1.4e-41; Accession=PF00078.17; Description=Reverse transcriptase (RNA-dependent
  Pfam annotation: Domain name=RnaseH; Domain location=455-582; Score =5.0; E_value=2e-05; Accession=PF00075.14; Description=RNase H
  Pfam annotation: Domain name=rve; Domain location=780-939; Score =123.7; E_value=5.2e-34; Accession=PF00665.16; Description=Integrase core domain
  Pfam module annotation: Pfam domain module=RVT_1::RnaseH::rve; Domain location=56-225::455-582::780-939
MSGIPRDVAEHSLDIRAGARPVRQPLRRFDEEKRRVVGEEIHKLMAAGFIKEVFHPEWLANPVLVRKKGGKWRMCVDYTGLNKACPKVPYPLPRIDQIVDSTAGCETLSFLDAYSGYHQIRMKESDQLATSFITPFGMYCYVTMPFGLRNAGATYQRCMNHVFGKHIGRTVEAYVDDIVVKTRKASDLLSDLEVTFRCLKAKGVKLNPEKCVFGVPRGMLLGFIVSERGIEANPEKIAAITSMGPIKELKGVQRVMGCLAALSRFISRLGERGLPLYRLLRKTECFAWTPEAEEALRNLKALLTKAPILVPPADGEALLVYVAATTQVVSAAIVVERQEEGHALPVQRPVYFISEVLSETKIRYPQVQKLLYAVILTRRKLRHYFESHPVTVVSSFPLGEIIPCREASGRIAKWAVEIMGETISFAPRKAIKSQVLADFVAEWVDTQLPTAPIQPELWTMFFDGSLMKTGAGVGLLFISPLGKHLRYVLRLHFLASNNVAEYEALVNGLRIAIELGVRRLDARGDSQLVIDQVMKNSHCRDPKMEAYCDEVRRLEDKFFGLELNHIARRYNETADELAKIASGQTTVPPDVFSRDLHQPSVKINDTPEPEAPTVQPEVPSAQPEASSVQPEVPSAPEGEALHVEEEQSGATPDRNWQTPYLQYLRQGELPLDQAEARRVARRAKSFVLLGDEEELYHRSPSGILQRCISIAEGQELLQEIHSGACGHHAAPRALVGNAFRQGFYWPTVVADATRIVCTCEGCQFYAKQTHLPAQALQTIPITWPFAVWGLDLVGPLQKTPRGYTHLLVAIDKFSKWIEVRPLNSIRSEQAVAFFTNIIHRFGVPNSIITDNGTQFTGKKFLDFCEDHHIRVDWAAVAHPMSNGQVERANGMILQGLKPRIYNDLNKFGKRWMKELPSVIWSLRTTPSRATGFTPFFLVYGAEAILPTDLEYGSPRTRAYNDQSNQASREESLDQLEEARDKALLHSAWYQQSLRRYHARGVRPRDLQVGDLVLRLRQDARGRHKLTPPWEGPFVIAKVLKPGTYKLANNQGEIYGNAWNIKQLRRFYP

SEQ ID NO: 57761 - protein, 156 aa, Zea mays
  Coding DNA Sequence Number=SeqID_15982
  Gene Ontology: Cellular component=integral to membrane; Biological process=protein transport
  Homolog annotation: Hit_ID=Q6Z8F5; Match level="QueryCoverage=92%, HitCoverage=51%, E-value=2e-73, Identity=84%"; Hit description =Putative secretory carrier membrane protein
  Pfam annotation: Domain name=SCAMP; Domain location=19-156; Score =186.2; E_value=7.9e-53; Accession=PF04144.4; Description=SCAMP family
MGDIKRREEALKNAGVPMEEKNWPPFFPIIHHDIANEIPANVQKLQYLAFASWLGIVLCLSWNFVAVIVCWIKEGDSKLFFLATIYALLGIPLSYLIWYRPLYRAMRTNSAFSFGWFFLCYLIHIGFCIIAAIAPPIVFHGKSLTHVPVEDLIFPL

SEQ ID NO: 57762 - protein, 94 aa, Zea mays
  Coding DNA Sequence Number=SeqID_15983
MGEEEEAAPSSEEHRVFTRKQHPAVISNDRKLPEMEEAAVHGHGHRSPSHLLATEAADDGFDSEQESAVPKQTPGSHIGGAQAMEGDDDHYQQS

SEQ ID NO: 57763 - protein, 52 aa, Zea mays
  Coding DNA Sequence Number=SeqID_15984
MASAAGWGAAALSRRGWGRVLFTVGSIYPEPPEFSGNSAPSPEHSKTRENDY

SEQ ID NO: 57764 - protein, 143 aa, Zea mays
  Coding DNA Sequence Number=SeqID_15985
MGKGNKRKREPTPPLEDFGDSEYSEEEFSSEFEGSPAPVSPPASSDDSDDSQGIATEVWTYIRAVERSGLEGSDESEYSSDEEDSPEEDDDGDDDDDDDGGDDGDDGDGGGRGGNGDGKGGNGGSSRGSNGGGNSKGSNKASG

SEQ ID NO: 57765 - protein, 220 aa, Zea mays
  Coding DNA Sequence Number=SeqID_15986
  Gene Ontology: Mol. function=DNA binding; Cellular component=proton -transporting two-sector ATPase complex; Biological process=DNA integration
  Homolog annotation: Hit_ID=O24587; Match level="QueryCoverage=78%, HitCoverage=16%, E-value=2e-90, Identity=89%"; Hit description=Pol
MECHLVAVKRILRYLVSMPCFGIWYPKGSTFDLIEYSDSNYAGCKVDRKSTSGTCQFLGRSLVSWSSKKQTSVALSTAEAEYVATGQCCVQLLWMRQTLRDFGYNLSKVPLLCDNESAIRLADNLVEHSHTKHIDIRHHFLRDHQQKGDIDIYHISTENQLADIFTKPLDEKSFNVFNCLYVVLKLYKSSPDLTSPYAIDAHIWGEDELQLDFLETNLFV

SEQ ID NO: 57766 - protein, 246 aa, Zea mays
  Coding DNA Sequence Number=SeqID_15987
  Homolog annotation: Hit_ID=Q6Z8L0; Match level="QueryCoverage=31%, HitCoverage=22%, E-value=7e-10, Identity=37%"; Hit description =Mitochondrial transcription termination factor-like
MSGCADGESERERGVTEQGRNKEGALVARHLASAWAALCHVLPPASGPSARHLHERNACHLPRVLAHDPTARLREVLSVDAWVAPPATPGSAFLITKVGLEPEYIAHRPALLTYSLERRLMPRHYVDRSYYTAVQMSESAFMDKFICPYKEAAPSLALDYAAACRGEITISWWSLKELQVKTLSSRRLVKRNWGVVRFAVVPLMGLGVCGSLCQGGDEDDSFDYGNGKEGVEADLQEFQDFDEFED

SEQ ID NO: 57767 - protein, 191 aa, Zea mays
  Coding DNA Sequence Number=SeqID_15988
  Gene Ontology: Mol. function=nucleic acid binding; Cellular component= mitochondrion; Biological process=DNA integration
  Homolog annotation: Hit_ID=Q8W0X5; Match level="QueryCoverage=99%, HitCoverage=53%, E-value=9e-79, Identity=77%"; Hit description =Putative pol protein
MGELTYFLGFQVKQLKDGTFISRTKYTQDLLKRFGMKDVKPAKTPMGTNGHVDLNKGVATPCFGNWYPKGSTFDLIGYADSDYVGCKVDRKSTSGTCQFLGMSLVSWSSKKQTSVAQSTAEAEYVAAGQCCAQLLWMRQTLRDFGYNLSKVPLLCDNESVIRLADNPVEHSRTKHIDIRHHFLRDHQQKGD

SEQ ID NO: 57768 - protein, 139 aa, Zea mays
  Coding DNA Sequence Number=SeqID_15989
  Homolog annotation: Hit_ID=Q6IEN1; Match level="QueryCoverage=87%, HitCoverage=31%, E-value=7e-07, Identity=38%"; Hit description=WRKY transcription factor 51
MQVSIQEDATTGLRGMECLILQLSQDSVRERSSSPHAVQAQRRRLEQIQHEVDCRALRRGDVWTGIPISDQQSVPTAQEPLHRVHQRRELTSTAGSMSSPATAPSRVMSRLRPRKKPTAVAAPSLARERLFLSDVALAA

SEQ ID NO: 57769 - protein, 109 aa, Zea mays
  Coding DNA Sequence Number=SeqID_15990
MAEPVGALHLAVAALNLLAVPLPLHHRRGVSLSSPLKTSAMTPEKRGQSWEWVCGWVLGGDGAAVAALKPSAARNGVVGQGHVGWTTLGIRGWGGGIRGWLGTACGGLP

SEQ ID NO: 57770 - protein, 307 aa, Zea mays
  Coding DNA Sequence Number=SeqID_15991
  Gene Ontology: Mol. function=DNA-directed RNA polymerase activity; Cellular component=nucleus; Biological process=transcription
  Homolog annotation: Hit_ID=Q9LSZ5; Match level="QueryCoverage=60%, HitCoverage=84%, E-value=1e-29, Identity=33%"; Hit description =Arabidopsis thaliana genomic DNA, chromosome 5, P1 clone:MQM1
  Pfam annotation: Domain name=RNA_pol_Rpc34; Domain location=30-304; Score=-82.1; E_value=2e-06; Accession=PF05158.3; Description=RNA polymerase Rpc34 subunit
MENSFAPLHIFQWHTFLLMSTNHKEGDLVYVSGKVGVPIYLEGTKAMEEAKIKNIERSRCDFVFLQECSYNVGTYSYMIKCLQLTVPEGSFCNLNLRFKVGLPPEAVYNIIIEAGNKGLWMLDILKKLLMAPNIATKVVRTLVASGLLKEVSDVRHRSRKIFMATDFQSFAEITGGTWYHDGRLDTDAVSTARRCCQAQVERLGAATAQMIHHDILKEDPRAGYTIDKVKDIIKTMVLEEVKSTGTRDFSAVMAGTMCYRLVTGAPQGGMMEGIHCGICPRTHECSPEGIISPSTCVYYKKWLQMDF

SEQ ID NO: 57771 - protein, 251 aa, Zea mays
  Coding DNA Sequence Number=SeqID_15992
MATTATRRWWRRHDGGDDDPDDLVPMDTQEQEELVRSLEAKQAQQGRRWRRVFAGFLLGYVAFLVYSSFHHAWSPWELRYHAYFMEDLPAPMVIIADWIAALACLFAVKGLLQNSGPSKKWMWYSCYVGILVAIFWTYYILRLPRIRWDVAWLPLGPLMYDGWCIEPVCGPCAAGVNARYQHIEKLHDYRFHPSTERLQAEFDLGTRYNMSYLRDFTTKFMFIPVLSLKHVEEDLRSLETSLTSSWLLLYI

SEQ ID NO: 57772 - protein, 86 aa, Zea mays
  Coding DNA Sequence Number=SeqID_15993
MKAIAKRTSLVNNLPPKGSNQHGCHAINGLYLHRLLKKTLYELLAIDLDEIDDEKASSTTLRNISIGEVRPQDQDQSFSTQGQPPT

SEQ ID NO: 57773 - protein, 185 aa, Zea mays
  Coding DNA Sequence Number=SeqID_15994
  Subcellular localization annotation: CTP_CleavageSite=50; ConfidenceScore=5.39e-01
MGPSSLLSLSARVRTDGGARESSSRQGACGSGQPSPASGAIGSSASPDPRARTRARPQKTTNSASLDPRARTRPQPRKTTNSASPDPRGSDSASTPEDNELRLTRPQGSDSASAPEDDELRLARPQGSDSALASADGLRLARPRGSDSTSTSEDRFDLDLGGASASPNLGLEPTMPQEGPSLPYP

SEQ ID NO: 57774 - protein, 413 aa, Zea mays
  Coding DNA Sequence Number=SeqID_15995
  Gene Ontology: Mol. function=binding; Cellular component=ubiquitin ligase complex; Biological process=intracellular signaling cascade
  Homolog annotation: Hit_ID=Q6ZIQ0; Match level="QueryCoverage=90%, HitCoverage=97%, E-value=1e-127, Identity=74%"; Hit description=Arm repeat-containing protein-like protein
  Pfam annotation: Domain name=Arm; Domain location=135-176; Score =39.4; E_value=1.2e-08; Accession=PF00514.13; Description =Armadillobeta-catenin-like repeat
  Pfam annotation: Domain name=Arm; Domain location=178-218; Score =25.1; E_value=0.00025; Accession=PF00514.13; Description =Armadillobeta-catenin-like repeat
  Pfam annotation: Domain name=Arm; Domain location=220-260; Score =22.0; E_value=0.0021; Accession=PF00514.13; Description =Armadillobeta-catenin-like repeat
  Pfam annotation: Domain name=Arm; Domain location=261-301; Score =12.3; E_value=0.35; Accession=PF00514.13; Description=Armadillobeta -catenin-like repeat
  Pfam annotation: Domain name=Arm; Domain location=94-134; Score=39.2; E_value=1.4e-08; Accession=PF00514.13; Description=Armadillobeta -catenin-like repeat
  Pfam module annotation: Pfam domain module=Arm::Arm::Arm::Arm::Arm; Domain location=135-176::178-218::220-260::261-301::94-134
MESDASTSPRRRSTSCYSDSGDSSCSEPFSECGSDDLSFTPAAAAGIHRLLLSCAAEASEDAISSLVAELECPSQSLDSLRRAAMELRLLAKHNPDNRVRIAAAGGVRPLVRLLSHADPLLQEHGVTALLNLSICDENKATIVEAGAIRPLVHALKSAASPAARENAACALLRLSQLDGASAAAIGRAGAIPLLVSLLETGGARGKKDAATALYALCSGARENRQRAVETGAVRPLLDLMADPESGMVDKAAYVLHSLVSSGEGRAAAVEEGGIPVLVEMVEVGTSRQKEIATLSLLQICEDNAVYRTMVAREGAIPPLVALSQSSSARPKLKTKVHTHHVAVPAFDKKRPVNSRISGGVADRDAAAAAEPEPPHAASGSRCGGMTPPPWWCVPRILLFFVETSLRGSTGQPA

SEQ ID NO: 57775 - protein, 262 aa, Zea mays
  Coding DNA Sequence Number=SeqID_15996
  Subcellular localization annotation: CTP_CleavageSite=81; ConfidenceScore=5.30e-01
MACAQQPRGLSARGTRPLYGGVRARPLGTQPCAAPAWRNGHGAACRGRETTRTSRRRATTSARARPWPGAGLASSRGGIWQAFMASAAREATTRVPGNVLHAICVEIERTTVPKEHFRKGSPKISVPIPNGDKKRRREKWGRKERAPCVMRSTTRLGKISGSRELPRRHNQLDSLDSSARAQSRERSPSFSAVFPSPSERIIGLPPGQARTCRLYRLDRSTGPILRSSRIQTTRRGEKRQPSGAEAGSDKDGTIIARAIAIG

SEQ ID NO: 57776 - protein, 82 aa, Zea mays
  Coding DNA Sequence Number=SeqID_15997
MAMRRARADRQTPSHQYRPVRDGRRQCWCWGHAADPMCVRACMDAVGLSEVHGFVPIYGRWSHLYYEIDYKYVLVIAAEKSS

SEQ ID NO: 57777 - protein, 107 aa, Zea mays
  Coding DNA Sequence Number=SeqID_15998
MGTAASTAWWPCMALQFEWLLGPPLIVRRTATADKIAVTSGHHLPVEKNPGELPSSAGLGPPCPPLRSDDSGSGQAKKRTPRASASGFRLMTADLCYLRNVRVTSLA

SEQ ID NO: 57778 - protein, 199 aa, Zea mays
  Coding DNA Sequence Number=SeqID_15999
MHTSSNTFHYNSTIDIKLDKGFSLVGVSTPGGPWTDDPRLGEAEAPPRSRSSLSSEVEVESEPLGRARRRPSVEARAESEPWGQARRSSSSSGAEVESEPWGRARRSSSSSWAEAESEPWGRARRSSSSSGAEAEPWGRARRSFLWRPRPDLAAVSLTLSSGTVVGAAQAALSSCQAGQWSGEVTAVTSALSTEGRASG

SEQ ID NO: 57779 - protein, 170 aa, Zea mays
  Coding DNA Sequence Number=SeqID_16000
  Subcellular localization annotation: CTP_CleavageSite=22; ConfidenceScore=5.70e-01
SAPRSGGSGPDRPSQRRRTTTRSHTARPPSPRARPPLGPPRSTPSPASPAALPARPGPATAPARTGPVAAPARPRSSPARAQRGPGAPSAWPGAAPVAPARRRDPGAAPGRFNRPPGRFNRPGPSSATRSPVPASPDRGYEIDGFGYDYGAGEDEAVEGDFQEFQDYDEF

SEQ ID NO: 57780 - protein, 77 aa, Zea mays
  Coding DNA Sequence Number=SeqID_16001
MAPGRAQGGSGKCGEHGHGYGDNAEAPKGSCPQRDGSTGAQPCSGEQLHTPEGKKGQIGGRGRLITSIDDSGTLERW

SEQ ID NO: 57781 - protein, 80 aa, Zea mays
  Coding DNA Sequence Number=SeqID_16002
MWGKGKLQPSGDQGLRANSAPRKEKAEIPFKLISRHKPFRTLTNPKQDRLGFLRLGLTYWDEKDPTPSATMPTVTPGFRR

SEQ ID NO: 57782 - protein, 417 aa, Zea mays
  Coding DNA Sequence Number=SeqID_16003
  Gene Ontology: Mol. function=protein serine/threonine kinase activity; Cellular component=membrane; Biological process=protein amino acid phosphorylation
  Homolog annotation: Hit_ID=Q1EPK4; Match level="QueryCoverage=92%, HitCoverage=75%, E-value=1e-145, Identity=68%"; Hit description =Protein kinase family protein
  Pfam annotation: Domain name=Pkinase; Domain location=180-417; Score =123.8; E_value=5e-34; Accession=PF00069.15; Description=Protein kinase domain
  Pfam annotation: Domain name=Pkinase_Tyr; Domain location=180-416; Score=91.2; E_value=3.3e-24; Accession=PF07714.7; Description =Protein tyrosine kinase
  Pfam module annotation: Pfam domain module=Pkinase::Pkinase_Tyr; Domain location=180-417::180-416
MERTVLGLTLWVWIAIGVVALLVAILLMICIWVASRLRTKRTMDSLRQTQIPIYSKEIPIDRVGGRSLAQTMHEREQPSLPPPDKYANREPAGAAVGHLALSKSSDHDNMSQGSSVCNADRAGTGSMHSGEDGSSGPRRKPNSPAAFVSASPLVGLPEFSHLGWGHWFTQRDLELATNRFSKENVLGEGGYGVVYRGRLVNGTEVAIKKIFNNMGQAEKEFRVEVEAIGHVRHKNLVRLLGYCVEGVNRMLVYEFVNNGNLEQWLHGAMHQRGVFSWENRMKVVTGTAKALAYLHEAIEPKVVHRDIKSSNILIDDEFNGKVSDFGLAKLLGSDKSHITTRVMGTFGYVAPEYANTGMLNEKSDVYSFGVLLLETVTGRNPVDYSRSSNEWHFYNQDQCDSVTIDNTTTLNWISLLI

SEQ ID NO: 57783 - protein, 67 aa, Zea mays
  Coding DNA Sequence Number=SeqID_16004
MATTTVLPFPASTRHKSGDGALTGNITTTLITNFGQIYSMLVIEMQHLRLTHAEVDALAVMASSEPV

SEQ ID NO: 57784 - protein, 55 aa, Zea mays
  Coding DNA Sequence Number=SeqID_16005
MRASSVACDSHVCVCHYGKSYIFIVNYVQRQQVRLCCSVSQNAKKRYKKGLAWLN

SEQ ID NO: 57785 - protein, 453 aa, Zea mays
  Coding DNA Sequence Number=SeqID_16006
  Homolog annotation: Hit_ID=Q2R244; Match level="QueryCoverage=88%, HitCoverage=98%, E-value=1e-130, Identity=58%"; Hit description=F -box domain containing protein, expressed
  Pfam annotation: Domain name=DUF295; Domain location=360-417; Score =66.2; E_value=1.1e-16; Accession=PF03478.8; Description=Protein of unknown function (DUF295)
  Pfam annotation: Domain name=F-box; Domain location=42-88; Score =22.1; E_value=0.002; Accession=PF00646.23; Description=F-box domain
  Pfam module annotation: Pfam domain module=DUF295::F-box; Domain location=360-417::42-88
MEKLRFILSKFNSNLSHPKLMDKSRFEASEFNTLFDPNTMEKTAEDLSFDVLWLIFANLELPDLVRAGSVCSIWRDIYTSLCNSGSYNPQHTPCLLYTSESAGARAACLYSLAEKKTYTLTLPDPPLRSRYIFGSSYGWIVTADERSELHIVNPITGDQIALPSVTTIDQVKPIFSDTGVVCGYEHSGYSGVWMASNIPSIFDLGELRDYLFHKVFLSSDPSTGDYFMVLIHNPHYQLSFARAGDDKWTWLPQGDCYEDCLFNGQLLYACTQLGEIHEFDLGTPAITHKIFLGRVKDVYDERIYIVQASCGQLLQIWRSDNTIEEGDDEEEYDPDFGPDLPWHSTSMIKVHKVEPTSKKLVEISSLGANVLFLGHNLSLCLRAEEHPQLKANHIYFADDEPYTYFKNKRRDIGVFDLERNCSEKIVSPQLWSNWPAPVWLVPNPRRIGLSLCK

SEQ ID NO: 57786 - protein, 79 aa, Zea mays
  Coding DNA Sequence Number=SeqID_16007
MDMENNMSTTISVVQFRHYSSYPQIPPLALSKQIPSGQEDSRIPVLDQQITDSLNNFYLNYSHERLRLKDEMTEYSYND

SEQ ID NO: 57787 - protein, 307 aa, Zea mays
  Coding DNA Sequence Number=SeqID_16008
  Gene Ontology: Mol. function=catalytic activity; Cellular component =cytosol; Biological process=cellular metabolic process
  Homolog annotation: Hit_ID=O24563; Match level="QueryCoverage=95%, HitCoverage=79%, E-value=1e-125, Identity=79%"; Hit description =Cinnamoyl CoA reductase
  Pfam annotation: Domain name=3Beta_HSD; Domain location=32-300; Score= -77.2; E_value=2.6e-07; Accession=PF01073.9; Description=3-beta hydroxysteroid dehydrogenaseisomerase family
  Pfam annotation: Domain name=Epimerase; Domain location=31-270; Score= 41.3; E_value=3.2e-09; Accession=PF01370.11; Description=NAD dependent epimerasedehydratase family
  Pfam annotation: Domain name=KR; Domain location=30-170; Score=-97.3; E_value=0.1; Accession=PF08659.1; Description=KR domain
  Pfam annotation: Domain name=NAD_binding_4; Domain location=33-254; Score=-32.4; E_value=1.5e-06; Accession=PF07993.2; Description=Male sterility protein
  Pfam module annotation: Pfam domain module=3Beta_HSD::Epimerase::KR::N AD_binding_4; Domain location=32-300::31-270::30-170::33-254
  Subcellular localization annotation: CTP_CleavageSite=31; ConfidenceScore=5.24e-01
MTVVDAVVSSTDAGAPAAAATAVPAGNGQTVCVTGAAGLLCRPARAWQQMERLTCLYMFMAADDPKNAHLKALDGAAERLILCKADLLDYDAICRAVQGCQGVFHTASPVTDDPEQMVEPAVRGTEYVINAAAEAGTVRRVVFTSSIGAVTMDPKRGPDVVVDESCWSDLEFCEKTRNWYCYGKAVAEQAAWETARRRGVDLVVVNPVLVVGPLLQATVNASIAHILKYLDGSARTFANAVQAYVDVRDVADAHLRVFESPRASGRHLCAERVLHREDVVRILAKLFPEYPVPARSDFIVLIACLLA

SEQ ID NO: 57788 - protein, 45 aa, Zea mays
  Coding DNA Sequence Number=SeqID_16009
  Subcellular localization annotation: CTP_CleavageSite=28; ConfidenceScore=5.19e-01
MSTASGVSAGSVLQLPSFRVPAKRFLPRRTAAGAPAGIVLRQERC

SEQ ID NO: 57789 - protein, 252 aa, Zea mays
  Coding DNA Sequence Number=SeqID_16010
MQPRKVGPLAKKCDESLQASANTPFEARGLLSGTIIRGTLKTPNSQLAVRPCQRRHRKLRSARPRARTRAKPRKTANSAPPDPRARTRAKTRKTTNAASPDPRARTRAKTRKTTNSAPPDPRARTRAKTRKTANSGPPDPRARTRAKTRKTTNSASPDPRARTPLWPLPNDLHLARPRGSGSASATEDRLDLSFGGAPTSPRPRTRARHGDVSKDSIAPTAVPPPGSVAPPTATTSYQQGAKNSPAATLACT

SEQ ID NO: 57790 - protein, 619 aa, Zea mays
  Coding DNA Sequence Number=SeqID_16011
  Homolog annotation: Hit_ID=UPI0000DA3A2C; Match level="QueryCoverage =42%, HitCoverage=71%, E-value=2e-09, Identity=23%"; Hit description =PREDICTED: similar to proteoglycan 4
  Pfam annotation: Domain name=DUF593; Domain location=6-99; Score =82.1; E_value=1.7e-21; Accession=PF04576.6; Description=Protein of unknown function, DUF593
MAENDTVQLQRAIFAQYIMMKRLFMELEVEREASATAASAAMSMIRKLQKEKDAERMEAWQYKRIAEEKINHTNRALDILKEVVELKQLEISYLRYQLQVCKQKLLDAGIDDCDVADETIDSDKSLFGRNNMENLCHKIKRNSSLPTLQLNKQCTDMDIKKNGGVPSARSRLTDDGCEQISIDVMALEPKESFATDLNFRGKHGEEAHSPRSGSESQTLDDPPCCSSFSVVSHQADICSDGAVQTREDKECTVNHDQLKDSCVHESETSDEPPCSSSLSVVSHQADICSDGEVPTREHNECAVNHDHLKDSCVHDSETLDEPPCSSSFSVESHQADICSDAAVQTREDNDCTVNHDQLKDSCVHDDSETLDEPPCSSSFSVVSHQADICSDGEVPTREDNECAVNHDHLKDSCVRDSQTLDEPPCSSSFSAGADICSDGAVQARGDMECTVVNHVRLKDSCAGTEIGELVAHPLSEVDPLQTPKRSNKATDSSCTGSEITTVEEPQLSPRGVTKARGPRNLSRFAETRKVGSMNNVDRHVRRSSGTYSPRAAGVERTMSKLKRVQSEKMVELGDPRTGREQIIMLKEVYEQLRMIESHMRPSGSQESPRSATSLDSVME

SEQ ID NO: 57791 - protein, 132 aa, Zea mays
  Coding DNA Sequence Number=SeqID_16012
MVARAATRAEEVVGYGVVKGSATLDGAERTHMVSGPTHFVKKHLDHDPLPPLLAGKPGRPSPLEPGVVKRGTAGEGSSGGVGEEQGLRGCRCGIHGEQCIEEERSIRVGMRLGEEPVVGMAILCDDSGGSGA

SEQ ID NO: 57792 - protein, 227 aa, Zea mays
  Coding DNA Sequence Number=SeqID_16013
MVAAQCLLLGRRATTYGPEAPHTIELDANTIAALHAQGDDVHNITSLMSIMLDLASPTTPAGVIRAWQNSLHDLGEPVLDRTLVLNLLRGPSPHYHLKAIIKQIVSFPFFHDIHNEFLLEELTLETKSPTSAMTLYGVPSSGQAPHPPSTGAPARPPTAPPLELLVRLLALMGSPAPQGGRVSGVSTRDGPTSHDSGPALPSFHNPWTGTISMWPGPATGASTPHPP

SEQ ID NO: 57793 - protein, 125 aa, Zea mays
  Coding DNA Sequence Number=SeqID_16014
MKRTKIRHEKLLTKTCLVEGNILKINRRGNNGSGWDGHDSDGSCREDDDLAKGTTDLAGKVAATVNPTGKATTAIVDGSNEGDEREEGDRVVPARQGSAPWQGRQWPRRLEKGLGVESVLGTGRW

SEQ ID NO: 57794 - protein, 415 aa, Zea mays
  Coding DNA Sequence Number=SeqID_16015
  Homolog annotation: Hit_ID=P19862; Match level="QueryCoverage=35%, HitCoverage=24%, E-value=7e-40, Identity=70%"; Hit description =Phytochrome A
  Pfam annotation: Domain name=PAS; Domain location=16-130; Score=31.5; E_value=3.1e-06; Accession=PF00989.14; Description=PAS domain
MTVHKLVMDEFTRLQGDYKAIIHDLNPLIPLIFGAGQFGWCSEWNAAMTKFTGWHRDEVVDKMFLGEVFNSSNASYLLRGKDSFVCLCIISNNSLADKSSCLDLDMAEFVLPVVVGSAVSKVLIGGQAKGTAVNSNLEKLSFNEVILWEYPMKCADWQPSAPPMSLEILLASGTSRPIPWPNFVLSCISCANLYFSWALKPPWLLQPRQDISAVLRPVPWPSFRAFHDAIARWWDFSLLMLPPWFPSAWCYSGYRSGVLGIMSRITSFIFAVWLSLNHYDVHYSHINLMACMMLIQLSCFCNMRIPERQSVSYMVLALYIFRFHTNLQELPSVASLEEGSTMLLSDSWVWSGRDLSLSGVCASVSWGSVPVSWTACAGDQPSHASDATARDRDLQDDELTKMKRITMVLTSARQH

SEQ ID NO: 57795 - protein, 312 aa, Zea mays
  Coding DNA Sequence Number=SeqID_16016
  Gene Ontology: Mol. function=threonine-tRNA ligase activity; Cellular component=mitochondrion; Biological process=tRNA aminoacylation for protein translation
  Homolog annotation: Hit_ID=Q8LPC9; Match level="QueryCoverage=92%, HitCoverage=54%, E-value=1e-140, Identity=84%"; Hit description =Threonyl-tRNA synthetase
  Pfam annotation: Domain name=HGTP_anticodon; Domain location=217-307; Score=87.9; E_value=3.2e-23; Accession=PF03129.10; Description =Anticodon binding domain
  Pfam annotation: Domain name=tRNA-synt_2b; Domain location=3-104; Score=-21.7; E_value=0.00051; Accession=PF00587.15; Description=tRNA synthetase class II core domain (G, H, P, S and T)
  Pfam module annotation: Pfam domain module=HGTP_anticodon::tRNA-synt _2b; Domain location=217-307::3-104
MGWEIHWAMPRATCIGPQIFNVELPLRMADFGVLHRNELSGALTGLTRDDAHIFCREDQIKDEVKAVLEFINYVYEIFGFKYELELSTRPEKYLGEIETWNKAEQQLTEALNEFGKPWKKTYIDAFMQINEGDGAFYGPKIDIGVFDALKRKFQCATLQLDFQLPIRFKLTYSAEDEAKIERPVMIHRAILGSVERMFAILLEHYNGKWPLWLSPRQAIVCSVSSGSVEYAKQVLAMLHEADFHVDIDVSDRTIQKKVREAQVAQFNYILVVGAQEAETGNVCVRVRDNADLATMSVDGLITRLREEIVAFK

SEQ ID NO: 57796 - protein, 177 aa, Zea mays
  Coding DNA Sequence Number=SeqID_16017
  Gene Ontology: Mol. function=orotidine-5'-phosphate decarboxylase activity; Cellular component=cytosol; Biological process='de novo' pyrimidine base biosynthetic process
  Homolog annotation: Hit_ID=Q9LKI4; Match level="QueryCoverage=99%, HitCoverage=33%, E-value=8e-84, Identity=89%"; Hit description=UMP synthase
  Pfam annotation: Domain name=OMPdecase; Domain location=1-164; Score =31.6; E_value=6.6e-07; Accession=PF00215.14; Description=Orotidine 5'-phosphate decarboxylase  HUMPS family
MQYEGGIFRILDWADIVNAHIVPGPGIVDGLKLKLMNHGTHTNCRVLALKGSPKGRGLLLLAEMSSAGNLAHGDYTAAAVKIAEQHSDFVMGFISVNPASWSVTPSSPAFIHATPGVQMAAGGDDLGQQYNNPESVINYRGSDIIIVGRGIIKASDPLKTACEYRVQGWQAYKNSLL

SEQ ID NO: 57797 - protein, 299 aa, Zea mays
  Coding DNA Sequence Number=SeqID_16018
EAPVQGSCLTAIAAKSTQGPPYTDHSPTALAPFRVSFAVLQAEGCTGDLEPLDCHCAVQIKSYPHQSGTESQPSDQNPTADDSLNPFYNTRCQIQIGRLRSNLSNRYFPSNPSRSKRIQRPASLALPTRLDAAAPPTPYGGGDAGVVRTGALVRGFTRNEVQYAEGTKAKTMGVPSPRAMQRRGLTPLRGGPTVKMLLRQEIAAPLALNRARNVPVLHQCVSPKRPGPYPRPCRRRAWGAARVRARADQTEVPGGSCGRVVDPASQAESIAREKTELTSVAHSTARYAARAPVMTSGPT

SEQ ID NO: 57798 - protein, 191 aa, Zea mays
  Coding DNA Sequence Number=SeqID_16019
  Gene Ontology: Mol. function=orotidine-5'-phosphate decarboxylase activity; Cellular component=phagocytic vesicle; Biological process ='de novo' pyrimidine base biosynthetic process
  Homolog annotation: Hit_ID=Q9LKI4; Match level="QueryCoverage=92%, HitCoverage=37%, E-value=6e-86, Identity=93%"; Hit description=UMP synthase
  Pfam annotation: Domain name=Pribosyltran; Domain location=1-70; Score=6.2; E_value=0.0017; Accession=PF00156.17; Description =Phosphoribosyl transferase domain
MLMRRKEAKAHGTAKSIEGSFRPGDTVLIIEDLVTSGASVLETAAPLRAEGLLVADAVVVVDREQGGRENLAANGITLHSLMTLTEVLAVLLKHGKVTEEKAHEVRQFLDANRKVAVPGAAPVKPRVLRKPFSERAKLANNPMGKKLFELMEAKQTNLCVAADVGTAKELLELADKVGEDYVNLMWIYYLI

SEQ ID NO: 57799 - protein, 112 aa, Zea mays
  Coding DNA Sequence Number=SeqID_16020
  Homolog annotation: Hit_ID=Q6QP51; Match level="QueryCoverage=50%, HitCoverage=25%, E-value=3e-16, Identity=70%"; Hit description =Putative growth-regulating factor 1
MDGGNHPRGGEPPISQHLQGLQKGLEILLSLARGPIAPGPGKGILRKGSFSMKETGPEPPTDQRFEGWPLGRVRQPPQSTRAPRPLLVKGSKAGPSEGFDSRLRPLGLRAHY

SEQ ID NO: 57800 - protein, 116 aa, Zea mays
  Coding DNA Sequence Number=SeqID_16021
  Gene Ontology: Mol. function=inorganic anion transporter activity; Cellular component=integral to membrane; Biological process =inorganic anion transport
  Homolog annotation: Hit_ID=Q84RQ5; Match level="QueryCoverage=87%, HitCoverage=17%, E-value=7e-17, Identity=40%"; Hit description =NRT2;3 protein
MPLAYELVLRLGVPITVAWRVTYLLPCTLLITTGLAVLAFPNDHPRGVGAGAKTGNSLWKVVPGGVGNYRAWVLALTYGYCYGVELIMENVAANFFRKRFHLPWRLRAPRRRASAR

SEQ ID NO: 57801 - protein, 178 aa, Zea mays
  Coding DNA Sequence Number=SeqID_16022
  Pfam annotation: Domain name=REV; Domain location=11-129; Score= -22.5; E_value=0.087; Accession=PF00424.9; Description=REV protein (anti-repression trans-activator protein)
MFGLQVAMRLMVLGTDSGNASPLQPNRILAEYVDVYSPLLYITNPPHPQVVSIVTSAQEKMARLRHTARKSVIPFLPSRLAERPLCRPVTGQSSHLERLHHRLHEEQEHQRQEQEQQGSSFSLQQEIESVRSCSPKLPQEAPPAPPLSALAPGVAVGGDPDDGGGDSSSSHDTDFSAD

SEQ ID NO: 57802 - protein, 136 aa, Zea mays
  Coding DNA Sequence Number=SeqID_16023
MVNQVVVLNTELDEALDELGKACAEIAKLHAERMSDNRLQGRRCAQQEQQAPHDEAPQQQLPPPPPPMTIVQMFLMQTQVVQAIGQTLAAIQQAQHQPQPQPQVQMLQMPRDKHVEFMRGHPIVFAHSADPMDAED

SEQ ID NO: 57803 - protein, 154 aa, Zea mays
  Coding DNA Sequence Number=SeqID_16024
MGKNNKRKREPTPPSEEFGDSKYSEEEFSSESEGSPAPIPLRESSDDSDDSQGLAAEVWTYIRAVERSGLEGSDESEYSSDEEDSDGSGEDEDDDDDGDDDDDDGGDGDGDGSGRGGGGSRDDDGGGSRGSNRGGSSRGSTRGGSGGGSNRASG

SEQ ID NO: 57804 - protein, 71 aa, Zea mays
  Coding DNA Sequence Number=SeqID_16025
  Subcellular localization annotation: CTP_CleavageSite=37; ConfidenceScore=5.19e-01
MSKENPGIRYGCGMSSRALGASISTDPQIPSFLSRKTSMASPSPLNTQLIQVLELQTRTLLSELDKRLDSK

SEQ ID NO: 57805 - protein, 369 aa, Zea mays
  Coding DNA Sequence Number=SeqID_16026
  Subcellular localization annotation: CTP_CleavageSite=80; ConfidenceScore=5.03e-01
MASSLNIPDATRCGKEQSMAKPYAVPGSNVRIPRRHPNPSRGGSPMNYGPRGGPYSSYGRGRGPNYFGSPGSRGRGGRVGCHGRSYFNKSMLDDPWLDLQPGVGNILIPRGEYDSNKSWLPESLRKKKETPPAQGQIKPTPGLSLAEYLDMSFNEVSDKEKKFGGDSVEGKKKKGANLVPKAVLGRGQRQRLQLRLEPLGGREGAGGMIQTLSGTIIRGTLKSPNSQLSLRRSTDRLTEGQRRLRRSDCCAARQSEADRQSGPTSGTIGSSAPPDPGLGLGISPGRRRTPLCPTQGSDSGSAPEDGELRSARPRARTWAQPQKTTNSAPPDPGLGFGLSPRRRRTPLRPTQGSDLGSAPEDDELRFARP

SEQ ID NO: 57806 - protein, 162 aa, Zea mays
  Coding DNA Sequence Number=SeqID_16027
  Gene Ontology: Mol. function=serine-type peptidase activity; Cellular component=integral to membrane; Biological process=proteolysis
  Homolog annotation: Hit_ID=Q00YZ7; Match level="QueryCoverage=67%, HitCoverage=41%, E-value=4e-16, Identity=45%"; Hit description=[OU] KOG1568 Mitochondrial inner membrane protease
MYALRWHKPDVVAPTWPELDATDLGAEFDCVIKSYVGKMEVFVGDVVLLKDPEKSGNFVIRRLAALEGYEMVSNDEKDEPFVLEKDQCWVLADNLVLKPKEARDSRLFGPVPMTDILGRVIYSLRTAVDHGLVENSGMATKLDGPVLAVELDVEELAKNNKA

SEQ ID NO: 57807 - protein, 127 aa, Zea mays
  Coding DNA Sequence Number=SeqID_16028
MLSIELGVCARSTEGGLPLGEECGDNEDDGFDYDYANGFRGSTFNRQRSVGRRKRDNSSLDGLLASFRVRSSRSPAKEAGDSARICTGQGGRAHSRIEGVSANPVGKATTAIDPTLKMEIQPKGQQI

SEQ ID NO: 57808 - protein, 201 aa, Zea mays
  Coding DNA Sequence Number=SeqID_16029
  Gene Ontology: Mol. function=kinase activity
  Homolog annotation: Hit_ID=Q6QP54; Match level="QueryCoverage=50%, HitCoverage=42%, E-value=1e-23, Identity=55%"; Hit description =Putative kinase
MTPFLDVDITADPDWSSLHARGGPSDRARTRAKSRKTVNSAPPDPGLGLGLIPEDGELRSARPRAQTRAQPQKTTNSTPPDPGLGLGLSPRRRRTPLRPTQGSDLGSALEDDELRLAQPRGSDSTSATEDRLDLGFGGASTSPNLGRRPATSTGGAIITLPQADSGHREQDRLHRSSDGHDITPAGCQNLSGCHNGMYLGR

SEQ ID NO: 57809 - protein, 75 aa, Zea mays
  Coding DNA Sequence Number=SeqID_16030
MALFRKFFYRKPPDGLLEITERVYGECSLRGGLICVSIVECRGKCVGAMRRYWKCFGVCFFPLLVCRANVFTSFW

SEQ ID NO: 57810 - protein, 99 aa, Zea mays
  Coding DNA Sequence Number=SeqID_16031
MESSSGCLVPTLSLRMALSPRCPGCLMCPDSSAAPLPPALPLGNGITLETDGLFHFVAHVSWALCALANPHWHGAMEDEYQASFANDTWDLVLEMAMGR

SEQ ID NO: 57811 - protein, 132 aa, Zea mays
  Coding DNA Sequence Number=SeqID_16032
  Subcellular localization annotation: CTP_CleavageSite=27; ConfidenceScore=5.32e-01
MAARVKASSPAPARRGSRTGKSSRSTSADEVGSTQGRAAVAVVPRRRESHLGGEDNRLQWAQGWAHMEMRWPGGVPRRQGAWRWVQPQPPRYRRRWRGKGRRDGGRGSSVHGLRMAGVELLLVAARGGEEAD

SEQ ID NO: 57812 - protein, 176 aa, Zea mays
  Coding DNA Sequence Number=SeqID_16033
  Gene Ontology: Mol. function=actin binding; Biological process=actin cytoskeleton organization and biogenesis
  Homolog annotation: Hit_ID=Q9LH02; Match level="QueryCoverage=24%, HitCoverage=14%, E-value=5e-15, Identity=86%"; Hit description =Similarity to human diaphanous 1
MCRQLHEGFKRRKGLVRMACKLIAGCYVEVSTVAVEVPVVALTSQGRNADALALYFGEDPARCPFEQVVTTLQNFVRLFTRSHEENCKQLDLEKKKALKEAEDNSKQLDLEKKKTQKEAETEKIKKKSDSEKACKKELENDKSSKKDSANEKGKLNNPIKELDISLQSPAQTASAK

SEQ ID NO: 57813 - protein, 97 aa, Zea mays
  Coding DNA Sequence Number=SeqID_16034
  Gene Ontology: Mol. function=actin binding; Biological process=actin cytoskeleton organization and biogenesis
  Homolog annotation: Hit_ID=Q1T5L0; Match level="QueryCoverage=53%, HitCoverage=5%, E-value=6e-13, Identity=65%"; Hit description=Actin -binding FH2; Quinonprotein alcohol dehydrogenase-like
MENIVKMQGFNRVINNIMTNIVNVHTCLAGGEDLINPIVLSEKLPELLDFPKDLSSLELAAKAVNKGLEKVEQELTTSENDGPVSEIFRKVAVTNLE

SEQ ID NO: 57814 - protein, 164 aa, Zea mays
  Coding DNA Sequence Number=SeqID_16035
MGKNNKRKREPTPPSEDFGDSEYSEEEFSSESEGSPAPIPLRESSDDSDDSQGLAAEVWTYIWAVERSGLEGSDESEYSSDEEDSSEEDGGGNGEDDDDDDDDDEGGGGGDGDGRGGSSGSKGDSGGSRGGSGGSGNRGGSGGGGSSRGSNKGGSGGGSNKASG

SEQ ID NO: 57815 - protein, 76 aa, Zea mays
  Coding DNA Sequence Number=SeqID_16036
  Subcellular localization annotation: CTP_CleavageSite=58; ConfidenceScore=5.19e-01
MGRRNWVETQAKKQTEYRGGPQVTMNQVKSLRSSRRRCSKRETGPGCPRRRCQVVEVVVETRTGGGDTPVDDDRSV

SEQ ID NO: 57816 - protein, 90 aa, Zea mays
  Coding DNA Sequence Number=SeqID_16037
  Subcellular localization annotation: CTP_CleavageSite=31; ConfidenceScore=5.25e-01
MAPAKPRRLISSLPLPRRSTAPGAVFLLQPNAQESAQRLVARGRSLVGFIFGKGKSPGLNRTPEIPGAINDLHGRVLGADMPGKAVTTTY

SEQ ID NO: 57817 - protein, 298 aa, Zea mays
  Coding DNA Sequence Number=SeqID_16038
  Gene Ontology: Mol. function=homoserine dehydrogenase activity; Cellular component=chloroplast; Biological process=aspartate family amino acid biosynthetic process
  Homolog annotation: Hit_ID=P49079; Match level="QueryCoverage=84%, HitCoverage=45%, E-value=1e-90, Identity=94%"; Hit description =Bifunctional aspartokinase/homoserine dehydrogenase 1, chloroplast precursor (AK-HD 1) ...
  Homolog annotation: Hit description=(AK-HSDH 1) [Includes: Aspartokinase (EC 2.7.2.4); Homoserine dehydrogenase (EC 1.1.1.3)]
  Pfam annotation: Domain name=AA_kinase; Domain location=71-294; Score= -26.5; E_value=0.00098; Accession=PF00696.18; Description=Amino acid kinase family
MQGLDLPAVLAMGKNSGQLLRELTKVSTLQLTSRLPRTVHGDILKNLLAPTAGAVSVEQAEAIADLPKGEMWSVHKFGGTCMGTSERIHNVADIVLRDPSERKLVVVSAMSKVTDMMYNLVNKAQSRDDSYIAVLDEVFDKHMTTAKDLLAGEDLARFLSQLHADITGHATESFSDFVVGHGELWSAQMLSYAIQKPANENGDLEACVKAFATIDKLALVNVEGTGMAGVPGTANAIFGAVKDVGANVIMISQEMEQQHCQAWWQDCLDHLGRSSAALECRGHQESHWETLVRSARLG

SEQ ID NO: 57818 - protein, 165 aa, Zea mays
  Coding DNA Sequence Number=SeqID_16039
MGHNAEAGHVGQVQSVSVDGEVMAPSGLAHPTDSVVYQTVYVNSEFSGIICIISPDLHYAWYNGAPNRLQRLVFNRRVLVNDYLTWRPDRWHTGPIWCPPEQETANQDPRLTHVDPPTFSRADTAPRAPTKAQKSPVTENLFKSFDFAINLADNPVRITADKVLL

SEQ ID NO: 57819 - protein, 95 aa, Zea mays
  Coding DNA Sequence Number=SeqID_16040
  Subcellular localization annotation: CTP_CleavageSite=38; ConfidenceScore=5.47e-01
MGMGAYHMGPVGNAAMGIWGLSRGPRVRSVLSRGPRVRSVMVVQNENGNGNDRTDGNVGVAVPGDQGVQQGMVVGMEMTEQCGTGVSTKYQYNND

SEQ ID NO: 57820 - protein, 99 aa, Zea mays
  Coding DNA Sequence Number=SeqID_16041
  Homolog annotation: Hit_ID=P49079; Match level="QueryCoverage=34%, HitCoverage=3%, E-value=4e-08, Identity=88%"; Hit description =Bifunctional aspartokinase/homoserine dehydrogenase 1, chloroplast precursor (AK-HD 1) ...
  Homolog annotation: Hit description=(AK-HSDH 1) [Includes: Aspartokinase (EC 2.7.2.4); Homoserine dehydrogenase (EC 1.1.1.3)]
MGTWPRMLCAWALVVYAPVLLWWFHAWCPGCGEALTFLGVDLLFSGGCSSSGGEWDNIVFGRCPMAAVLKENMNIDLRVMGIAGSRTMLLSDIVNFTKW

SEQ ID NO: 57821 - protein, 1022 aa, Zea mays
  Coding DNA Sequence Number=SeqID_16042
  Gene Ontology: Mol. function=protein serine/threonine kinase activity; Cellular component=integral to membrane; Biological process=protein amino acid phosphorylation
  Homolog annotation: Hit_ID=Q6ZCZ2; Match level="QueryCoverage=99%, HitCoverage=99%, E-value=0.0, Identity=51%"; Hit description =Putative brassinosteroid receptor
  Pfam annotation: Domain name=LRRNT_2; Domain location=28-75; Score =38.6; E_value=2.1e-08; Accession=PF08263.3; Description=Leucine rich repeat N-terminal domain
  Pfam annotation: Domain name=LRR_1; Domain location=127-150; Score =6.9; E_value=15; Accession=PF00560.23; Description=Leucine Rich Repeat
  Pfam annotation: Domain name=LRR_1; Domain location=152-173; Score =7.5; E_value=11; Accession=PF00560.23; Description=Leucine Rich Repeat
  Pfam annotation: Domain name=LRR_1; Domain location=174-198; Score =10.0; E_value=3.8; Accession=PF00560.23; Description=Leucine Rich Repeat
  Pfam annotation: Domain name=LRR_1; Domain location=200-222; Score =14.7; E_value=0.34; Accession=PF00560.23; Description=Leucine Rich Repeat
  Pfam annotation: Domain name=LRR_1; Domain location=224-247; Score =7.8; E_value=10; Accession=PF00560.23; Description=Leucine Rich Repeat
  Pfam annotation: Domain name=LRR_1; Domain location=250-269; Score =10.2; E_value=3.5; Accession=PF00560.23; Description=Leucine Rich Repeat
  Pfam annotation: Domain name=LRR_1; Domain location=289-311; Score =10.0; E_value=3.8; Accession=PF00560.23; Description=Leucine Rich Repeat
  Pfam annotation: Domain name=LRR_1; Domain location=313-336; Score =5.0; E_value=33; Accession=PF00560.23; Description=Leucine Rich Repeat
  Pfam annotation: Domain name=LRR_1; Domain location=338-360; Score =12.9; E_value=1.1; Accession=PF00560.23; Description=Leucine Rich Repeat
  Pfam annotation: Domain name=LRR_1; Domain location=362-384; Score =15.6; E_value=0.19; Accession=PF00560.23; Description=Leucine Rich Repeat
  Pfam annotation: Domain name=LRR_1; Domain location=386-408; Score =10.7; E_value=2.8; Accession=PF00560.23; Description=Leucine Rich Repeat
  Pfam annotation: Domain name=LRR_1; Domain location=410-432; Score =13.7; E_value=0.66; Accession=PF00560.23; Description=Leucine Rich Repeat
  Pfam annotation: Domain name=LRR_1; Domain location=502-524; Score =16.3; E_value=0.11; Accession=PF00560.23; Description=Leucine Rich Repeat
  Pfam annotation: Domain name=LRR_1; Domain location=526-548; Score =15.3; E_value=0.22; Accession=PF00560.23; Description=Leucine Rich Repeat
  Pfam annotation: Domain name=LRR_1; Domain location=550-572; Score =12.9; E_value=1.1; Accession=PF00560.23; Description=Leucine Rich Repeat
  Pfam annotation: Domain name=LRR_1; Domain location=574-595; Score =7.0; E_value=14; Accession=PF00560.23; Description=Leucine Rich Repeat
  Pfam annotation: Domain name=LRR_1; Domain location=78-101; Score =9.1; E_value=5.7; Accession=PF00560.23; Description=Leucine Rich Repeat
  Pfam annotation: Domain name=Pkinase; Domain location=726-998; Score =137.9; E_value=2.8e-38; Accession=PF00069.15; Description=Protein kinase domain
  Pfam annotation: Domain name=Pkinase_Tyr; Domain location=726-998; Score=116.3; E_value=8.6e-32; Accession=PF07714.7; Description =Protein tyrosine kinase
  Pfam module annotation: Pfam domain module=LRRNT_2::LRR_1::LRR_1::LRR_ 1::LRR_1::LRR_1::LRR_1::LRR_1::LRR_1::LRR_1::LRR_1::LRR_1::LRR_1: LRR_ 1::LRR_1::LRR_1::LRR_1::LRR_1::Pkinase::Pkinase_Tyr; Domain
  Pfam module annotation: Domain location=127-150::152-173::174 -198::200-222::224-247::250-269::289-311::313-336::338-360::362 -384::386-408::410-432::502-524::526-548::550-572::574-595::78 -101::726-998::726-998
MGAARTAAPVFMLLLLLHLSPRAVAAGTGDEAAALLAFKRASVAADQAGRLASWAEPNSTSGSASPCEWAGVSCVGGHVRALDLSGMSLVGRLHLDELLALPALRSVLLGGNAFHGDLTHRAPPRCALVDVDLSSNALNGTLPRAFLASCSSLRLLNLSGNTFTGGGGFPFASSLRTLDVSRNELSDAGLLNYSLSACHGIRHLNLSANQLTGELPPRFAQCSQVSVLDLSGNLMSGALPGRLLATAPASLTRLSIAGNNFSGDISRKLLLPNNYINGTVPPSLGNCSNLESLDLSFNLMVGPITPEVLLLPKLVDLVMWANSLSGEIPDTLCSNSTALKTLVISYNNITGVIPVSITRCVNLIWLSLAGNSMTGSVPAGFGNLQKLAILQLHRNSLSGPVPAELGRCSNLIWLDLNSNNFSGAIPPQLAAQAGLITGGMVSGKQFAFLRNEAGNICPGAGVLFEFFDIRPERLAQFPAVHSCASTRIYTGMTVYTFNQSGSMIFLDLSYNSLTGTIPASLGNMTYLDVLNLGHNDLTGAIPDAFTGLKAIGVLDLSHNHLTGVIPAGLGCLNFLADFDVSNNNLTGEIPTSGQLSTFPASRFENNSGICGIPLDPCTHNASTGGVPQNPSNVRRKFLEEFVLLAVSLTVLMVATLVVTAYKLRRPRGSKTEEIQTAGYSDSPASSTSTSWKLSGSKEPLSINLAIFENPLRKLTYAHLHEATNGFSSEALVGTGGFGEVYKARLMDGSVVAVKKLMHFTGQGDREFTAEMETIGKIKHRNLVPLLGYCKVGDERLLVYEYMNNGSLDVLLHERDKTDVGLDWATRKKIAVGSARGLAFLHHSCIPHIIHRDMKSSNVLLDDNLDAYVSDFGMARLVNAVDSHLTVSKLLGTPGYVAPEYFQSVICTTKGDVYSYGVVLLELLSGKKPINPTEFGDNNLIDWAKQMVKEDRCSEIFDPILTDTKSCESELYQYLAIACQCLDDQPSRRPTMIQVMAMFSEFQIDSGSFFLDGFSLDSDRGII

SEQ ID NO: 57822 - protein, 271 aa, Zea mays
  Coding DNA Sequence Number=SeqID_16043
  Homolog annotation: Hit_ID=Q6K990; Match level="QueryCoverage=26%, HitCoverage=7%, E-value=3e-24, Identity=82%"; Hit description =Putative phragmoplast-associated kinesin
MAGGSVEILDSLAMEADGGRHDRREVEWAGKHEGWDGGWGNAELDARGAGSQSLADRDPRMSTRRAGWRLARLTARRSSWWLPAWCGARLTEIVATRRVEVAERIGDAVDPGAHEPAVEPLEVLLLRHGDAVEGEVATPAGVSAHAHGSPAPRELQRGRDTRGEVPNAADHLDRVLCCAIALVGPPPPPSPVPSTVCSASDGVATRCRGVAGGGADRPVFALSRAAMGRERGCPVCRNQMCHWEGRGQEAGRWLRVEAGKRWPGHWRPRVG

SEQ ID NO: 57823 - protein, 62 aa, Zea mays
  Coding DNA Sequence Number=SeqID_16044
SLNLNSYGPNPRVMKAWEHREDKRGCFVWFEHGGGLTPSGITVKGILFYIEKLPSPLGEDEL

SEQ ID NO: 57824 - protein, 81 aa, Zea mays
  Coding DNA Sequence Number=SeqID_16045
MASSKDRTKVSLSNIMKPTLESLSAEDQQQFEDYIRQQQAQERKEAKVKYLAHFKVDRHQRIVQQGEFEMTSLLPTTHAPN

SEQ ID NO: 57825 - protein, 187 aa, Zea mays
  Coding DNA Sequence Number=SeqID_16046
  Homolog annotation: Hit_ID=Q6QP51; Match level="QueryCoverage=30%, HitCoverage=25%, E-value=7e-15, Identity=66%"; Hit description =Putative growth-regulating factor 1
MQAACHRTKGTHPFDFDASILEVQAHTSCGRKQQSSRQQAHAPSWDSKRTLSHGVKTTRSDRERGYSERDPSPRRKRAPSPLLIRGSKAGPSEGFNSRLRALGLHAHYWSEVRRLAPRKGSTAASGHSGSAPTTDQGFVGWPPKGSTAASEHAERGMTLDSGAALANPTPAIPLTASTYQPENLGPD

SEQ ID NO: 57826 - protein, 291 aa, Zea mays
  Coding DNA Sequence Number=SeqID_16047
MRCKRHPNQAGGGVCATCLRDRLLALEAAQSGDASPPGPAQAQAPEPPPAFPRSVSPYVSRRKSDTSGGALRHHPSLLFFRTPQVGPAYGGGGGGGALEEPHIGYGYGYGHEKRRAGKFSVLATLFGRHHHHRRPEARHQERKKHSWLAGIMPRRRRSKGQVPASATSPQSAPPRRSCRAVSNRGLSPERDGDGDDDESSSPAAWRPSPSPMRRTTCRRRQTSGSMPSGFAVCLSPLVRPIPGRRPVQPPDPGAFSSELRPPPPPPLHSSLSSASVTRCRSRKLADGGRFR

SEQ ID NO: 57827 - protein, 618 aa, Zea mays
  Coding DNA Sequence Number=SeqID_16048
  Gene Ontology: Mol. function=nucleic acid binding; Cellular component= nucleus
  Homolog annotation: Hit_ID=Q6ZGY4; Match level="QueryCoverage=69%, HitCoverage=21%, E-value=1e-157, Identity=64%"; Hit description =Putative photoperiod independent early flowering1
EFSEEAAGRQEEDELVNEENGKPDEHINEEQKYNSSDVEKEKHITLSTNRLNKEKALTLAVGDEDTDMLADVKQMAAAAAAAGQASSSFENQLRPIDRYAMRFMELWDPVIDKAALNHQVNVEEEEWELDRIEKFKEDLEAEIDEDQEPLSYESWDVDFATTAYRQHVEALTQKQLLEEQERQAQEATKELEEKNDNMSSHHRKSKKNKKKTGKLKPLKRVRLSPESEVILEETSVDNAPSPELTSDESPHHYCNKRKKITVATEENSNSRSLKKLKKTTKSSFISEALSPRLKEDLNDSDSKSVGRTKSDGRFFIPCMPVKRVIVIKPERLKRKGIWSRDCASDSWSSEEDAVLCGTVHEYGPLWELASDFLHFLPGGSLYRGRYHHPVHCCERYRELFCKHGMSATDNSNSEKVPSGTGKAILRVSEFVRKYGTGYTSKGSGPSRSPQWCPPTVAVPLPRSQGVGGAIEAQIWFIQHALKEIGGMPYPQLTRNYEDCSLLMNMKLEASGMRLSMMTRSHRGTCLLMPSSSLCYRRYYPHAGGEEDDQVSIHVGSKRTCKSTLQWFWRDRELLSFHDGEHMYDFVLHQIGMVSSLNLYDEDITEQRTVEKILHVVPR

SEQ ID NO: 57828 - protein, 214 aa, Zea mays
  Coding DNA Sequence Number=SeqID_16049
  Homolog annotation: Hit_ID=Q6ZGY4; Match level="QueryCoverage=64%, HitCoverage=6%, E-value=1e-28, Identity=50%"; Hit description =Putative photoperiod independent early flowering1
MKAQFLMTGLGLLSYLGIEWVVSPFMECPTVEDMGVVKRFLHYIASTKLVGYLDSDLAGSTSGALFFLGASLISWIASEACYDGESSHWASSAFHINDAARHKSGSKSIGKHKAALESGRLLKSKVQKITESHQEGAIAMSSFLRMPAQLLPSTADFHISDSLSDFGIRDSEFYFSEDLLQEVDALEFFPDQGDSGLLPGIEELESLSDFTDIG

SEQ ID NO: 57829 - protein, 132 aa, Zea mays
  Coding DNA Sequence Number=SeqID_16050
MMKTDKASLLAEVIEHVKELKRQTSVVLDVEGEEPEFQVEWVLRALEDLTMYLRRQREGGDEAGAIVASSRDDNDIEMMQESSEPYQHASSRDDDDIKAMLESSDPYQGPSDAFQEMGHQPIFIPCSSYVWD

SEQ ID NO: 57830 - protein, 307 aa, Zea mays
  Coding DNA Sequence Number=SeqID_16051
MDPKLSFDSLVNYPWLWNQLENTEGSRNGEGDNRKKKVEAAGIREFLSVAFTMFRFDALHDSHPENLTPPTHREQQQVTPILGLGLEGWRGAGDVDARLPLGPLAAVRRAGFRPPVAGLPTADHPPSPFPTRSSISLCRRSPLHTSFLCWPSSSSAWWPTPVGAQSECRVAPPVSSARSAPISYGAWQPLPLCSPPHALELQSSRPRLPLAVRVVAAIRPRSSPRHGAPYLTATSPESSRGAPPLLALALPSAMDAVGLDSLWPRHPSYSLLDPVSLPSTSDGLARLAPTRKGHRDIVLVASLLCAP

SEQ ID NO: 57831 - protein, 52 aa, Zea mays
  Coding DNA Sequence Number=SeqID_16052
MAKHVVSAISVEASTTARDRGGMELDEQATVDPEVQQIEVAEQELIEVKLCL

SEQ ID NO: 57832 - protein, 142 aa, Zea mays
  Coding DNA Sequence Number=SeqID_16053
MAPKKVTTRASSSLDETTKVTLVDKKGKATLAEDTLPTITKNNETGVVNNKHPHTEDPPTPEGSVHTCSSKGLSHDDTPPRFVPVAHLPTQGVEDNLQDGEDLGISADDQLKLRALCIKTTTFKSKGRSSQSRGNKPTCRPE

SEQ ID NO: 57833 - protein, 71 aa, Zea mays
  Coding DNA Sequence Number=SeqID_16054
MERIQDNDSNDQEKEKKEKKVEKKFYKKKKGEAHIDKEMDSDYSSSDSNDEGLATIAFNQSSLYPRSTTLD

SEQ ID NO: 57834 - protein, 44 aa, Zea mays
  Coding DNA Sequence Number=SeqID_16055
MAVPPSANAAPNRPEQAIQKLTDYVEYGWNSAQEPLHVDRVWPL

SEQ ID NO: 57835 - protein, 92 aa, Zea mays
  Coding DNA Sequence Number=SeqID_16056
MELAGDLLHGGTPDLAKDMPDLASGDPHQRFDRHKWDQLMGKPTVQREEEGQAAAVLALVCSAFLLKRHEQPKLRRQILRRMPESSRVGAVS

SEQ ID NO: 57836 - protein, 80 aa, Zea mays
  Coding DNA Sequence Number=SeqID_16057
MGGEAFWGCGCQIWLLSGGMASERHGGAARFEDEAVGGGRVEDQGFGSLVGEESELSQVGCLVAWQRRRAAVFLLLCRCL

SEQ ID NO: 57837 - protein, 117 aa, Zea mays
  Coding DNA Sequence Number=SeqID_16058
  Gene Ontology: Mol. function=carboxyl- and carbamoyltransferase activity; Cellular component=ornithine carbamoyltransferase complex; Biological process=amino acid metabolic process
  Homolog annotation: Hit_ID=Q8SA97; Match level="QueryCoverage=99%, HitCoverage=24%, E-value=2e-18, Identity=50%"; Hit description =Ornithine carbamoyltransferase
MALPVDVAGLRPRLGDVEAPPKPRSSLSSVAEVESEPLDRARRRPSAEARAESEPWGRAEWSGAILLSGRSVERRSDGGHFCSAGWGARVRIKLYADGGYQLRIRSLEGTPNYGPRQ

SEQ ID NO: 57838 - protein, 267 aa, Zea mays
  Coding DNA Sequence Number=SeqID_16059
  Gene Ontology: Mol. function=methyltransferase activity; Cellular component=intracellular; Biological process=protein amino acid phosphorylation
  Homolog annotation: Hit_ID=Q2RAB2; Match level="QueryCoverage=70%, HitCoverage=97%, E-value=1e-56, Identity=66%"; Hit description =Pentatricopeptide, putative, expressed
  Pfam annotation: Domain name=TPR_4; Domain location=100-124; Score =4.2; E_value=12; Accession=PF07721.5; Description=Tetratricopeptide repeat
  Pfam annotation: Domain name=TPR_4; Domain location=130-155; Score =3.7; E_value=14; Accession=PF07721.5; Description=Tetratricopeptide repeat
  Pfam annotation: Domain name=TPR_4; Domain location=37-62; Score =13.4; E_value=0.82; Accession=PF07721.5; Description=Tetratricopeptid e repeat
  Pfam annotation: Domain name=TPR_4; Domain location=67-92; Score=2.2; E_value=21; Accession=PF07721.5; Description=Tetratricopeptide repeat
  Pfam module annotation: Pfam domain module=TPR_4::TPR_4::TPR_4::TPR _4; Domain location=100-124::130-155::37-62::67-92
MRLQGRYAAFLRRASALPSLPLVASLHAAVLRRGVPALLASSLIQGYSACGDLDSARALFDETPPTLSSRTALAGALSAHGRCAEALDLLNVPEAGVDDRAVTVLLAACARAGMVAEGRRVFARVPRPALQHYTCMVEMLGRVGEVEEAERLVAGMEARPDRVILAALLTACRVHGRVDVAERVAGLMRRNDRSTVPWLAVRLSPVPVIFTPMLISERERHPEATSIGSRTVSDSDPRCRSGVRILAVCQEQRTAIMAVAFGLLLGV

SEQ ID NO: 57839 - protein, 151 aa, Zea mays
  Coding DNA Sequence Number=SeqID_16060
  Gene Ontology: Mol. function=peptidase activity; Cellular component =cytosol; Biological process=protein targeting
  Homolog annotation: Hit_ID=Q6H6I0; Match level="QueryCoverage=72%, HitCoverage=53%, E-value=4e-51, Identity=79%"; Hit description=EREBP- 4 like protein
  Pfam annotation: Domain name=DUF862; Domain location=11-148; Score =195.0; E_value=1.8e-55; Accession=PF05903.5; Description=Eukaryotic protein of unknown function (DUF862)
MEAQNGSCGGAPVVLNVYDLTPMNNYLYWFGLGIFHSGIEVHGMEYGFGAHQFPASGVFEVEPKSCPGFIYRRSVWMGTTDLSRAEFRSFIENLAGKYNGNTYHLISKNCNHFTDDVSQYLVTFYKPLQILTETSNKGGSTPGPPGPGPGA

SEQ ID NO: 57840 - protein, 86 aa, Zea mays
  Coding DNA Sequence Number=SeqID_16061
MAGSLRVAWWPSAPRFKVLSPHVVLALPPRNDSRDPFVEQFSLDRESGGIGCESWASVAHEQATEDSEVQQVEIAEQELIEGKLCP

SEQ ID NO: 57841 - protein, 416 aa, Zea mays
  Coding DNA Sequence Number=SeqID_16062
  Gene Ontology: Mol. function=hydrolase activity; Cellular component =cytosol; Biological process=response to other organism
  Homolog annotation: Hit_ID=Q8L7W2; Match level="QueryCoverage=65%, HitCoverage=75%, E-value=2e-95, Identity=61%"; Hit description=Nudix hydrolase 8
  Pfam annotation: Domain name=NUDIX; Domain location=243-373; Score =79.9; E_value=7.7e-21; Accession=PF00293.18; Description=NUDIX domain
MTSTDLYLFVNNSSKARGLCLLENTLAFEGSERGIDGGRRSKPVVESDGTDGDQHAGGQASGGSTTGGRRGINVGCFRQSFLALPPDCRVSASYSHSISRMLSGVRSAARKRLFRSDPAELLGVANWSETGGGGAGGHQHWWTALENNFVLEATDDEYGGVVVDADRLPADRAAFARSLAASLSYWKSVGKKGVWLKLPVDLAEFVPLAVKEGFKYHHAEEAYLMMTYWIPDEPNMLPANASHQVGVGGFVINDQMEVLVVQEKYRGSSLDGVWKLPTGFILASEEIYTGASREVKEETGVDTEFVDVVAFRHAHNVAFHKSDLFFICMLRPVSSEIKIDETEIQAAKWMALEEFVKQPFIQEDHMFQKIMDICIQRLRKCYCGLTPHHVVSKFDDRTSTLYYNVAEPEDVNCSAA

SEQ ID NO: 57842 - protein, 103 aa, Zea mays
  Coding DNA Sequence Number=SeqID_16063
MAGQRPHYRFGLLSASRSSWYGCFCFPLPGRAHVTDGDVLVPRIGHAAHMGASPCACESGAVPWKQVVCPPAARPAARGPHERHGGGHGSRRRRRAPTRQHVG

SEQ ID NO: 57843 - protein, 84 aa, Zea mays
  Coding DNA Sequence Number=SeqID_16064
MTIRSTRAPLFLIHQPARAASEIPTPIIQIHVTFCYKQDKLSFVTFGTFEDTSRPEYGQYDPIILSDLTNRFLTRNNLQNQYKT

SEQ ID NO: 57844 - protein, 334 aa, Zea mays
  Coding DNA Sequence Number=SeqID_16065
  Gene Ontology: Mol. function=transcription factor activity; Cellular component=nucleus; Biological process=regulation of transcription, DNA-dependent
  Homolog annotation: Hit_ID=Q949D2; Match level="QueryCoverage=34%, HitCoverage=40%, E-value=1e-12, Identity=39%"; Hit description =Putative ethylene responsive element binding factor
  Pfam annotation: Domain name=AP2; Domain location=151-194; Score =32.9; E_value=1.1e-07; Accession=PF00847.10; Description=AP2 domain
MAFTGDADGFALDFIREHLLGAGCGGDPDPVHCTVDLDGDDITFPVLPPPQPEFEPMPFLPPPPPPPQHQHQGYIGVDPTNEYMGEPAAVFPEQEPAPPVIITFGSEPSSPVKQPLTIAVPPRPYYASAAAATAPTAAQLVAAAAEAVEDFRKYRGVRQRPWGKYAAEIRDPEAAGLARVARHAILNFPNEVGTRGADFWAPPAPAKKADTAAANKRKRQQLVEDADGDDVEVVAVVVSKAAKVVDEIPASSPSQDQTSCTSRSSSVSTRETTATASSTVTSAAEETGSGAVGLPMTPSSGNWEQYWEALLGSLPLLSPQSPLPALGFPQLTVT

SEQ ID NO: 57845 - protein, 188 aa, Zea mays
  Coding DNA Sequence Number=SeqID_16066
  Homolog annotation: Hit_ID=Q9SDL2; Match level="QueryCoverage=20%, HitCoverage=6%, E-value=6e-14, Identity=94%"; Hit description=NADP -dependent malate dehydrogenase
  Subcellular localization annotation: CTP_CleavageSite=45; ConfidenceScore=5.10e-01
MPQLPSFHPRAPSILVKPPSSQIPRSLRARLWIPNDVDPVPPAILAAIVAPAPSMESNTTRLMAYPAPSRPRKARPQSPAPSASRPTPTAAPVLLRPGAPVEGTSPPSFRPIRARSPCLRYLCVEGKRVHGPGADIDTLCVSPRHATQNERNDRLFYKLLIDNVEELLPVVYKPTVGEACQKYGSIFR

SEQ ID NO: 57846 - protein, 132 aa, Zea mays
  Coding DNA Sequence Number=SeqID_16067
MVGSYLLQEHLVEGALEQRLGLDERPMALEIAGAPSLDVRGQGGRGGSAGSARTGVSRGWKVREDGRRAAAACGAASGTRGGFGRERAGADGCDGARGALQLGGRRYFLRDGEVTRDEAEAITGESGVTGEG

SEQ ID NO: 57847 - protein, 73 aa, Zea mays
  Coding DNA Sequence Number=SeqID_16068
  Subcellular localization annotation: CTP_CleavageSite=43; ConfidenceScore=5.14e-01
MEIPYDKSDRDLFHTSTIVTAGLQSASQLVQPKPFTNYSSRCRFATGAAWAAARSLSPIMPIVCNPALQHVIQ

SEQ ID NO: 57848 - protein, 185 aa, Zea mays
  Coding DNA Sequence Number=SeqID_16069
MTNILLERSINNNTFVTIVKVWEVIIITIDTIITMITMIILLSSSNLEDEDIVVAKITRVDDEHETSDEERSDGQVVKLQHHNLFHTFFIVNNYCVLTIIDGGSCNNLVNVDVVKNLGVFSSERPPGFPPLGGINDEILLRMTSIQKGDDEDITISKEALKGHDNALDKGWDKHLISLSPTHIRL

SEQ ID NO: 57849 - protein, 130 aa, Zea mays
  Coding DNA Sequence Number=SeqID_16070
MTNIQMQHQTFFYLPDPRGESGSYPTDCRMVLVEGMKAGESRTDTGVDYQTQEDDNDDEDFYGSCSQSTDGTASTPCPPPALCYCSPETLTRFESTFFHHARQRLGFGRPESALKSNTTKRDRKLSPLAC

SEQ ID NO: 57850 - protein, 158 aa, Zea mays
  Coding DNA Sequence Number=SeqID_16071
  Subcellular localization annotation: CTP_CleavageSite=19; ConfidenceScore=5.31e-01
MSQAVGSATSTPGAGDVMTAAAAKAKSHRGVPPVTVSNGIGERDESSKSCADVDLATLCTQKTPLLSFDHVVFESDASVNEIIRIVSILRLLLLFYYKYTQHGRERSRGQAGTHCQAKVMGMRATEVKRRQLLQLQNQVLGLKKSKDEYESNDSDEGC

SEQ ID NO: 57851 - protein, 85 aa, Zea mays
  Coding DNA Sequence Number=SeqID_16072
  Homolog annotation: Hit_ID=Q10NP6; Match level="QueryCoverage=47%, HitCoverage=14%, E-value=9e-07, Identity=80%"; Hit description =Splicing factor 3A subunit 2, putative, expressed
MEGPQQPSIRGTPRKKIQLSAETINNFSSRTAQSVHNVPDATQQRGELPGKRRQTNLAKCAACEAKDVPAQPLPNKVKIAPKSGA

SEQ ID NO: 57852 - protein, 425 aa, Zea mays
  Coding DNA Sequence Number=SeqID_16073
  Homolog annotation: Hit_ID=Q6K4N7; Match level="QueryCoverage=21%, HitCoverage=32%, E-value=7e-37, Identity=79%"; Hit description=Amino acid transporter-like
MALSTLRRSRLPVERHEKNHEILLRCIKENLAYKDGKRIAACIIYKCLLHWRAFESERTAIFYQVIEAINDVLKVCHQYKINLRFSILVPLQGNEVDASGVMATLLVFLSVGLVGATDGIGFHLTGKVVNWSGMPFAIGIYGFFYSGHSVFPNIYQSMSDHSKFSMALFICFAICTAIYGSFSVIGFMNIAFLLPFFDSTVKSGEPMKAKGEIKVGILDKLVVDKEKKKSDAPNEKIEGYGESGHDKHEVKSLAESVGPPNIAIFYSEFMDSGPLIHNKESCSTCSATDRCSRTRTAKCPLSSKESVSTNSHLVFDSGKNHLELNNHSVTDSERIYDGLAKSLDRYIRGNGETLANHPKKREKTDIQKTLAVWHHSSIVVVRQQAEQRWVAPPRGAADARWCVTPVDAIAENAVSHGVESEGDEV

SEQ ID NO: 57853 - protein, 147 aa, Zea mays
  Coding DNA Sequence Number=SeqID_16074
MEDFARAVEDMAQGVVAARAPRRGAAAAPAAFEPSLIMGNFMMLSMVDIEHFSQTTSDSRTLAFLSRHDDTALGVGPSTTVKSSSRSMQEMFADEKVEEDKGDEDEVEDAPLTQPSQPTPWRRQPHDPYTPDTNALRAKGKDKTRRK

SEQ ID NO: 57854 - protein, 58 aa, Zea mays
  Coding DNA Sequence Number=SeqID_16075
MKAANEKRAQEAKEMEMARAEKPMLGNLVGHLCAKIGCIGNYIADEARARYVEEKWQR

SEQ ID NO: 57855 - protein, 214 aa, Zea mays
  Coding DNA Sequence Number=SeqID_16076
  Gene Ontology: Mol. function=DNA binding; Cellular component=nucleus; Biological process=regulation of transcription
  Homolog annotation: Hit_ID=Q6Z1G9; Match level="QueryCoverage=90%, HitCoverage=76%, E-value=1e-37, Identity=54%"; Hit description =Putative development regulation gene OsNAC4
  Pfam annotation: Domain name=NAM; Domain location=22-163; Score =103.8; E_value=5.1e-28; Accession=PF02365.6; Description=No apical meristem (NAM) protein
MAAEGAPVLVRHAGGVEELRQLPPGFRFRPTDEELVVQYLRRKALGAPLPAAVIPVVRDLYSLDPWDAVDVPAAPDASSQGERYFFAVRPAGGVGSARRATASGRWRPAGKEKPVALPRPCGGGSLLVGVKRAMAFVPRRKKKKAAAAAALAIGWVMHEYRLAAPLHKHFVLGHPGLQPGPGSGRVGRLPRLPEGQRQAEEEEATTGVTVTVVR

SEQ ID NO: 57856 - protein, 126 aa, Zea mays
  Coding DNA Sequence Number=SeqID_16077
MAPKKATSKATTSIDNTEKAALLTEKKGKIALADDIPMRPLRMRQSTASDIARRIHPPQTAPFTHAALRDYLGHHRQKQKEILGAKRQRITMQAKVRQMILDEEQKDKELEQQIADMQGEGHHQLQ

SEQ ID NO: 57857 - protein, 77 aa, Zea mays
  Coding DNA Sequence Number=SeqID_16078
MEVKLKRWYRRQESKEGAVGSLRAGPVARGGHAAVPTPHVRGSRSSGGMGMERDTQTQSWIGENIFESDALRTRPHA

SEQ ID NO: 57858 - protein, 163 aa, Zea mays
  Coding DNA Sequence Number=SeqID_16079
MERTEERQIHRSSTPEFIEEEGEALGNGDTVTDDVPRTEHPGSTAADGQHLDVDGSWVPLCLVEAVRGVDGRRSTGRRSEAASARDPRGEPRGDRARASGGDETRGRLAVGSCETCKTSLVFEKEFRIDGIEERERDDKSKESKCDVEKPAATESSKPKIVLL

SEQ ID NO: 57859 - protein, 177 aa, Zea mays
  Coding DNA Sequence Number=SeqID_16080
GSRYDVAQTPDSGQSPEPPGTLPGVGPLLPPSSLFPSEEMEQLVGVHHQHHSLSPRAPSTPTCPQPQPHPLLHHLPSNRFRDQLLWRGVRMDCEQMHRAIGIKSYLSGTIIRGTLKTPNSQLGSDTALSSADDLRLARPRGSDSASEWLHRSSDGHDVTLVGFQDLSGCHIGMYSGH

SEQ ID NO: 57860 - protein, 226 aa, Zea mays
  Coding DNA Sequence Number=SeqID_16081
  Gene Ontology: Mol. function=nucleic acid binding; Cellular component= intracellular; Biological process=DNA integration
  Homolog annotation: Hit_ID=Q8H6I0; Match level="QueryCoverage=99%, HitCoverage=14%, E-value=6e-93, Identity=72%"; Hit description =Putative gag-pol polyprotein
MSGDHAKKEMVTGEKPAKSHGKAPSGESYNKGKGKEKESPSHKSRRSGDKKKMRKVVYYETDSSSPSTSGSDTSSVTSKRHERKKFSKIPLRYPRISKHTPLLSVPLGKPPTFDGEDYARWSDLMRFHLTSLHKSIWDVVEFGVQVPSVGDEDYDEDEVAQIQHFNSQATTILLASLSREEYNKVQGLKNAKEIWDKLKTAHEGEEVTKITKRETIEGELGRFRLR

SEQ ID NO: 57861 - protein, 163 aa, Zea mays
  Coding DNA Sequence Number=SeqID_16082
  Gene Ontology: Mol. function=glutathione transferase activity
  Homolog annotation: Hit_ID=O24595; Match level="QueryCoverage=76%, HitCoverage=56%, E-value=1e-70, Identity=100%"; Hit description =Glutathione transferase
  Pfam annotation: Domain name=GST_C; Domain location=41-137; Score =64.7; E_value=2.9e-16; Accession=PF00043.15; Description=Glutathione S-transferase, C-terminal domain
MAEEKKQGLQLLDFWYLDEAFPEAAPALLPADPYARAQARFWADYVDKKLYDCGTRLWKLKGDGQAQARAEMVEILRTLEGALGDGPFFGGDALGFVDVALVPFTSWFLAYDRFGGVSVEKECPRLAAWAKRCAERPSVAKNLYPPEKVYDFVCGMKKRLGIE

SEQ ID NO: 57862 - protein, 155 aa, Zea mays
  Coding DNA Sequence Number=SeqID_16083
  Subcellular localization annotation: CTP_CleavageSite=64; ConfidenceScore=5.67e-01
MCHSCRLPASSTFPGNTATSLTWIRRRNLHCPAMSPTRVGFWRNPARQAARAAQRSAHAAAAARAAAEAREELEERAVVAVREDGAAARSAAVARPTPARASASRRVRHHPYSRASRQRGVKLRVPSDDEGEVVGPAKVEEGDNKVMKNEDAMKP

SEQ ID NO: 57863 - protein, 974 aa, Zea mays
  Coding DNA Sequence Number=SeqID_16084
  Gene Ontology: Mol. function=zinc ion binding; Cellular component =nucleus; Biological process=anti-apoptosis
  Homolog annotation: Hit_ID=Q10CF1; Match level="QueryCoverage=93%, HitCoverage=94%, E-value=0.0, Identity=73%"; Hit description =Expressed protein
  Pfam annotation: Domain name=zf-C3HC; Domain location=102-242; Score =200.8; E_value=3.2e-57; Accession=PF07967.4; Description=C3HC zinc finger-like
  Subcellular localization annotation: CTP_CleavageSite=41; ConfidenceScore=5.35e-01
MAVARSSSPPHTPVARFSAVGAVAWLGNRGLSARIGGEGVGSASVGASSPAMQTNVASIDWLGGKQASRVDSSSQVAAHAYHPSHSFDAAGTAMDSAPSCRPWERGDLLRRLATFKPSTWASKPKAASSLACAQRGWVNVDMDKIECESCGTHLIFNALTSWSPVEAVLQVTFLCSATNFANAGESFAEQLDAAHQNSCPWRGNNCADSLVQLHLTQSALIGGFKDRCDGLLQFTSLPVIAPSAIENMKLTRSVQIDHLLSQSITFLSGILGCRAESTAGIDIHQDFSCSYSQAQKLISLCGWEPRWLPNVQDCEENSTHSAKNLPSVGPDERLYPHFVEHNKNSFSASAKKDKGKGKLPVGDSGCSMRSPLLDCNLCGATVRMRDFRPVLCPSRFSPNNIVVPGTGRKLTLTHGVSAASGINEWVTDGVERGQDEGRDEAATNEGKPLSLVGVDLNLTMAGGLPSPQSAMPAMSERFNNGGMGRDLMIGQPTGSEVGDCETSYESRGPSSRKRNLEEGGSTADNPQDRLQHADSIQGNFIDRDGEEVDDAAQDSDVPNKKSRGFDLFDAYRPSSGAGPSRNLSFGPHEDAGMFSHSRAIDLAAVERPTARDSLRASSVIAMHTIHTSEEDSMESVEYYPGDGNDIDMPSSSTQRNIEMNDALDLNYSNQAQQSANAHAGAGSDAREIGGSSTNEGEEVINAETVPPFGRDQLSLGISGGSVGMGASHEAEIHGNAGSLHRTESVVGDAEPIAELTETMGQTGESAPGPGLMDEFVPEVDRDEPHGDSQDTVSRSVGQADSGSKIYGYTKADSVESGEKIGHATGNGSSMRPSLSCNAGMCAGFDLSKDDVTHTGKILTTDDALMGLDYDPGNGLGATNGENDYESGLLEFDPVKHHNTYCPWVNGNVAAACCNNIGSSSSSSAPSGWQLTIDAVDTYQSLGQAQNQIMQSDSAASLYMVKLAHLVMQLCLENL

SEQ ID NO: 57864 - protein, 166 aa, Zea mays
  Coding DNA Sequence Number=SeqID_16085
  Homolog annotation: Hit_ID=Q10CF2; Match level="QueryCoverage=85%, HitCoverage=68%, E-value=3e-63, Identity=85%"; Hit description =Expressed protein
  Pfam annotation: Domain name=GLTP; Domain location=4-164; Score =117.7; E_value=3.4e-32; Accession=PF08718.1; Description=Glycolipid transfer protein (GLTP)
MVVMISFNSFSVHGFWLVISNQNYEVDDLVEASKSISTLPSMVERDIQTDTVRKPGSHTRNLLRVKRGIDMVKVLFEQILVTEGNSLRDAASVAYAQVFAPHHGWAIRKAVSAGMYALPSKSQLLKKLNEDEESAKVQMQNFVRSSAPVICYVDDLFTSRNLGIDW

SEQ ID NO: 57865 - protein, 38 aa, Zea mays
  Coding DNA Sequence Number=SeqID_16086
MEIDGEVEEMTHGAHLYNGSAGLPIVKGSTGSLQQSCN

SEQ ID NO: 57866 - protein, 41 aa, Zea mays
  Coding DNA Sequence Number=SeqID_16087
MAVMEQTMTGWLGQARGEGTARTFVELGHVKHIVDIRHGFW

SEQ ID NO: 57867 - protein, 122 aa, Zea mays
  Coding DNA Sequence Number=SeqID_16088
MTSAACARGQGSSDHLKRRPAHRRDHRDLPDVTDHPIGALLPPVSLAAVIFATVTVSASQGSWVRFRLSLGGFVQDCNLADGEYILVPEQGVAQEVAPDPAPEPAIEDLPAPALEGKPQFYA

SEQ ID NO: 57868 - protein, 74 aa, Zea mays
  Coding DNA Sequence Number=SeqID_16089
MKQEHLHLAMVHSYSSLSQLDSTNWCSCCWMANDNPSLHPVVFRLSNISVCSQRLEPLQVHLALVTNQQIHNIS

SEQ ID NO: 57869 - protein, 111 aa, Zea mays
  Coding DNA Sequence Number=SeqID_16090
MVLEELACVEDCLHVLSIEHPILFAAIDLVCDHLGVFQSREVSTRTPWMAFVSGRIHKLEATTFRLGVLYASVAACPLGFTVLENLKKSGWYTRWVHPMGACLVKDVHRVV

SEQ ID NO: 57870 - protein, 123 aa, Zea mays
  Coding DNA Sequence Number=SeqID_16091
MTGAIALHPLYCKTKARLRRSLLVPRPHLTRRPTWDSAHCNGPRADKHVTGLICNSFSVMAVCDLPLWKYSEDSPGTRGYLRTCIRKGEAQKIRRLTQCRSCEAGKLRHVRRKGNRLKDEKAI

SEQ ID NO: 57871 - protein, 102 aa, Zea mays
  Coding DNA Sequence Number=SeqID_16092
MGAGLVGGLLPIISALPDALLMGHRAKAIVVVYKFDLGALNENVEGNIGKNYVAIISSLDSGKRRVIDASRRFYNFSLAVMFEYLDDNDILNKISEFQEHIV

SEQ ID NO: 57872 - protein, 470 aa, Zea mays
  Coding DNA Sequence Number=SeqID_16093
  Gene Ontology: Cellular component=membrane
  Homolog annotation: Hit_ID=Q10MF7; Match level="QueryCoverage=50%, HitCoverage=30%, E-value=1e-119, Identity=84%"; Hit description =Expressed protein
MGPPFFLLFLVLTAAAVVSSAPRREAFRRDPGHPHWHHGAFHDVEDSVRADVRRMLHTRAEVPFQVPLEVNVVLIGFNGDGGYRYSLDGHKLEEFLKMGFPLHRPSCFETGEPIDIEHHIMYNVISAGQPELISLEKSLKEAMQPAGIARDSEYGRELPLFEVEATAVESIFQRLYSFIFDMEPGYPANDMDRPVPVAIFIVNFDKVRMDPRNKEVNLDSLMYGTIGGLTEQELKKQEAEYIYRYRYNGGGATQVWLSSGRSDSKSNLGKTNKHCHFEVQAAARVLGGSRRSKQAACRQCQGHAVEYRDVCHLGQFFHAEWLVLGEIKGKEGRGCEKLHHVPQRRPHWASHLPIQEHFLLATSRRASGRGKGGADQDRLGDALCGAGVMAQMGMGALAIAAVGDCITAWTEKSEPMGHLCQPERLVGAAPDGSAVALKGRAAQTHGLPRLECSIGLNVLTGVHASKGNRI

SEQ ID NO: 57873 - protein, 323 aa, Zea mays
  Coding DNA Sequence Number=SeqID_16094
  Homolog annotation: Hit_ID=Q10NB9; Match level="QueryCoverage=9%, HitCoverage=4%, E-value=2e-09, Identity=96%"; Hit description =Protein phosphatase 2C containing protein, expressed
MAVVRERVRRDGGGVRVTGEAWVLGDAIAHFVSLGFGFWGSASGGDGRVDLLGKGGRLYEGYHAHPMGDAKNNTSSSSCEERQVVRQDQSKDVHEGGENINDKEVVGECYYSSEKSSDDDNISTQYSLDDDCSCSSYESEASTSPSSPHCFMSQGDRKDKIQVVSYKASSGQLTIKRKHLSTIISLYKWCQEICHIGGVHKNDQVPSSGIIFASDVNLPKALVQPFYASDAKDDLKSGIHSTKSCGQLPKSGIFVMKELVAYETQQDTMWLARQDQETWLGYVELGCQCGLQVEGLDVIDRVRVKLEQGLSMDIFDDEEQAKI

SEQ ID NO: 57874 - protein, 384 aa, Zea mays
  Coding DNA Sequence Number=SeqID_16095
  Gene Ontology: Mol. function=protein phosphatase type 2C activity; Cellular component=protein serine/threonine phosphatase complex; Biological process=protein amino acid dephosphorylation
  Homolog annotation: Hit_ID=Q10NB9; Match level="QueryCoverage=99%, HitCoverage=62%, E-value=1e-151, Identity=68%"; Hit description =Protein phosphatase 2C containing protein, expressed
  Pfam annotation: Domain name=PP2C; Domain location=7-351; Score=49.8; E_value=9e-12; Accession=PF00481.12; Description=Protein phosphatase 2C
MAGEDRFHVAVSEEHGWVFVGIYDGFNGPDATDYLFANLYVAVHNELKGLLWDGIQAGDSARCGEQEAGAGNAERLCIAQADGDGAEAKRRRTEVPMPGNSATPVHRDVLRALARALKKTEEAFFAAAEERAAESPELGLMGSCVLVMVMKGTDVYVMNVGDSRAVLARRPEPDLKNVLGKASQDLQQFKVEIMRELEAHDMDGLQAVQLTPEHSTAVQEEVTRIKGQHLNDRNAIVNGRVKGKINVTRAFGVAYLKQPKWNSRLLEAFKINYVGTDPYVTCAPSLCHHRIGSQDKFLVLSSDGLYQFFTNKEVVDQVEAFTAAEPDGDPAQHLVGELVNRAARKAGMETRQLLDIPRGARRHYHDDVSIIVISFEGRIWRSSV

SEQ ID NO: 57875 - protein, 561 aa, Zea mays
  Coding DNA Sequence Number=SeqID_16096
  Gene Ontology: Mol. function=DNA binding; Biological process=DNA integration
  Homolog annotation: Hit_ID=Q10NC3; Match level="QueryCoverage=99%, HitCoverage=100%, E-value=2e-36, Identity=53%"; Hit description =Expressed protein
MQDRMRRQGQYGEADINSMVAAQLHHYQAQQRFCSFMLTVSDTAQGAGGAQSFYDGQRSDTKVGLEKQPSKESREQPRTERTETRYENYNLPRTFEGLEQSFHEDIILLSKELQEAEDAENSRHMEEAEVAAAERLVTVRTPRAPNPASKPAPHSLYEALLLHEVVVLTNLHLQAINVQNIRTLVPIVFELNSHQFALKDHALWDDLSPAFSDWVRMYCMVKSWLYSAISLELFDIMQRDLSFTNYCRCLKGMANALEDLGKHVPDRTFILTMIRSLNDNVLFRCLLPVRCSSLHNPWDQPVQPVLGAFLLTIGRANRPQYMLDILDRAGMADCKPCSTPVDTKPKVPADSDSVQDPTQSTCLPTPFSISPKHIEFDLHFVRECVALGDTKVLHTSTTSQFVDIFTKGFPGSVLDEFRSNLNVNSAAASVVGRLKDINTQYQEKLLALRARQANYRDEFLRKESLARQQQYQHASMSHYASNSTAGEQHGYNPTAAGTPPVAAGGAYGEAHRGYASGQYESFSDRPDYPEFHDGGRGRGRSSEQRAQYPGGRAYNSGGRRF

SEQ ID NO: 57876 - protein, 405 aa, Zea mays
  Coding DNA Sequence Number=SeqID_16097
  Gene Ontology: Mol. function=protein kinase activity; Cellular component=chloroplast; Biological process=protein amino acid phosphorylation
  Homolog annotation: Hit_ID=Q10NC1; Match level="QueryCoverage=98%, HitCoverage=98%, E-value=1e-180, Identity=81%"; Hit description =Protein kinase APK1B, chloroplast, putative, expressed
  Pfam annotation: Domain name=Pkinase; Domain location=83-396; Score =144.6; E_value=2.6e-40; Accession=PF00069.15; Description=Protein kinase domain
  Pfam annotation: Domain name=Pkinase_Tyr; Domain location=83-396; Score=132.4; E_value=1.2e-36; Accession=PF07714.7; Description =Protein tyrosine kinase
  Pfam module annotation: Pfam domain module=Pkinase::Pkinase_Tyr; Domain location=83-396::83-396
  Subcellular localization annotation: CTP_CleavageSite=64; ConfidenceScore=5.69e-01
MGNCAGVEGNAEINPSFSAPNSSGTAGSKSVSKNAADTSTFGTKTSGSSSSVPPTPRTEAEILESSNVRKFSFGELKGSTRNFRPDSLLGEGGFGSVFKGWMDERTLAPVRPGAGIIVAVKKLKLDSFQGHREWLAEVNYLGQLSHPNLVKLIGYCLEDEQRLLVYEYMPRGSLEHHLFRSRLSLECFVRDIPPFLASRFMKKRTECYGVAGGSNFQPLPWNLRMKVALEAARGLAFLHGDQAKVIYRDFKTSNILLDSEYNAKLSDFGLAKDGPSGDKSHVSTRVMGTQGYAAPEYLATGHLTAKSDVYSYGVVLLELLSGQRALDKNRPPGQHNLVEWARPYITNKRRVIHVLDSRLGSQYSLPAAQKVATLALQCLSMDARCRPGMDQVVTALEQLQRPRAH

SEQ ID NO: 57877 - protein, 119 aa, Zea mays
  Coding DNA Sequence Number=SeqID_16098
  Subcellular localization annotation: CTP_CleavageSite=25; ConfidenceScore=5.08e-01
MAVADYPAFAAARPTSGNPTSANLRESHIRHKPRRRKPRHKPPACPPHCDTRPPIRKPPTFAILKPANPSVNRAAAIAMPRTARRMPHALHDPWNPAAAPEQTPPQSVHRVPEQSRASC

SEQ ID NO: 57878 - protein, 97 aa, Zea mays
  Coding DNA Sequence Number=SeqID_16099
MGGARAGARQASVVEVVDVACVVEGSRVGQGGSWSSPPPDSVTFVVRTILHRLLTCYMIMSKGSDLMCVCFLQMSDNRRRGGRRAQQEQQAPQDEAP

SEQ ID NO: 57879 - protein, 103 aa, Zea mays
  Coding DNA Sequence Number=SeqID_16100
MMPIRTNTFSKSQIAEFENKGEQGKRGAKIFNDTHPKYPPPQKRWKPKAAKATQAAAKIENKEMLAQFPTADYTIIKDDEPVVAQFDFGPKEVVFTKHIIPTL

SEQ ID NO: 57880 - protein, 67 aa, Zea mays
  Coding DNA Sequence Number=SeqID_16101
MDTTDPSSIPLTLLLMTDSSGATYQPLILFLNSGSYAGPTSIAGCLEEDDGGLFPPLAAIEEGEICG

SEQ ID NO: 57881 - protein, 89 aa, Zea mays
  Coding DNA Sequence Number=SeqID_16102
MAYDLLTRDGQRVKPITAHSGSGMVVRDCHDVGGTLALQLPLLARTHWRPRWATSQGRPRKIRAHVLWTRESAPRWRRSVAVNATFTGR

SEQ ID NO: 57882 - protein, 165 aa, Zea mays
  Coding DNA Sequence Number=SeqID_16103
MACSGSMELEKVEQYLLLSWIPGCEVLFVFRIEKMITRSEDAERRNHQLHVELTTAQARVAALESHEVIVIESLEQAKDEHMEKLIEPTWSPTTNAMYNQEHPEPSQDPSPELFEPLTMKKIPTLIVEVKGEALSTPPAPTPSEVNLELQEPVPLGEEYNLIMSS

SEQ ID NO: 57883 - protein, 74 aa, Zea mays
  Coding DNA Sequence Number=SeqID_16104
  Subcellular localization annotation: CTP_CleavageSite=63; ConfidenceScore=5.40e-01
MAASMAQPATSSTMILSLIMSSANARFKKLLNNFDRKKCVCFCFLKTKSSDYRSIYGSYRSIYGSIKGYDPQFR

SEQ ID NO: 57884 - protein, 172 aa, Zea mays
  Coding DNA Sequence Number=SeqID_16105
MAPAVGSTGRDRVARRGLKRPDSSGVDGQDGDGGLVQAADRHGAYAEQQGKQGARRAVFIESGTEIAINGERYLHEEKLPRGSGRRERHDSFRMREGGDVHKFIYIYSKSTVWNTVDYFGQEKLFENSPMRRLSRPFRRTVCDTKGQTVRAKGAGRPRLAEQGQQLGSVWWL

SEQ ID NO: 57885 - protein, 101 aa, Zea mays
  Coding DNA Sequence Number=SeqID_16106
  Subcellular localization annotation: CTP_CleavageSite=23; ConfidenceScore=5.09e-01
MPEGAYKCLWCAAVHPSLRLTLRAKTPTPTSSTPPAITARAWLPWLALPIDPQPRPSPWTASPRGGESFSKLELRHCLTGEASATSPDFGRPSPRVDRVTR

SEQ ID NO: 57886 - protein, 92 aa, Zea mays
  Coding DNA Sequence Number=SeqID_16107
MGSPRAQAVRLAGGACSGLLMAVESNQSAWGAWEVSDVVGERNWRIAHRVTWSTRGGGRPKSGDVALASPVRQCLSSSLEKLHSLSRKPSRG

SEQ ID NO: 57887 - protein, 42 aa, Zea mays
  Coding DNA Sequence Number=SeqID_16108
MEDLEAIVGGEMLMYLWTMEARKLDINVWHATDIAGRPIFVP

SEQ ID NO: 57888 - protein, 128 aa, Zea mays
  Coding DNA Sequence Number=SeqID_16109
MRHPISCLHRHPNDSGADVLHAHPSSASNWADSSSYAASTTATSTSTIDADALDAKGQACEAHERGPYDSEEGGAPGTEAGTHVRQAIVTVSKAQGDGRPKAQDEWTESVCEYPKSSCQWKDWKSKKT

SEQ ID NO: 57889 - protein, 248 aa, Zea mays
  Coding DNA Sequence Number=SeqID_16110
MPGDAGADHGGGWVWSTATLRRCAEDDSGDQGIAPTPYPMRIDAIALIREPPRCPALLSSSLRRRLLPQAHPCARFSHQMHVRPLPSDALALAVSPADEAFALHEVLVRHRRGLEGDPIIQVSFSPPCSTATCLLECRCLLDHRITNITTRIADLTTHVLLLVAYTTLHSHYTSVPRAMKVSCNCAQVDVGLSDSSYARGMCPVAHPLAIPEEQADKRRNQENPPTPHQNAKPQQVPSVPPPPSRAAD

SEQ ID NO: 57890 - protein, 38 aa, Zea mays
  Coding DNA Sequence Number=SeqID_16111
MASMRIGCAQIQRWFDYLIIYACANRLKLTVGWGWRRF

SEQ ID NO: 57891 - protein, 94 aa, Zea mays
  Coding DNA Sequence Number=SeqID_16112
MACGGLHIRVLLPGIQLTPSSSGPPRYEGVVQLRTGGCGPQRQQLCEGDVPSGTSTESLQPPLVSLVPKWQGCNLLPNLLYYKGFELGGGATAA

SEQ ID NO: 57892 - protein, 64 aa, Zea mays
  Coding DNA Sequence Number=SeqID_16113
MPGDAGADHGEGWVWSTAALRRGRPLPSDALALAVSPTDEAFALHEVLVRHCHGVTDLQADPTL

SEQ ID NO: 57893 - protein, 50 aa, Zea mays
  Coding DNA Sequence Number=SeqID_16114
MGYFSCSGSEAAAQPMPTDGCVREQVRAVLAARGREQRKGGASVGVWCET

SEQ ID NO: 57894 - protein, 173 aa, Zea mays
  Coding DNA Sequence Number=SeqID_16115
MFLPVAQRRLPQVRRLPCRFHSLVLQLDDDVADLRTLVGRLASRASMEAVAEAATRLDRVLVSLSGLLDHPQAQDPLRRLSPSPFAERMTSSASPTRTAASATPWSRSPHSRPRPAPRCAGRSRPASRRLRARCAGVVACLLFYFDMPARFPFFFYACQLQKNIAFGVTIRLQ

SEQ ID NO: 57895 - protein, 341 aa, Zea mays
  Coding DNA Sequence Number=SeqID_16116
  Gene Ontology: Mol. function=DNA binding; Cellular component =mitochondrion; Biological process=DNA integration
  Homolog annotation: Hit_ID=Q9ATW2; Match level="QueryCoverage=84%, HitCoverage=99%, E-value=1e-153, Identity=90%"; Hit description=RIRE gag/pol protein
  Pfam annotation: Domain name=rve; Domain location=53-212; Score=98.1; E_value=2.7e-26; Accession=PF00665.16; Description=Integrase core domain
MAHRTVRCATGHCPGFYWPTAVADATRIVRTCQGCQLYARQTHLPAQALQTIPITWSFVVWGLDLVGLLQKAPGGYTHLLVAIDKFSKWIEVRPLNSIRSEQAVAFFTNIIHRFGVPNSIITNNGTQFTDRKFLDFCEDHHIQVDWAAVAHPMTNGQVERANDMILQGLKPRIYNDLNKFGRRWMKELPSVVWSLRTTPSRATGFTPFFLAYRAEAILPTDLEYGSPRTRTYDDRSNRTNREDSLDQLEEARDMALLHSAWYQQSLRRYHARGVRSRDLQVGNLVIRLQQDARGRHKLTPPWEGPLIIAKILKPGTYKLANSQGEVYSNAWNIRQLRRFYP

SEQ ID NO: 57896 - protein, 193 aa, Zea mays
  Coding DNA Sequence Number=SeqID_16117
  Gene Ontology: Mol. function=pyridoxal phosphate binding; Biological process=amino acid metabolic process
  Homolog annotation: Hit_ID=Q2JIS3; Match level="QueryCoverage=71%, HitCoverage=50%, E-value=3e-18, Identity=32%"; Hit description =Aluminium resistance protein
  Pfam annotation: Domain name=Alum_res; Domain location=45-192; Score=- 125.1; E_value=4.5e-09; Accession=PF06838.2; Description=Aluminium resistance protein
  Subcellular localization annotation: CTP_CleavageSite=34; ConfidenceScore=5.32e-01
MTATASCFSSPVAWARPRAGPAGASAALRVGRCPAAAVAAHDVAFHPDVSRAADSLQAEFRAVDRAIALNSSRVAAAFRRARVAPHHFGGSTGYGHDDGGGREALDSVFADIVGAEAAIVRPQLLAVAGPPYDTLEEVIGIRGSANVGSLKDFGVTYREVPMQNPNCMVMVDNCYGEFVEISEPAMVVKSSLR

SEQ ID NO: 57897 - protein, 568 aa, Zea mays
  Coding DNA Sequence Number=SeqID_16118
  Gene Ontology: Mol. function=signal transducer activity; Cellular component=membrane; Biological process=response to light stimulus
  Homolog annotation: Hit_ID=Q1EPH5; Match level="QueryCoverage=78%, HitCoverage=73%, E-value=1e-126, Identity=49%"; Hit description =Nonphototropic hypocotyl 3 (NPH3) family protein
  Pfam annotation: Domain name=BTB; Domain location=28-139; Score=2.7; E_value=0.0023; Accession=PF00651.21; Description=BTBPOZ domain
  Pfam annotation: Domain name=NPH3; Domain location=217-430; Score =237.1; E_value=3.7e-68; Accession=PF03000.5; Description=NPH3 family
  Pfam module annotation: Pfam domain module=BTB::NPH3; Domain location= 28-139::217-430
MAAPATRVIGSKPADCFQFQDPNTWTCVSELASDVVVEVGDTSFHLHKIPLTSRSGTLQKLVNESTGDGSKPCTVRLDDVPGGAEAFLLAARFCYDVQTELNAGNAVPLRCAAERLAMTEDYGEGNLVEQAESFLSEVLAGWSDTVRALGTCDDAVLPAAEDLLIVQRCIDSLADKACADPTLSGWPMLEYFTAKSLEETAIWTGIGAAGRPRSPGAGWWYDQASSLPLPLYKRLIAAVRSRGMSPENVAGSLMHYARRHLSGLRRLGDNSDGSSRGGAAAVLSGGDQRTLLEEIVAMLPVEKGVAPTRFLLGLLRVATFMMTTPPAFAVLPETTDEGQLVDAPPGELMPVSSVGKLVDGYLAEVGTDANLKPSKFQTIAALVPDYARAIDDGLYRAIDIYLKAHPWLTDSEREQLCRLMNCQKLSLEACTHAAQNERLPLRVVVQVLFFEQLRLRTTVSGWFFVSDNADQGSSSDNCVLPRRPDDDLDLAARSEVTTDEDGSAAAQHEPSPAMSVAEIHRPGKPKSTLSRLLGKLGLGGRSSSRQRQQQPPLPGASDKRRRSFDFGC

SEQ ID NO: 57898 - protein, 163 aa, Zea mays
  Coding DNA Sequence Number=SeqID_16119
  Gene Ontology: Mol. function=RNA-directed DNA polymerase activity; Cellular component=chromatin; Biological process=RNA-dependent DNA replication
  Homolog annotation: Hit_ID=UPI00004C1733; Match level="QueryCoverage =79%, HitCoverage=9%, E-value=6e-72, Identity=95%"; Hit description =UPI00004C1733 related cluster
MDAGFIKEVFHPEWLANPVLVRKKGGKWRMCVDYTGLNKACPKVPYPLLRIDQIVDSTTGCETLSFLDAYSGYHQIKMKESDQLATSFITPFGMYCYITMPFGLRNAGATYQRCMNHVFGEHIGRTVEAYVFGEHNFLGGALSLTLPPCWKPMPSLMPGRLPL

SEQ ID NO: 57899 - protein, 86 aa, Zea mays
  Coding DNA Sequence Number=SeqID_16120
MVMAMGIRRSAMVVAEADEDRGSFVCMRLVVWSSLFMLIMMAGMGGEGPQWHHFYLCATSTPGLRSPGLSVARRDMGRVDGSRSQT

SEQ ID NO: 57900 - protein, 336 aa, Zea mays
  Coding DNA Sequence Number=SeqID_16121
MATMLRRCMRDLRPLRSLARVPRPIFGEILVLLNAMPGTVLRLQLEMLLRLVIAYGVTVGILEFPHFEVEQGFFRMQCCDAVTGKPIFCESLKLFPAMPDCCNVIGSCVSPTFLKCRSNSTKASPKSSTQNAAPGPQGQPSQSGSNVSKLALGTLVVGAAAIGAHQLGYIDLQFKDKTLPFSLKKEDVGKVVYEDLKIPSEQKVDQTQNMSGPNTEIVQENNNETHTSKDFRNGGVGAPELPINGDQLVPAEEKKSETLAHETNPVPDEPGSDTEMPSEDSPAVDIRTVAIDATESSEVPHEQQTDKIDGTVTPVQSTPTTVSTYDHPTDPDSPKR

SEQ ID NO: 57901 - protein, 167 aa, Zea mays
  Coding DNA Sequence Number=SeqID_16122
  Subcellular localization annotation: CTP_CleavageSite=101; ConfidenceScore=5.58e-01
MVDAPCLLLPSRLRAPVQSSPRPQIFTPRRRVLHASGSSALVSDTAPSRPAEGGSGVASQPAPGFKHRATGNLQRCPTPIAALIPFLTKQSLRCEVSKLVRLTHMSHGCRRSAHPCCSLFKDATFLHCGTVDKADLASVHSLRLLSSTPSTPTCAVRKTNGRRGKIF

SEQ ID NO: 57902 - protein, 201 aa, Zea mays
  Coding DNA Sequence Number=SeqID_16123
  Homolog annotation: Hit_ID=Q6QP51; Match level="QueryCoverage=25%, HitCoverage=23%, E-value=2e-12, Identity=68%"; Hit description =Putative growth-regulating factor 1
MEAQAHTSCNRRAGCYVRATAPPLAPLPRLLDCGTSTATRDDPAYDPTVPARRDGQYGQKWAGSNGGGRRAEAAGPGKGDTPKGILLREGNRSQASLLIRGSKAGPSEGFNSRLRALGLHAHYWSEVRRLAPRKGSTAASGHSGSAPTTDQGFVGWPLERVHSRLRHRARDDPGYVRYITKARATLPRYPRTFPRPAGTIL

SEQ ID NO: 57903 - protein, 35 aa, Zea mays
  Coding DNA Sequence Number=SeqID_16124
MASPGACVRVTSGPRMSAPWWELGRARLNSQIMFQ

SEQ ID NO: 57904 - protein, 165 aa, Zea mays
  Coding DNA Sequence Number=SeqID_16125
  Gene Ontology: Mol. function=transferase activity, transferring hexosyl groups; Biological process=carbohydrate biosynthetic process
  Homolog annotation: Hit_ID=Q8LIF5; Match level="QueryCoverage=34%, HitCoverage=15%, E-value=6e-11, Identity=56%"; Hit description =Putative glycosyltransferase
MKSDNFLFGKVFWAQNRMALSNEQIEAMRHRENRGTIINYIYEKYGMHITVTELKMTPLCIFVQLVERCRLLLQSDDLGMFPEERQAWVHALGGGMDGRAEAVLDLPPRLAATVTARLGGPHPGGGPLVEPAWARRRQRRGPLSGLQVTVISSDEGDEGSLYIFR

SEQ ID NO: 57905 - protein, 138 aa, Zea mays
  Coding DNA Sequence Number=SeqID_16126
  Gene Ontology: Mol. function=transferase activity, transferring hexosyl groups; Biological process=carbohydrate biosynthetic process
  Homolog annotation: Hit_ID=Q8LIF5; Match level="QueryCoverage=56%, HitCoverage=23%, E-value=1e-19, Identity=58%"; Hit description =Putative glycosyltransferase
MRHRENRGTIINYIYEKYVMHITVTELKMTPLCIFVQLVERCRLLLQPDDLGMFPEERQAWVHALGGGMDGRAEAVLDLPPRLAATVPARLGGPHPGGGPLVEPAWARRRQRRGSLSGLQVTVISSDEGDEGSLYIFR

SEQ ID NO: 57906 - protein, 547 aa, Zea mays
  Coding DNA Sequence Number=SeqID_16127
  Gene Ontology: Mol. function=heat shock protein binding; Cellular component=integral to membrane; Biological process=protein folding
MSWGRFSFTPQQGPTLTRRTRVFPAHKPAPRNVVVIDEDDDGDVIIMERAAARGSPSAAAAPGSEARKGGGFSGDVINIDDDEDEKDGTRGDKAGPSMSCASGSPVAMTPGRGSPRNRYGFDCSYDSSESNLTKGWDSDTDDGSDCEILDDTAGTAREMWETAASRKKPPHGVDECEDGGATAFASCAGLETQPGKYSEHLFGAERHPDESMSWFYSAASKYGSQNSSDSTKESPGHAQSSSGTEKGVHGPSVPNTEECSNGDFSSINGRESAQNRNGSGKDIPTECHLNDNISQSFSDARKEGLQNNTGRSKDHHDQFSAPNVKECSMVGSEKASRGVQLPRPDESSAYNFAPANRFFSGIWSVDRNDGSPPIFVSTPEKVDETIPDDVYSQKYPSPPEASYNTIFYSAQDNGLAKGKDLLQDPEELGRFASVIGEREKHKESVEYKRAAEEEWASRHRQLQIQAEEAKKLRKRKKAEAQRLLDMEKRQKQRLQEVRESQRKNEEAIQLKERYRATVGKELEDIERRHCDMTSILHALGISVEGGE

SEQ ID NO: 57907 - protein, 90 aa, Zea mays
  Coding DNA Sequence Number=SeqID_16128
MMKHGVWCEAACGAVGGGRERTSGEGDTLVLGERGNAHGGSEHMREGAVCRRCDGWGWWRRRQGWGASANRGRRRGGGTVLEWGWGVLNF

SEQ ID NO: 57908 - protein, 128 aa, Zea mays
  Coding DNA Sequence Number=SeqID_16129
MAFGAFVGDCGSTEHLDHAIPHHRAGQRRRKSSGAHTHRDSHLASQLAPWRRKDDRCLGEGARGCVSWRRKDDRLSFVGRLLCDRALRRVAEHELKAVWNALVMLLFPARRRSAAGDGQGHAGTTARH

SEQ ID NO: 57909 - protein, 656 aa, Zea mays
  Coding DNA Sequence Number=SeqID_16130
  Homolog annotation: Hit_ID=Q6K1Z7; Match level="QueryCoverage=29%, HitCoverage=100%, E-value=1e-63, Identity=51%"; Hit description =Isochorismatase hydrolase-like protein
  Pfam annotation: Domain name=GRAS; Domain location=289-556; Score= -130.6; E_value=0.028; Accession=PF03514.5; Description=GRAS family transcription factor
MALSTPASILVDENQQINRGKRADGPRAKGLKPSENPGNQGRRALKDLSNFSKGTGLKDTSTLKEKSQQKPRSNVANTIKGNALKDKPILKEKSTQEQRSKALKNPMKILVDEEIKMCHEWAKDGVEGFHSTQNNSQKLDKDLLDKRVKKKVAAVNSALCGWPDTVFDSLMYPSMEVAELFYEQNVLEVEPEILPDISWRLSSSVDGKAKIDEDRLTDAELDQYHSLENNPIIFELRDEPAIPQLGQRVRDSPAARQSNGEKFAITEILRCGFDDLEALRSRSSEVRRGRAAREGGPVEHGEGGGDAALEAVVGEVQQLEQLLNPCTAAVEAGNLTRVQHLFYVLGELASFSGDANHRLAAHGLRALARSRLPAAVGPAAAAAVRVPPCDCPTPAFVGTEPRLFRASLIRFHEVSPWFALANAAMECLGESLVYASKSSKPHLSTSIMANFSSNRSVCTRARRMGTEADAAAVDSLRSQIPFQTDGELILPPRDVGLVLVDLCNGFCTVGAGNLAPVAPNKQISKMVEEAARLSKLFCDRNLPIFAFLDTHYPDKPEPPYPPHCIIGTGEENFVPDLEWLEKEPNVTIKRKSCIDGYISCIEEDGSKGCATYDLPVEIAMNIKGALAHPQDLMHHIGLYMAKGRGAKVVDRVVIEP

SEQ ID NO: 57910 - protein, 66 aa, Zea mays
  Coding DNA Sequence Number=SeqID_16131
MTKIVVRVLLVEGGRLSLLECLEQPKFAGVGDDHEVPLLDGRQRDAAALNRVQAIATPELVVHNGA

SEQ ID NO: 57911 - protein, 58 aa, Zea mays
  Coding DNA Sequence Number=SeqID_16132
MGARRLWARRQGPLSGGSAPSAAGGQREGEESRRRRGEEWEKLAREAGFCAAKLYELG

SEQ ID NO: 57912 - protein, 135 aa, Zea mays
  Coding DNA Sequence Number=SeqID_16133
MAGGNLFGRALSYVVNELLVEGLANNRAFQRFAVKTNRTLESLSSKAKEVREELSEQLKEARGQKDRSLFAALQAVKLVPTSIQQDDTDNLVTSLVLVWVLFMNDILDVIQWKLVLSFSALRLVDAEQLVSCPLS

SEQ ID NO: 57913 - protein, 121 aa, Zea mays
  Coding DNA Sequence Number=SeqID_16134
  Subcellular localization annotation: CTP_CleavageSite=34; ConfidenceScore=5.07e-01
MTCPTTATDSSPPASRRQQSRLPIGAWINPAQTMANYRGMSLPAFGEEHGWSEKMSARQCFFEYRWRGSGAQRGAAGDNAHQIGYYKRGLTAEAVVADLVFKNIQHGQQQGQWLDATGFNY

SEQ ID NO: 57914 - protein, 155 aa, Zea mays
  Coding DNA Sequence Number=SeqID_16135
MGKSKKGGSSSHHSGDKRKREPTPPSEDFGDSEYSEEEFSSESEGSSAPASPPASSDDLDDSQGIVAEVWTYIRAVERAGLEGSDESEYSSDKGNSSDSSEEGGSDGDGGDGDGGDGDGSGDGGEGDGDGGGKGGSGDGGDDSKGSSRGSNKASG

SEQ ID NO: 57915 - protein, 55 aa, Zea mays
  Coding DNA Sequence Number=SeqID_16136
MTSLTWRSKHLVSGLQQDTQELSIPKSKPNWEPRRTGVFGVDSLVSGDEDEDVCS

SEQ ID NO: 57916 - protein, 111 aa, Zea mays
  Coding DNA Sequence Number=SeqID_16137
MAHEEERREAPRRDECVGFGRRSGVGDDRKLLGIRTAETNKKKVFTCPYAKNLFLVVVCGARKKERTGRPGVGRGGMALGLLIHTARFLAHGNDGTAPAFANVGWISVAVA

SEQ ID NO: 57917 - protein, 98 aa, Zea mays
  Coding DNA Sequence Number=SeqID_16138
MALACNHARGPPRGSHWSGSGAPCPSSFGDLHLTIPSIALKDHGSTTRRPLYVPSQADSSSSKQAGLVSRDVPGGAHGNPKPDVDHRHGRDESAKRPY

SEQ ID NO: 57918 - protein, 135 aa, Zea mays
  Coding DNA Sequence Number=SeqID_16139
MPRSISAHWSSTKRINCLFGTACDLKDSTVSVGISALMEEQLTGVQILRLRRKPPCQNSNYKQEQTKEHAMAHWWPVRAARSAHMPVTARREPANQQGRRRSNQTAFLHARRAGNTDSHRDPLSEAVSDCWFLNL

SEQ ID NO: 57919 - protein, 57 aa, Zea mays
  Coding DNA Sequence Number=SeqID_16140
  Subcellular localization annotation: CTP_CleavageSite=44; ConfidenceScore=5.34e-01
MGEGLLAAASALRSSLLLFGPPEQKSSTSPLLGRATTSRSAVFCCSAEWGPSDRVAV

SEQ ID NO: 57920 - protein, 694 aa, Zea mays
  Coding DNA Sequence Number=SeqID_16141
  Gene Ontology: Mol. function=ion channel activity; Cellular component= membrane; Biological process=ion transport
  Homolog annotation: Hit_ID=Q69KL7; Match level="QueryCoverage=83%, HitCoverage=96%, E-value=1e-138, Identity=69%"; Hit description =Putative cyclic nucleotide and calmodulin-regulated ion channel
  Pfam annotation: Domain name=Ion_trans; Domain location=208-475; Score=45.6; E_value=1.7e-10; Accession=PF00520.21; Description=Ion transport protein
  Pfam annotation: Domain name=cNMP_binding; Domain location=491-591; Score=35.1; E_value=2.4e-07; Accession=PF00027.19; Description =Cyclic nucleotide-binding domain
  Pfam module annotation: Pfam domain module=Ion_trans::cNMP_binding; Domain location=208-475::491-591
  Subcellular localization annotation: CTP_CleavageSite=44; ConfidenceScore=5.70e-01
MAIAPPTRFAVLLAPSLLLIPDSPRRPPAPATSAVKRSRSSLARAAGVAARLLPPKHIAASWRSSSTVVAADFVLLPEAQIRTGSAAFLHLLVRKLAPMDYSEADAPGPSPARPAMPLHQKQAGLAASKLGVGTSKKHRAFVASDEQWYNKIFDPSSDFILTWNRIFLFSCFVALFIDPLYFYVPKISYGSPKFCIGTDTRFAVGVTFFRSIADLLYVLHIIIKFRTAYINPSSTLRVFGRGDLVTNPKEIAWKYIRSDLAVDVAAALPLPQIIVWFVIPAIKYSSAEHNNNILVLIVLAQYLPRLYLIFPLTYEIVKATGVVAKTAWEGAAYNMVLYLIASHVLGALWYLLSVDRQTFCWKTNCLNETGCDLKYLDCDTTPNATWANTTAVFSNCNASDTNISFDFGMFEPALSNQAPAQSFAMKYFYSLWWGLQNLSCYGQTLTVSTYLGETLYCIFLAVLGLVLFAHLIGNVQMDDQLLDAICERLVSSLCTKGTYIVREGDPVTEMLFIIRGKLESSTTNGGRTGFFNSITLKPGDFCGEELLGWALVPRPTTNLPSSTRTVKALIEVEAFALQAEDLKFVASQFRRLHSKKLQHTFRYYSHHWRTWASCFIQAAWRRYKRRKMAKDLSMRESFNSVRLDEVDNEDDDSPPKNSLALKFIARTRKVPQNMKELPKITKPDEPDFSAEPED

SEQ ID NO: 57921 - protein, 573 aa, Zea mays
  Coding DNA Sequence Number=SeqID_16142
  Gene Ontology: Mol. function=L-isoleucine transporter activity; Cellular component=integral to membrane; Biological process=amino acid transport
  Homolog annotation: Hit_ID=O80668; Match level="QueryCoverage=81%, HitCoverage=86%, E-value=1e-144, Identity=55%"; Hit description =Expressed protein
  Pfam annotation: Domain name=Aa_trans; Domain location=183-567; Score= 212.9; E_value=7.3e-61; Accession=PF01490.8; Description =Transmembrane amino acid transporter protein
  Pfam annotation: Domain name=Trp_Tyr_perm; Domain location=189-536; Score=-259.2; E_value=0.0089; Accession=PF03222.4; Description =Tryptophantyrosine permease family
  Pfam module annotation: Pfam domain module=Aa_trans::Trp_Tyr_perm; Domain location=183-567::189-536
MAAAEEEEEWEDGRSVMPEEEDGDIEDVPPPPLLGRNFGSEDEDEDEAGSLNSQSQWWPRSFRYVRAWCILYDLIPASKATGDLVPKRLTNDRVDMLHVVYVFSNTPREATDTYTIAAPPGLRHLVVGDCNGLGSDLKLPLLSDKLDGRQDSSNNLLPVADPFGSVLSDGRFSDRVQQAPTTPGCNLTQTVFNGVNVLAGIGIFSAPYTIREAGWASLVVLAFFAVVCCYTGVLLKYCFESKDGVKTFPDIGELAFGRIGRFLISIVLYTELYSFCVEFVILEGDNLASIFTSTTFDWNGIHADGRHFFGILFALVVLPSVWLRDLRVISYLSVGGVFATLLVFLSVGVVGATGNVGFHLAGKAVKWDGIPFAIGIYGFCYAGHSVFPNIYQSMSDRTKFNKALYICFAICTTIYGAIAVIGYLMFGDKTLSQITLNLPKDSFVAKVALGTTVIIPFTKYSLVINPLARSIEELRPEGFLTDRLFAVMLRTAIVASTLCVAFLLPFFGLVMALIGSLLSILVALIMPALCFLKIARNKATRLQVIASVATVVLGSVCAVLGTYNSIAKIAESY

SEQ ID NO: 57922 - protein, 120 aa, Zea mays
  Coding DNA Sequence Number=SeqID_16143
  Subcellular localization annotation: CTP_CleavageSite=74; ConfidenceScore=5.07e-01
MRGAEGSAGERPFRRRGFGQGTPGGDSSKPSARARRPRPRRHGRSHSGPGGAGPMGGSGAARRAQASALGRAVRSASTRECIPAARGYGSTGAAHAQAHRPGNGNDNGFARSKLKESSAI

SEQ ID NO: 57923 - protein, 86 aa, Zea mays
  Coding DNA Sequence Number=SeqID_16144
MVVVGDPRVLPSPPTNRPLRGLALPYKKYGRGSVWGLSKWGIAYLGDRGLLLRRACEVHRGGAAGQSLVTGNGIVVAVDQGMNGTD

SEQ ID NO: 57924 - protein, 533 aa, Zea mays
  Coding DNA Sequence Number=SeqID_16145
  Homolog annotation: Hit_ID=Q5VNN5; Match level="QueryCoverage=42%, HitCoverage=85%, E-value=4e-89, Identity=76%"; Hit description =Putative polygalacturonase
  Pfam annotation: Domain name=Pep_deformylase; Domain location=373 -528; Score=174.9; E_value=2e-49; Accession=PF01327.11; Description =Polypeptide deformylase
MAALEAQAAERVIEACVRTESVRKCVFTSSLLACVWRQDYPHDRRCPTTIDESCWSDESFCRDNKLWFALGKTAAEKAAWRAARGRDLKLVTICPALVTGPGFRRRNSTASIAYLKGARAMLADGLLATANVETVAEAHVHAYEAMGDNTAGGRYICYDHVVKRPEEFAELERQLGLPGGAAPAPAHGSDDRPARFELCKRKLSRLMSSRRRCAYDTYYSVAFEGDVISTLYRIVSTLVPSFRCSLHVRAAQTCSHATRAPPVLSRGVLGSPLTPPSPPVRPLLTASCRTPKKIEAEGAAPMAAALCPRLRGFMASSRPLLALRPVALRLPMRRAVPAMPLAARARRGLGSSTANAQLDEDFATASDLRFESPLEVVKYPDPVLRARNKRINTFDDNLRALADEMFDVMYKTDGIGLSAPQVGVNVQLMVFNPAGVKGEGEEIVLVNPVIYKSAKRLLVFEEGCLSFPGIYGNVVRPESVKIEAQDVTGAKIKVKLSGIHARVFQHEFDHLLGILFFDRMTIDVLETVREELK

SEQ ID NO: 57925 - protein, 480 aa, Zea mays
  Coding DNA Sequence Number=SeqID_16146
  Gene Ontology: Mol. function=protein serine/threonine kinase activity; Cellular component=cytoplasm; Biological process=protein amino acid phosphorylation
  Homolog annotation: Hit_ID=Q93WA3; Match level="QueryCoverage=95%, HitCoverage=96%, E-value=1e-175, Identity=69%"; Hit description =Putative serine/threonine-specific kinase
  Pfam annotation: Domain name=Pkinase; Domain location=83-407; Score =133.0; E_value=8.3e-37; Accession=PF00069.15; Description=Protein kinase domain
  Pfam annotation: Domain name=Pkinase_Tyr; Domain location=83-407; Score=112.4; E_value=1.3e-30; Accession=PF07714.7; Description =Protein tyrosine kinase
  Pfam module annotation: Pfam domain module=Pkinase::Pkinase_Tyr; Domain location=83-407::83-407
  Subcellular localization annotation: CTP_CleavageSite=44; ConfidenceScore=5.71e-01
MGNCMDKAVPVDNTSYQSKAGSKSISSSNPSTVKTGSTRSTWTVASYKDSRELPTPRTEGEILSSPNLKAFSFGDLRTASRNFRSDSLLGEGGFGYVFKGWIDEQTLAPSKPGSGMVVAIKKLKPEGFQGHKEWLTEVDYLGQLHHQNLVKLIGYCTDGDHRLLVYEYMPKGSLENHLFRRGADPLSWGTRLKVAIGAAKGLSFLHDAENQVIYRDFKASNILLDSEFNAKLSDFGLAKAGPTGDRTHVSTQVMGTRGYAAPEYVATGSVWFRSQLGWSGSEPRSVSIRKILGSQMCSPVQSSGKTLIFYFGRLSVKADVYSFGVVLLELLTGRRALDKSKPLTEQNLVEWARPYLSDKRRLYRIMDSKLGGQYPKKGAHAVAGIALQCIRNEGKMRPAMSEVVEKLEQLQDPRYNVAAPPQVNTASSSSSSGSVVPRSPRKAQPSPRRLSGSASPLPAPATGSPLPGSSRSSSRTAQVH

SEQ ID NO: 57926 - protein, 58 aa, Zea mays
  Coding DNA Sequence Number=SeqID_16147
MTKKMDRCDGWQMLKKGTTVGWVRAYEGDDGADDANIVVAGGTKSSVISGGMRAPRGR

SEQ ID NO: 57927 - protein, 121 aa, Zea mays
  Coding DNA Sequence Number=SeqID_16148
MANTLSDLGSLVMDEMLVLKLLRGINPHYVYLRAILMWITLLPSFVWDCNDILPEELTNVATTTTNVAMALYSANPGGRPRRPVLPPSGLLVLMTNEAYGSVLTPKHRILLQGPFSHTMTA

SEQ ID NO: 57928 - protein, 189 aa, Zea mays
  Coding DNA Sequence Number=SeqID_16149
MEARRALRYRVHGRRSWRPRNLKPRCRRLAKSRLIELRRDMGTSRRVEEVWLSLAKLGSVWVSSGSHTRRPRASHDCTRANCDCAWANHDCAWARRDYAWASRDYARSWPRANRDCISCMRLALGELELRLPSEVGLERVRIVSPTRGWSRASHDCAQSWSRANRDCVSRPRLSSGESKLRLPSEVGLG

SEQ ID NO: 57929 - protein, 225 aa, Zea mays
  Coding DNA Sequence Number=SeqID_16150
  Gene Ontology: Mol. function=zinc ion binding; Cellular component =intracellular
  Homolog annotation: Hit_ID=O82115; Match level="QueryCoverage=99%, HitCoverage=100%, E-value=2e-79, Identity=61%"; Hit description=Zinc finger protein
  Pfam annotation: Domain name=zf-B_box; Domain location=1-47; Score =42.9; E_value=1.1e-09; Accession=PF00643.14; Description=B-box zinc finger
  Pfam annotation: Domain name=zf-B_box; Domain location=52-99; Score =30.1; E_value=7.8e-06; Accession=PF00643.14; Description=B-box zinc finger
  Pfam module annotation: Pfam domain module=zf-B_box::zf-B_box; Domain location=1-47::52-99
MKIQCDACEGAAATVVCCADEAALCARCDVEIHAANKLASKHQRLPLEALSASLPRCDVCQEKAAFIFCVEDRALFCRDCDEPIHVPGTLSGNHQRYLATDIRVGFASASSACSDACDAHDDSDHHAPPKAAVSSAAQQLHKESPLGFKELEWFTDIDLFHEQTPKAGRRLAEVPELSGTQAANDAAYYRPAKATATAGAGVRQSKKARTEVTDDEDHLIVPDLG

SEQ ID NO: 57930 - protein, 469 aa, Zea mays
  Coding DNA Sequence Number=SeqID_16151
  Gene Ontology: Mol. function=O-sialoglycoprotein endopeptidase activity; Cellular component=nucleus; Biological process=proteolysis
  Homolog annotation: Hit_ID=Q6K200; Match level="QueryCoverage=99%, HitCoverage=99%, E-value=1e-175, Identity=63%"; Hit description =Putative met-10+ protein
  Pfam annotation: Domain name=Met_10; Domain location=97-405; Score =245.5; E_value=1.1e-70; Accession=PF02475.7; Description=Met-10+ like-protein
MEKLDESKFEQRLELLALRIPRELASAVTRLLRSGYLLDKPRVKPVVEDPEGDKNRLVILSERIQKPDLSDMSQQALDSLKQLCNVEVVPYTLTLGYSYWSAGHVAHLNISDDLLAYKDVIAKVIYDKNYPRIQTVVNKVGTITNEFRVPKFEILAGKNDMVTEIKQYGATFRLDYGLVYWNSRLEHEHIRLVSLFKKGDVICDMFAGIGPFSIPSAQKGCVVYANDLNPDSVHYLRTNAKINKVEDYIFAYNMDARVFMQKLMTVPGLETRSDSQVATDESYSKEGVPPNEISSSNGNHNDVREDIKNGANESSAASTTTKKRQQTSEEGDEPDCQDADANKTKRQNKKRVRGLGPLPSKPWEHFDHVLMNLPASALQFLDCFDGLIQKKYWTGSLPWIHCYCFIRSCESEESILSEAQNKLSATIAEPIFHRVRDVAPNKAMFCLSFKLPMECLKGDSENHIESVAK

SEQ ID NO: 57931 - protein, 148 aa, Zea mays
  Coding DNA Sequence Number=SeqID_16152
  Gene Ontology: Mol. function=hydrolase activity; Biological process =metabolic process
  Homolog annotation: Hit_ID=Q6K1Z7; Match level="QueryCoverage=95%, HitCoverage=56%, E-value=6e-58, Identity=72%"; Hit description =Isochorismatase hydrolase-like protein
MGVCFLETKNTNPNEDLEWLEKEPNVTIKRKSCIDGYISCIEKDGSSVFADWIGKYQIKTVLVLGICTDICVLDFASSTLAARNIDRVPPLQDVVIYSGGCATYDLPVEIATNIKGALAHPQDLMHHIGLYMAKGRGAKIVDRVVIEP

SEQ ID NO: 57932 - protein, 474 aa, Zea mays
  Coding DNA Sequence Number=SeqID_16153
  Gene Ontology: Mol. function=RNA-directed DNA polymerase activity; Cellular component=mitochondrion; Biological process=RNA-dependent DNA replication
  Homolog annotation: Hit_ID=Q5QN90; Match level="QueryCoverage=97%, HitCoverage=93%, E-value=1e-123, Identity=50%"; Hit description=Leaf protein-like
  Pfam annotation: Domain name=PPR; Domain location=101-135; Score=0.6; E_value=6.4; Accession=PF01535.11; Description=PPR repeat
  Pfam annotation: Domain name=PPR; Domain location=184-218; Score =38.0; E_value=3.2e-08; Accession=PF01535.11; Description=PPR repeat
  Pfam annotation: Domain name=PPR; Domain location=219-253; Score =28.0; E_value=3.4e-05; Accession=PF01535.11; Description=PPR repeat
  Pfam annotation: Domain name=PPR; Domain location=272-306; Score =19.6; E_value=0.011; Accession=PF01535.11; Description=PPR repeat
  Pfam annotation: Domain name=PPR; Domain location=307-341; Score =31.3; E_value=3.3e-06; Accession=PF01535.11; Description=PPR repeat
  Pfam annotation: Domain name=PPR; Domain location=342-376; Score =17.8; E_value=0.039; Accession=PF01535.11; Description=PPR repeat
  Pfam module annotation: Pfam domain module=PPR::PPR::PPR::PPR::PPR::PP R; Domain location=101-135::184-218::219-253::272-306::307-341::342 -376
MSAMVETHPPTPTAAADVVSILRGADPARLLATSGIAPTPELLQHLRPALPTLPDSAIPALARWAGAATAVSLLASRRLFAAAWRFLLFQPAAASPPPPLAAFAPLLRRYARIGRTDSAVRTFRFLQRHPGRYAVESDVTPSAEALSPLILTIDALCKEGHPRAAALLVAQIRREDDGWAPDVRIYNILLNGWSRARRLDKAEKLWAAMRDEGVRPTVVTYGTFIDAHCVMRRPDHAMALLDQMREEGTETLLGLVECSRPCWGRGISPTARTYNYFFTVFARNLSIDLGMNLYVKMVSNGYAPDRLTYHLLIKMLCEANRLELTLQMLQEMRNSGFEPDLATSTMLIHLLCRRHQFEEAFAEFEQMFERGMVPQYITYRMLMRELKRLGLVKLVQKLADLMRSVPHSTKLPGGYRDKEGDDAIEKKKSILLKAQAVSDVLKDCKDPKKLRELRDPEETDVQIADRIVANIRRR

SEQ ID NO: 57933 - protein, 88 aa, Zea mays
  Coding DNA Sequence Number=SeqID_16154
MAAAMAAVAAATTAEDEARLLCLEEHDGDGASDYLCLARRLRTRRPAHVHRVGLTLLNNVVTNDLEGAKASHQSFTGHENKVKLLITP

SEQ ID NO: 57934 - protein, 210 aa, Zea mays
  Coding DNA Sequence Number=SeqID_16155
  Gene Ontology: Mol. function=kinase activity
  Homolog annotation: Hit_ID=Q6QP54; Match level="QueryCoverage=55%, HitCoverage=34%, E-value=5e-11, Identity=43%"; Hit description =Putative kinase
MGRRAAAVAQARPVSLLVVPGRPGGTMAYLTLRVEIVAQARHYSHSVPGTGTILTRPGRAWTVLFRVVPGLAHRVSAKWPSIPDPRARTQPRLRKTVSASPDPRARTPPRPRKTVSASPDPRARTQPRLRKTVFASPDPRARTPSQPRKTVSASLDPRARTQPRLRKTVSASSDPRARTQPRPQRSHRLARPRARTDHVTGGGHHYPTPS

SEQ ID NO: 57935 - protein, 54 aa, Zea mays
  Coding DNA Sequence Number=SeqID_16156
MDDIAHAITSRLANAGQGANVLRAAPPWSVPGGNDVFGPLDQDLAVMRSYRFNV

SEQ ID NO: 57936 - protein, 67 aa, Zea mays
  Coding DNA Sequence Number=SeqID_16157
  Subcellular localization annotation: CTP_CleavageSite=61; ConfidenceScore=5.18e-01
MASNNSNKTVTLDDLVTQIQNLTITLNDVLSKVTNNSLRLTCWAITSTLCLSRSLPSRLIKAASMSP

SEQ ID NO: 57937 - protein, 715 aa, Zea mays
  Coding DNA Sequence Number=SeqID_16158
  Gene Ontology: Mol. function=DNA binding; Cellular component =intracellular; Biological process=DNA integration
  Homolog annotation: Hit_ID=Q9XEJ4; Match level="QueryCoverage=98%, HitCoverage=68%, E-value=0.0, Identity=84%"; Hit description=Copia -type pol polyprotein
  Pfam annotation: Domain name=RVT_2; Domain location=451-684; Score =430.3; E_value=2.6e-126; Accession=PF07727.4; Description=Reverse transcriptase (RNA-dependent
  Pfam annotation: Domain name=rve; Domain location=60-223; Score =200.1; E_value=5.3e-57; Accession=PF00665.16; Description=Integrase core domain
  Pfam module annotation: Pfam domain module=RVT_2::rve; Domain location=451-684::60-223
MGWLWHRRLAHVGMKNLHKLLKGEHILGLTNVHFEKDRICSACQAGKQVGAHYPHKNIMTTGRPLELLHMDLFGPIAYISIGGSKYCLVIVDDYSRFTWVFFLQEKSQTQETLKGFFRRAQNEFELRIKKIRSDNGTEFKNSQIEGFLEEEGIKHEFSSPYTPQQNGVVERKNRTLLDMARTMLDEYKTSDRFWAEAVNTACYAINRLYLHQILKKTSYELLTGKKPNISYFRVFGSKCFILVKRGRKSKFAPKTVEGFLLGYDSNTRAYRVFNKSTGQVEVSCEVVFDETNGSQEEQVDLDEIGIEEAPCIALRNMSIGDVCPKESKESPNAQDQPSSSTQASPPTQNEDEAQDDEVEDQANEPPQDDDIDQGGDANDQDKEDEEQRPPHPRVHQAIQRDHPINTILGDIHKGVTTRSRVAHFCEHYSFVSSIEPHKVEEALQDSDWVVAMQEELNNFTRNEQDEHGVVTRNKARLVAKGYSQVEGLDFGETYAPVARLESIRILLAYATYHGFKHYQMDVESAFLNGLIKEEVYVEQPPGFEDSEYPNHVYKLSKALYGLKQAPRAWYECLRDFLIANGFKVGKADPTLFTKTLENDLFVCQIYVDDIIFGSTNESTCEEFSRIMTQKFEMSMMGELKYFLGFQVKQLQEGTFLSQTKYTQDILNKFGMKNVKPIKTPMGTNGHLDLDTGGEERTSRALIIPFWRFMPKGEKV

SEQ ID NO: 57938 - protein, 117 aa, Zea mays
  Coding DNA Sequence Number=SeqID_16159
MPAPVARYPENSVPAAAQATATVDRPNQPLLVLSDPRPYRREQDGAHAADEPDRLRTRSDLFRAITVDDPHLDVIARDLPELTQPFTGPPSPLEPAPEPAIEDLHAPALEGKPWFYA

SEQ ID NO: 57939 - protein, 196 aa, Zea mays
  Coding DNA Sequence Number=SeqID_16160
MVVGVGLAACAGGRARWRRVLRPAHGGRAQSKRSGSFTEGQWCCRRKESKGGLQCSSVYVRRPLGEVRRRKSDTSGEVVFGLRARGASRSSGEASRGLDWIEVGRSGRSMVAGAQTAPGTPCAEGTLAILRLGRAESERGSTVKASVRFIGAGTGMGAESSVARRGRAGPSAGACSGMLGQVEHVFGSFCPSSSAC

SEQ ID NO: 57940 - protein, 149 aa, Zea mays
  Coding DNA Sequence Number=SeqID_16161
MGPLLTTIKGRTRAFSEEVGRAGPRTGQALSWGRSLPSPAWTLVTPLLQAHPTWARDEHEGRGTSTSLTLGSGRLASPPSALAHALDPSGLGHAAHSLVGLGAPLSRNADIYYLQTFDVLFACQSFNHYELAIAAILSTFRGDTGDDNI

SEQ ID NO: 57941 - protein, 1114 aa, Zea mays
  Coding DNA Sequence Number=SeqID_16162
  Gene Ontology: Mol. function=ATP-dependent helicase activity; Cellular component=intracellular; Biological process=RNA processing
  Homolog annotation: Hit_ID=Q8W367; Match level="QueryCoverage=86%, HitCoverage=72%, E-value=0.0, Identity=67%"; Hit description =Putative RNA helicase
  Pfam annotation: Domain name=DUF283; Domain location=256-346; Score =102.1; E_value=1.6e-27; Accession=PF03368.5; Description=Domain of unknown function
  Pfam annotation: Domain name=Helicase_C; Domain location=108-189; Score=64.8; E_value=2.8e-16; Accession=PF00271.21; Description =Helicase conserved C-terminal domain
  Pfam annotation: Domain name=Ribonuclease_3; Domain location=587-701; Score=53.1; E_value=9.1e-13; Accession=PF00636.16; Description=RNase3 domain
  Pfam annotation: Domain name=Ribonuclease_3; Domain location=780-872; Score=82.8; E_value=1.1e-21; Accession=PF00636.16; Description=RNase3 domain
  Pfam annotation: Domain name=dsrm; Domain location=256-326; Score =11.8; E_value=0.095; Accession=PF00035.15; Description=Double -stranded RNA binding motif
  Pfam annotation: Domain name=dsrm; Domain location=899-962; Score =19.2; E_value=0.014; Accession=PF00035.15; Description=Double -stranded RNA binding motif
  Pfam module annotation: Pfam domain module=DUF283::Helicase _C::Ribonuclease_3::Ribonuclease_3::dsrm::dsrm; Domain location=256 -346::108-189::587-701::780-872::256-326::899-962
VVKIYNESINTIDDSEDCVFSKESLNLQVSYFKEALFLIEDFLPQGYGELMKSESGSAELTKKGYISSKVESLINIFKSFGSSEEVLCMIFVERITTAKAVERFMRGNVNFSRFSISYLTGGSTSKDALSPAVQRFTLDLFRAGKVNLLFTTDVTEEGIDVPNCSCVIRFDLPRTVCSYVQSRGRARKSSSSYVLMIERGNLAQQEHIFRIIRTEYYVKTFALHKQPNTPSLDLPLQEKYIYHVESTGATITAECCVNLIYKYCEKLPKDRYYLPKPCFEVGLKDGSYQCTLTMPHNAAFRSIVGPPSSSCNLAKQLVCLEACKKLHELGELDDHLVPLTEEPMDIDTDTTDKKCVSGPGTTKRKELHGTINVHGLSGNWIHESETVILNAYTFDFRCDQEGELYAGFVLLMESVLDDDVARSEIDLFLIPNKMVYTTMTPCGKIQLNKEQIQHDPNIYWEAVESCSGTVEQLRNLYLEDGNLNHENLCSHKRSNKGEDIIHLANKSLHFSTVKDSVVLSLHTGRIYSVLDLILDKTADDSFDEMYNGKASPFASFVDYYHQKATFVAVKAKSQCTQLTFFKNEVPRYPMKHEGHLSDMRSKAVCNATLHKHGIWQSLQGYIRDAAFDPRRWVAPGQISLRPFPCNCGIETAFVPFNGGYISDDPSFVVGKPCDRGHRWMCSKTVSDCVEALVGAYYVGGGIAAAIWVMRWFGIDVRCDMELVQKAKYNSNASRMCYLSKIKDIEELEAKLKYNFSVKGLLLEAISHPSVQELGVDYCYQRLEFLGDSVLDLLITQHLYATHTDVDPGELTDLRSASHGSGILLEQVTEYVRSNLEYHGKENQFLQQATCKAPKVLGDIMESITGAIFIDVNFDVDLVWKIVEPLLSPMITPDKLALPPYRELLELCSHLGCFIESKCTSEGEELIIEMKVQLRDEQLIAQGHDRNGKTAKANAAARILVDMKITSRNPFSDEVKINLDVLGALMLDGVGGHVGSTDVVTVHQCSLTKRDVEFQEELAQPCSLYNSVCQNVILSFSTRPRDNVLTLGGLGDEAIHPINISIDHKISRCRWSQQEAKVKGATNVSKNPLKCSKMWSQEHACQDKLAEQHKQYQAE

SEQ ID NO: 57942 - protein, 140 aa, Zea mays
  Coding DNA Sequence Number=SeqID_16163
  Homolog annotation: Hit_ID=Q8W367; Match level="QueryCoverage=76%, HitCoverage=8%, E-value=5e-39, Identity=69%"; Hit description =Putative RNA helicase
  Pfam annotation: Domain name=DEAD; Domain location=34-139; Score= -32.9; E_value=0.0034; Accession=PF00270.19; Description=DEADDEAH box helicase
  Pfam annotation: Domain name=ResIII; Domain location=30-128; Score= -20.5; E_value=0.0024; Accession=PF04851.6; Description=Type III restriction enzyme, res subunit
  Pfam module annotation: Pfam domain module=DEAD::ResIII; Domain location=34-139::30-128
MADAATSEDADLPPPPPPAQLPPPRRPHKRLQPRGYQVEVFAAALRGNTIAVLDTGSGKTMVAIMLAREHVLRARAGEALRRIVVFLAPTVHLVHQQFEVIREYTDLDAVECHGASGVGHWNAKRWKEAIGTKEVRARVH

SEQ ID NO: 57943 - protein, 335 aa, Zea mays
  Coding DNA Sequence Number=SeqID_16164
  Gene Ontology: Biological process=cell wall catabolic process
  Homolog annotation: Hit_ID=Q10SU7; Match level="QueryCoverage=79%, HitCoverage=84%, E-value=1e-54, Identity=45%"; Hit description=LysM domain containing protein, expressed
  Pfam annotation: Domain name=LysM; Domain location=76-119; Score =40.5; E_value=5.9e-09; Accession=PF01476.10; Description=LysM domain
LPPPRFRMSRPHLPKDPAFPRTNGSLDGGARDLGEIEEVGAAATVDVEQSPLQSSSPSASSPPAAAISSCGQYMLHRVRKLDTLAGVAIKYGVEVADIKRLNGLSADLQMFAHKTLQIPLPGRHPPSSYQQNGSYESDDRDTMALHHLQREIKQAKALRWQFTVKANLLFWMLSRGWSRQIPTPFPLQNRKTKSLTIGSLDGDTDENGDSERFVRRRQKADGELLPREENGGDFLASAGKGLALRPKSSSRPDMNKSQQNLFAMAEPLFGSGMQTVRKSSSTPEFQEPETSTSSSIWSASKWSINTDAFALPLPIPRFDNIPKPIAAWRNKAARD

SEQ ID NO: 57944 - protein, 331 aa, Zea mays
  Coding DNA Sequence Number=SeqID_16165
MPVRIAKCYMSSLLQLQAAVYREDYRTAHKLRLAIAATSKNDAVGRAISDLNEHTLTSPCSRNGSTTNDETGAEAEGACAGPSRGFDVNDGEKREDGGAAGGVSAGREEVSRRSVALGGAATADQAAGGAGRHDGGGYGGRSGKGEGRGRTGQVCSVVRLGGAEHMLEKGRSRDAPWMEESAPELRRLARGGKSSARRGGERVTEGESVLGRRRAVLEMEPAMGVDRRVDGVGAQAPLTEGAEALRKAAHPGGAQAPSAMETEQRGRRLHGWRGGAEDDGAGEGRPRGGEMAIDEERYKDAAYIRDHAGAGLVSTVEFLLYIVCPLLSKFL

SEQ ID NO: 57945 - protein, 574 aa, Zea mays
  Coding DNA Sequence Number=SeqID_16166
  Gene Ontology: Mol. function=protein binding; Cellular component =protein complex; Biological process=ubiquitin-dependent protein catabolic process
  Homolog annotation: Hit_ID=Q10Q05; Match level="QueryCoverage=72%, HitCoverage=95%, E-value=1e-159, Identity=86%"; Hit description=PCI domain containing protein, expressed
  Pfam annotation: Domain name=PCI; Domain location=287-395; Score =64.3; E_value=3.8e-16; Accession=PF01399.17; Description=PCI domain
MALQYVEAQRQARPDLADWYASLADLYQQKLWHQLTLKLDQFLQLQAAQKQKSTKSAPKRSTCRDDSAVLLTFEMVKAIMSRIHAHMSLTMPVDMLLYLPETGDTIIQLYNNFITDFETKINLLKLAHFAVIASRQYPDKDAAITFLEGVITKLRDTRESRINEPILYVKMQIAAINLEKGNQKECKNSLEDGKTTLDSMTDVDPTVHASFYWISSQYHKSCQEFAEFYKNALLYLAYTTVESLSESFKLDLAFDLSLAALLGDNIYNFGELLAHPIINSLIGTKVEWVYHMLQAFNTGNLAFYQELCRVHNAALTAQPALVQDERKLLEKINILCLMEIIFSRPSEDRTIPLSVIAEQTKLSISDVEYLLMKSLSVHLIEGIIDEVDSTVHVSWVQPRVLGIPQVKALRDRLDAWVGKENLAGNLVVLDVCMLHCDKTWIIINVFLFSDIAFWARMELCLVWDVFMAMLGSASGMQKSGEVIAKWDTRAAKIYNEICVEENAPLENEEDLHITFGPIMCMNETTLIPGAEPKNVASSSDGNEDGPFNEGENLTLEANTESKGMIPLSLRRKKF

SEQ ID NO: 57946 - protein, 100 aa, Zea mays
  Coding DNA Sequence Number=SeqID_16167
MARCSDEGMGDVGASSRWKPNADELCNADERRSLGVVLKQGRESGEIREWRGGWRRMKHCLTSHGLRTTWVGGWFWEGGDDSGPMRSDDVGQCPRTRVTR

SEQ ID NO: 57947 - protein, 102 aa, Zea mays
  Coding DNA Sequence Number=SeqID_16168
MKDFSQMTSTIVIRKIVVFEMSRKMGRLEEPTSSRAYAFACDERKGKKKAPTPSSSCEEEEEEESDDNQPSTSSFRDEETIRRVRKVEDLLFNIDRKKQRKR

SEQ ID NO: 57948 - protein, 81 aa, Zea mays
  Coding DNA Sequence Number=SeqID_16169
MTGRRRIARRTCRKSPSRHPRWASLQPSSLSLHSVELLGVVSGAPACRIEELRPWCHCQAWAPPPDVVRWWEKALWPWICE

SEQ ID NO: 57949 - protein, 141 aa, Zea mays
  Coding DNA Sequence Number=SeqID_16170
MAPPRNHAGAAVPSLPEERKSWGRATVAFDRLTDVKRREDFHRGDSVRAEEFLAVEAAATVKPPTDVRLRIRATTLGKSSPFFSPNLCLWGNPVRIANRALGVRLACTPAERRRVHSVRRRVLCGWGPTLVNPPISVGGYD

SEQ ID NO: 57950 - protein, 54 aa, Zea mays
  Coding DNA Sequence Number=SeqID_16171
MAPGMERVVPPARLAVPAAWRGLAPGVGTVWLRSPKRSQEKTLSSSWLVKASVP

SEQ ID NO: 57951 - protein, 93 aa, Zea mays
  Coding DNA Sequence Number=SeqID_16172
MDQVLCCVEEVGADQPSMSEVVGGIEQLTKQAHLSVSAAETRARGDWVTGQWNPVVSRWDSGNAIYKVGVTPSPSRHPWELMGISTSTWEVNP

SEQ ID NO: 57952 - protein, 44 aa, Zea mays
  Coding DNA Sequence Number=SeqID_16173
MEVDEDNEAKDPEEIELASSLDTAHSGGPLHLNLVQPLLLIDRL

SEQ ID NO: 57953 - protein, 143 aa, Zea mays
  Coding DNA Sequence Number=SeqID_16174
MEMMDHVFTPALGRGEAEAAAVANTKTALETGSEVTPRLVQLYCADVFGIEKADQKALGCTCESRLEGIAKTTLDDRKVFVVDLSTELVEKHLQIEQMGTRTRELEEQVEVWDDTIEVLENQLHDLQVELDETNDVISWPSGW

SEQ ID NO: 57954 - protein, 143 aa, Zea mays
  Coding DNA Sequence Number=SeqID_16175
  Subcellular localization annotation: CTP_CleavageSite=61; ConfidenceScore=5.15e-01
MVRAWITPDGARSSSLVRDGGGGPQAVRGDTSAGRAGRARGTARECGPSFTGEMDLTPGPRNAEVVNTRERNGWLTQGTAKSAHITVRHREQRTRMAQAEERGPRFSEESGTMHRLTMWAPRVSESGRGGVGLVGDEVGSGPN

SEQ ID NO: 57955 - protein, 144 aa, Zea mays
  Coding DNA Sequence Number=SeqID_16176
  Subcellular localization annotation: CTP_CleavageSite=39; ConfidenceScore=5.03e-01
MEIGGFTSVGPHPHKTRRPTECTRQCSAGVHANLTPSARFVIRTGFPQRQRFGEKNGGRRSVAPPWLQPLRQGIPPRAHCPRGGSLPDASLPERHTLIPRPNAGVHRILTGRAARTEDRPNVRAPPKLAAVLGFLGKKREELGP

SEQ ID NO: 57956 - protein, 62 aa, Zea mays
  Coding DNA Sequence Number=SeqID_16177
MDNEGEGGPGEDGREEGEFGWGSACGEKGGRVTGVANVALTGLRSTAVTAESSWLATSGEMT

SEQ ID NO: 57957 - protein, 88 aa, Zea mays
  Coding DNA Sequence Number=SeqID_16178
MCVERARGGAPIEPLRGGGKYNSRKNKRSEHVAAHMWVKLDAVTKDKAHGAIEGHEGAPYKVTIMEEDMHNRSSATGRSPGAKGGVAV

SEQ ID NO: 57958 - protein, 110 aa, Zea mays
  Coding DNA Sequence Number=SeqID_16179
MRKLDLEPWRREGSLQGRTAGRWERLLPAPCSIGGDSRGARQGGMRASQGFLLCEGEGAESAAATMAAGRAEASGLGELGHGAPAGISGRLLAGGRRRGRRGARPGKARE

SEQ ID NO: 57959 - protein, 140 aa, Zea mays
  Coding DNA Sequence Number=SeqID_16180
  Homolog annotation: Hit_ID=Q39261; Match level="QueryCoverage=32%, HitCoverage=30%, E-value=2e-10, Identity=67%"; Hit description=Zinc finger protein 2
  Pfam annotation: Domain name=zf-C2H2; Domain location=25-47; Score =19.1; E_value=0.016; Accession=PF00096.16; Description=Zinc finger, C2H2 type
MEQELSLELTLLHPSASPPEPPGYFVCMYCDRKFFSSQALGGHQNAHKYERSLAKRRREIAAALRAHGAAATATGAPEDDAAAAMGSRDVPARPTRHGMMDKQKAPAADDDAPATASSSNMKRSSEYGYGVEELDLSLRL

SEQ ID NO: 57960 - protein, 106 aa, Zea mays
  Coding DNA Sequence Number=SeqID_16181
MVGLSNDSDDSEEFDFEENAYDVEDQPSKPSHVFFTESTIKKGHVEVHKFIYINSKSTVWNTIDYSGQEKLFWNFTCARTVRDTNKRAPSETKLEPFGLRRRPSAR

SEQ ID NO: 57961 - protein, 131 aa, Zea mays
  Coding DNA Sequence Number=SeqID_16182
MWSYFYRITYSPPLGGFNAFQEVIADFHPDCGEEGVKNAQGPYLSYKLLEFRTSSDKCLSRLGFLVALFMDDDMGGEELRHHRYRLYATPTLGLHSLGLGDARHVVGPIDGPSVTKHGPNSSPFAVLDRFS

SEQ ID NO: 57962 - protein, 110 aa, Zea mays
  Coding DNA Sequence Number=SeqID_16183
MFSSIRGKDTWDGMEKGKGLRLEPIQSLWLYCFLGGHSANRSLGSGNRVMEYLPSRFLRSSKRVSYGKVIDEDITTIHTINGPITQSRARQLTLQAGISPRGEVNRAAHG

SEQ ID NO: 57963 - protein, 86 aa, Zea mays
  Coding DNA Sequence Number=SeqID_16184
MRFRGGVEVRRGIGAALRINSARYFQGCLPGDAVKLQDSSPRPQRQRSRGSARVLGTPYRREVAEVGNDLPGFDGERPPLPSRIPF

SEQ ID NO: 57964 - protein, 216 aa, Zea mays
  Coding DNA Sequence Number=SeqID_16185
  Subcellular localization annotation: CTP_CleavageSite=69; ConfidenceScore=5.02e-01
MPIAVAWLAPCSRVLHFSVHRPCCLGTGACASSPGQSRTASEPRHATDVDAGEPFSGKPVVSAPHRALRRATVSRPRNLYVVPRSSRRHAPESRCVSSWLLCLAAPHSSSCELASSSCAYVVPRPALASRVPSALSWEDLAAPPGNCPCRAPVFFPWAPCTSLPYSLSALAHTPVSSVPSHRSPLAPSRPPRHGVTSQRGQGASLPLPCAMVFLRL

SEQ ID NO: 57965 - protein, 106 aa, Zea mays
  Coding DNA Sequence Number=SeqID_16186
MSAEVPVDLGVLESFETVGSREVSSIRGEKAVWEIKAGSGRIAHWSRVAAADRVSPWVGAGITCVWAGEYCSPALALLLTVARRHAVSTGWVVTVDPIAYGHDHSG

SEQ ID NO: 57966 - protein, 105 aa, Zea mays
  Coding DNA Sequence Number=SeqID_16187
MPCRGAEKGQAAAVARHAAYGRARLRAERAGKAGARCPGEENRRSAWAVAGGTTRCSHDTTLGTHEARAGLGATQAQDDEASSQLSECDAARHNNRDETQQDSGA

SEQ ID NO: 57967 - protein, 84 aa, Zea mays
  Coding DNA Sequence Number=SeqID_16188
MQNSTPLNFKLCHRTNKVLDLFLILRNKKILRMVAQIDSEHRTQNLPVKPIEVSASNRSNRLPTAKRPDPAHKELFNQVPATAD

SEQ ID NO: 57968 - protein, 71 aa, Zea mays
  Coding DNA Sequence Number=SeqID_16189
  Subcellular localization annotation: CTP_CleavageSite=48; ConfidenceScore=5.37e-01
MPDPMHSAFALAAPRLPRPSSPPALVGAVSPEPATAVSAGVVCPRRVVIAAKPDLRAYIDACVASNNLPMP

SEQ ID NO: 57969 - protein, 265 aa, Zea mays
  Coding DNA Sequence Number=SeqID_16190
  Gene Ontology: Mol. function=protein binding
  Homolog annotation: Hit_ID=Q75KA7; Match level="QueryCoverage=54%, HitCoverage=25%, E-value=8e-20, Identity=49%"; Hit description =Expressed protein
MAYWPRARGSGGRRKAATLDELGTQQQGRDVSALGQGIVGRWTSGMREWIGSMRLMIGRSLQQLLGSMRRWERGSGAGAWAWWGTTWWLARSCKLLTRGRAALGGLRSMVCRGWATQRWVGARAVGLRKGSSWKLHGEDHRANPVLRRVTSDTLANPPNDTLAHIIELVLKSSEDRGRREMKSLVLKLFKESSNGSANSSSADSSCITTLYECFQNCQDSLLVLPREATGADELAVEEELSSGSKVQAFRKIGKIDLEADNLSLA

SEQ ID NO: 57970 - protein, 109 aa, Zea mays
  Coding DNA Sequence Number=SeqID_16191
MEPWKKTSRSSKITTSSRRGHLERLHHHLHEEQERRRQELEQQGSSLSLQQEIKSVRSCSPVLPLEAPPAPPLSAPAAGVSAGGDPDDGGGDGSSSFSTDLSADQEPEG

SEQ ID NO: 57971 - protein, 120 aa, Zea mays
  Coding DNA Sequence Number=SeqID_16192
MALEAGLGCCQPHSVEWHSSRSGAGGAILLLGRSVERRSDCGHFGSVDWRARVRIRCQAILALNASTIRSVGVAIWPRLLLGEDWASGEPKLCADGGYQLRLGVLGVPLIMVLDTIGTIL

SEQ ID NO: 57972 - protein, 93 aa, Zea mays
  Coding DNA Sequence Number=SeqID_16193
MDAACGYQDVKAECMKAQEEAVATKAECATIKVNLREKKMKAEQLKQVFHLLELEGEGLFDHLVACVGMESVGLPGVIQGLMTFSALGTQGRS

SEQ ID NO: 57973 - protein, 146 aa, Zea mays
  Coding DNA Sequence Number=SeqID_16194
  Gene Ontology: Mol. function=methionine adenosyltransferase activity; Cellular component=cytosol; Biological process=one-carbon compound metabolic process
  Homolog annotation: Hit_ID=P43282; Match level="QueryCoverage=67%, HitCoverage=30%, E-value=2e-26, Identity=56%"; Hit description=S -adenosylmethionine synthetase 3
  Pfam annotation: Domain name=S-AdoMet_synt_N; Domain location=33-114; Score=61.6; E_value=2.6e-15; Accession=PF00438.10; Description=S -adenosylmethionine synthetase, N-te
MVNVCFSVGTKKVATLLHLIGEVERSMKMAVLDTFLFTSESVNEGYPVTRNLMQCLMHASLKILTARLLITTKDNVDHEKIVTDTCRGIGFVSNDVGLDADNCKVLVNIEQQSPDIAQGAHGHFAKRPGEFFYKEGFINFKNITSR

SEQ ID NO: 57974 - protein, 147 aa, Zea mays
  Coding DNA Sequence Number=SeqID_16195
MGKKVTDQGVQTLLGSQPSVVDTQIDSGKDTSWALVPGSPNVSTLSADLNMADVGILSPEVLALAAVSEANNSAKLLRSKRRVATSMKDSVARATKLKAARNLDSAFAEDFLSTTVNPSSKADKRNLVEKAIDFEESEMYGNKSWRR

SEQ ID NO: 57975 - protein, 292 aa, Zea mays
  Coding DNA Sequence Number=SeqID_16196
  Gene Ontology: Cellular component=nucleus; Biological process =regulation of progression through cell cycle
  Homolog annotation: Hit_ID=Q75KP1; Match level="QueryCoverage=56%, HitCoverage=51%, E-value=4e-34, Identity=45%"; Hit description =Putative cyclin
  Pfam annotation: Domain name=Cyclin_N; Domain location=17-126; Score=- 27.0; E_value=0.034; Accession=PF00134.13; Description=Cyclin, N -terminal domain
  Subcellular localization annotation: CTP_CleavageSite=8; ConfidenceScore=5.08e-01
MRKPASTAAATLSSHPLALRRLARLLALLARPPQPCGYLLPILRRGLHISRSRSLLPAADADQQPWMPQLLSVACLTITAKMEETVVLRRLDIHQNQVPSEKYNFDLDAIQRMEIYVLDSLNWRMEVVTPFSYINYFVDKFTGGKPLSCGFISRCTGSLEATKLLQFRPFEMAAVVLSAAAESQENVRRCHEALQEVGLVKKKIDYTASPSRVLDASCFSFKTDDNQTTGSALTVLFASDIRTVFVMRLSFNRDAQFGLFDGDGKPAKALDARPLTNVVNDLEAKMKGGQSS

SEQ ID NO: 57976 - protein, 157 aa, Zea mays
  Coding DNA Sequence Number=SeqID_16197
MGIKAKRAERTRWPAVNRASIRQGKRRYCRTKCEDERCIDEDLECATHDTQLAYHAGSRKRPRGQQRSQGHSTVRTEQGKRGEREQGDPASWKNTARTELRLGARSNPGSRAEGWKPRRRKESATQGDLTGAGARGRRRASTMGAESSTRREETEAR

SEQ ID NO: 57977 - protein, 736 aa, Zea mays
  Coding DNA Sequence Number=SeqID_16198
  Homolog annotation: Hit_ID=Q2QYN0; Match level="QueryCoverage=99%, HitCoverage=92%, E-value=0.0, Identity=56%"; Hit description =Expressed protein
  Pfam annotation: Domain name=TFIIB_Zn_Ribbon; Domain location=84-126; Score=13.2; E_value=0.011; Accession=PF08271.2; Description=TFIIB zinc-binding
  Pfam annotation: Domain name=TolA; Domain location=144-494; Score= -155.4; E_value=0.09; Accession=PF06519.2; Description=TolA protein
  Pfam module annotation: Pfam domain module=TFIIB_Zn_Ribbon::TolA; Domain location=84-126::144-494
MLPWLVVPLIAIWAATQLLLPAAYRLEVTSPRLACVSVLLLTLFWYEILLPRLSLWRARRSARLREERRAHALELHKLRKIATRRCRNCSNPYREQNPGGGKFMCSYCGHVSKRPVLDLNSTGKASSRWPCAQDCGDWLDLRCSASPSTSFWGFSWHLLLSFFTTTVRWLLRKTFRFTSSGDGEGLGPDGKRLAKAGDNGGKAEESRVEKARRKAEEKRLARLEREMLEEEERKQREEMTKLVEERRRLRDEKAAAEERSKSATPVGEKDARKEAERRRQERRKKEDKGPSKSNSDCEDIDRRLGREGDMKRAFDRKIESDRREGYKPHYFEANNRSNKTVESRAKYFGRMTGGFLSSSRGFGGGSFFGRSIQAPAPQVNKVSRPIVPATDQGNAAKRDVQHASTQAAAKSTSAGETRNSWTNFNRPVSPNVQPAPTSFKKSWHQLFSRSASVSPCPDATTSARDTNQKPEPNGAQLSNAYTFLFQYPPLDSKPSSSQSMQFPGFPPLNGAPPNKPLPHFPAGHMPFYDDAESVVFEDPEQFEDPCYDPDAIALLGPVSESLDNFPPDLDCGFISSDVVKESHGRPSPIESPLSRSRMVEENPIKPLHLLVAKRPGGPIQPEASSEQRTWQMWSTPLVHESLGLQGHQSQWLQQTNQLNYSANVFNGRTNAPLGTGLNDSDPWLQKAPFKQLPPDTPSLFLPHEIPGKLHNDLVFGSPNKSAREHPFGSPGPSWPK

SEQ ID NO: 57978 - protein, 59 aa, Zea mays
  Coding DNA Sequence Number=SeqID_16199
  Gene Ontology: Mol. function=molecular_function; Cellular component =clathrin vesicle coat; Biological process=intracellular protein transport
  Homolog annotation: Hit_ID=P35602; Match level="QueryCoverage=96%, HitCoverage=22%, E-value=2e-15, Identity=47%"; Hit description=AP-1 complex subunit mu
MGSVAYAPERDAMVWKVKSFPGGKGIQVRYLKIIEKSGYQALPWVRYITMAGEYELRLI

SEQ ID NO: 57979 - protein, 162 aa, Zea mays
  Coding DNA Sequence Number=SeqID_16200
MSKERSTVPERARTKWISSAVRHCREAESSSAVVKLEQRSVSGFLERIPRQGGFRKMYRARVGGVEGLVCKIDVAPLDVEDWRVWSGLTLLMGAAALLAHKIRCLTGNVDAFCTNGNSNVTWISCEKRRLDAKRAKWAKRAYRAGTARLSRLSAVLGPGLRH

SEQ ID NO: 57980 - protein, 104 aa, Zea mays
  Coding DNA Sequence Number=SeqID_16201
  Gene Ontology: Mol. function=zinc ion binding
  Homolog annotation: Hit_ID=Q9FJ71; Match level="QueryCoverage=96%, HitCoverage=7%, E-value=5e-18, Identity=49%"; Hit description =Arabidopsis thaliana genomic DNA, chromosome 5, P1 clone:MTE17
MDDVKKKLVVPSTYAPNLQNADNITLENVEIYVEAVKGALHMLENGASIADAKSVCPPNVLFQLVKWKLKMNKLSVVLAPFLHGMRYTSYGRHFTKLDKLQLFS

SEQ ID NO: 57981 - protein, 41 aa, Zea mays
  Coding DNA Sequence Number=SeqID_16202
MQIVDKLQWYIQSGDTFIKGRSRMKKKLLYNIHDRLYPQQT

SEQ ID NO: 57982 - protein, 111 aa, Zea mays
  Coding DNA Sequence Number=SeqID_16203
MARPTTSCQPHRASMPRRGGLRRGRTTAWEGRAGEGRTTLGEGDGRRGGGASSPWLRQSSTQTVAVLGGRRETATEKERGTLCWLYFDYNSDSDGVLLCPHDDEAVLVTTL

SEQ ID NO: 57983 - protein, 92 aa, Zea mays
  Coding DNA Sequence Number=SeqID_16204
MAESPPPFVGVAQPFCAVCSALALPSDAGARAIFPEYLSEGRQWGSRRSARFAKGVQRFIQFDFVSHPPCGGKEEGVEADLREFQDFGEFED

SEQ ID NO: 57984 - protein, 118 aa, Zea mays
  Coding DNA Sequence Number=SeqID_16205
MGKDKKGRGSPRRSGDKRKREPSPPSEDFGDSEYSEEEFSSGFEGSPVYAYPPASSDDSDDSQGIAAEVWTYIQYVERAGLEGLDESDVFSDENFSDCYLREGRRLYPARCADIRLPP

SEQ ID NO: 57985 - protein, 162 aa, Zea mays
  Coding DNA Sequence Number=SeqID_16206
MAMMGSISEKMYLCQVPNFGFEMIKLRSGGTDTGAPENADRSGKDFAAAQLALVRWSFGSTAVGLWLRKKCSSESGPDKPERGRENQRVSRVADDRERGREDLAEGASERGKVGEQGAGIKRGGDVRRWQEIARWTLLCKITLDEANPRGLCLQYEQSPPPM

SEQ ID NO: 57986 - protein, 72 aa, Zea mays
  Coding DNA Sequence Number=SeqID_16207
  Gene Ontology: Mol. function=Rab escort protein activity; Biological process=regulation of GTPase activity
  Homolog annotation: Hit_ID=Q9C8Z5; Match level="QueryCoverage=93%, HitCoverage=12%, E-value=2e-16, Identity=58%"; Hit description=Rab escort protein, putative; 48705-51166
MADYNQDGADPCEKLITTREGIETIDLYSSSNGRFANAEGAFIYPMYGHGELPQAFCRCAAVKDAISISTNY

SEQ ID NO: 57987 - protein, 250 aa, Zea mays
  Coding DNA Sequence Number=SeqID_16208
  Gene Ontology: Mol. function=Rab escort protein activity; Biological process=regulation of GTPase activity
  Homolog annotation: Hit_ID=Q9C8Z5; Match level="QueryCoverage=88%, HitCoverage=43%, E-value=5e-26, Identity=35%"; Hit description=Rab escort protein, putative; 48705-51166
MAEAAADSSNAAVDGGGGSVQNDYPTIDPTSFDVVLCGTGLPESVLAAACTTAEKTPSSLASFLSPEATPATSTVAATASDSHIVVDLHRQIVYSEVETSGAAPEPARRFPVDLVGPRVLYCADDLVGPRVLYYADEAVDLLLRSGGSHHVEFKSVEGGSLLYWEGCLYPVPDSRQAITTLKLKEKNILFRFFKLVQAHIAAALASGDETGQGDASARILEEDLDLPFVEFLRKQGASSQDESVRATPRD

SEQ ID NO: 57988 - protein, 130 aa, Zea mays
  Coding DNA Sequence Number=SeqID_16209
MQVVCNRTTETHPFDFDASSMEAQAHTSCNRRADYYVRETAPPLAPMPHLLDCGTSAATRGNPAHSPTVPTEHIGHGSVSRERRRDGRYGQKWASSNGGSWDRERGYFERDPSPRRKRAPSPPTNQGFEG

SEQ ID NO: 57989 - protein, 67 aa, Zea mays
  Coding DNA Sequence Number=SeqID_16210
MGTNGHLDLDTEGDRWREVVVAPAGFTRQSVNYSEANFPKLSSSESLHSWKHRITVRIYTGTVPLNY

SEQ ID NO: 57990 - protein, 299 aa, Zea mays
  Coding DNA Sequence Number=SeqID_16211
  Gene Ontology: Mol. function=hydrolase activity, hydrolyzing O -glycosyl compounds; Cellular component=vacuole; Biological process =carbohydrate metabolic process
  Homolog annotation: Hit_ID=Q8RZ29; Match level="QueryCoverage=98%, HitCoverage=99%, E-value=1e-136, Identity=76%"; Hit description =Putative chitinase
  Pfam annotation: Domain name=Glyco_hydro_18; Domain location=27-286; Score=156.9; E_value=5.1e-44; Accession=PF00704.18; Description =Glycosyl hydrolases family 18
MAVARPLAPFQLIAVLSLALLVTSHAGGIAVYWGQNTGEVTLSATCASRRYQFVILAFVSQFGEGRAPRLDLSGHCDDASSGGCSGLSDDIRSCQRRGVKVLLSIGGGEGRYGLSSPADARLVAAYLWNTFLGGTSSSRPLGDAVLDGIDFDIELGRAKFWDNLARDLKDMGKDGDKAVLLSAAPQCPFPDQWDGAAINTGLFDYVWVQFYNNPECQFSSGRNAFLDAWKQWESVPAGQIFLGLPASKDAAGTGFVPAGQLTSQVLPLIKGSPKYGGVMLWSKFYDDRTGYSSAIKSHV

SEQ ID NO: 57991 - protein, 329 aa, Zea mays
  Coding DNA Sequence Number=SeqID_16212
  Gene Ontology: Mol. function=hydrolase activity, hydrolyzing O -glycosyl compounds; Cellular component=vacuole; Biological process =carbohydrate metabolic process
  Homolog annotation: Hit_ID=Q8RZ29; Match level="QueryCoverage=99%, HitCoverage=100%, E-value=1e-137, Identity=71%"; Hit description =Putative chitinase
  Pfam annotation: Domain name=Glyco_hydro_18; Domain location=26-316; Score=170.0; E_value=6e-48; Accession=PF00704.18; Description =Glycosyl hydrolases family 18
MANRALAPFLLVTTLLVSLLATCHGGGIAVYWGQNDGEASLSETCASGNYKFVILAFVYKFGKGQTPQLDLASHCDPSSGGCTGLSKDIRSCQNSGIKVLLSIGGGDGSYGLSSEGDARDVAAYLWNNYLGGTSSSRPLGDAVLDGIDFDIELGGAKYWDSLAQVNSHTAFSSSHTRSVVLIDSAFAHRLHLGRTPPCRDLKNKGGKGVLLSAAPQCPFPDEWDGGAINTGLFDYVWVQFYNNPPCQVNAGRGAFMDAWKQWESVPAGQIFLGLPASKDAAGTGFVPADDLNSNVLPLIRGSPKYGGVMLWSKYYDDRAGYSDAIKSHV

SEQ ID NO: 57992 - protein, 300 aa, Zea mays
  Coding DNA Sequence Number=SeqID_16213
  Gene Ontology: Mol. function=hydrolase activity, hydrolyzing O -glycosyl compounds; Cellular component=vacuole; Biological process =carbohydrate metabolic process
  Homolog annotation: Hit_ID=Q8RZ29; Match level="QueryCoverage=99%, HitCoverage=100%, E-value=1e-127, Identity=73%"; Hit description =Putative chitinase
  Pfam annotation: Domain name=Glyco_hydro_18; Domain location=28-287; Score=179.0; E_value=1.2e-50; Accession=PF00704.18; Description =Glycosyl hydrolases family 18
MAARELTRLHLQLVAIVLVAILATCHAGSIAVYWGQNDGESSLSDTCASGNYKFVVIAFVYKFGKGQTPELNLAGHCDPSSGGCKCLSKDIRSCQRRGVKVLLSIGGADGSYGLASERDAREVAEYLWNNYLGGNSSSRPLGDAVLDGVDFDIERGGAKYWDVLARELKDMGKEKDGNAVLLSAAPQCPFPDEWDDGAIKTGLFDFVWVQFYNNPPCQVSAGPRAFLHAWKRWQSVPAGQIFLGLPASKSAAGTGFVPAGKLTSQVLPLIRRSRKYGGVMLWAKFYDDHTGYSDAIKRHV

SEQ ID NO: 57993 - protein, 286 aa, Zea mays
  Coding DNA Sequence Number=SeqID_16214
  Gene Ontology: Mol. function=structural constituent of ribosome; Cellular component=intracellular; Biological process=translation
  Homolog annotation: Hit_ID=Q8LR24; Match level="QueryCoverage=78%, HitCoverage=100%, E-value=2e-98, Identity=78%"; Hit description =Putative 60S ribosomal protein L10A
  Pfam annotation: Domain name=Ribosomal_L1; Domain location=70-282; Score=180.5; E_value=4.1e-51; Accession=PF00687.11; Description =Ribosomal protein L1pL10e family
MAQINPPNGGGCNYPRVEFAADPTDERAVATAALGKGEPDEWGSPDSDSRNAVRNSGAGTMSKLQSDSLRDAIASITNDSREKQRKFVETIELQIGLKNYDPQKDKRFSGSVKLPHIPRPKMKVCMLGDAQHVEEAERIGIDNMDVEALKKMNKNKKLVKKLAKKYHAFLASEAIIKQIPRLLGPGLNKAGKDLFLFCTLGKFPTLVTHQESLESKVNETKATVKFQLKKVLCMGVAVGNCGMDEKQIFQNVQMSVNFLVSLLKKNWQNVRCLYLKSTMGKVYRLF

SEQ ID NO: 57994 - protein, 36 aa, Zea mays
  Coding DNA Sequence Number=SeqID_16215
MPRIFPPQPDEASALSKTDRGGDEERSDVELAVTEH

SEQ ID NO: 57995 - protein, 58 aa, Zea mays
  Coding DNA Sequence Number=SeqID_16216
MVGTKCGHCTTASRGQWGIVRQGGSLEEMVAGITWPTTLPPGWIVEWDPASAEEEHEE

SEQ ID NO: 57996 - protein, 43 aa, Zea mays
  Coding DNA Sequence Number=SeqID_16217
MAGARAGSAELVGANDGVRTVGLMGFVGWSQRYGVIKLGLSHC

SEQ ID NO: 57997 - protein, 152 aa, Zea mays
  Coding DNA Sequence Number=SeqID_16218
MPHWNSEITVAEHQPPATARRPSYQAEFLATDELPHLRTWTGRLRPSPGNDGPPCDVVGPSPRSGEAEAPPRSRMSPSSEVEAESEPWGRARRSPSSEVEVESEPWVGRGGDRLPRLRLCPSPRVGQGGVRRPASRLSPSPRVGRGGASYGA

SEQ ID NO: 57998 - protein, 228 aa, Zea mays
  Coding DNA Sequence Number=SeqID_16219
  Homolog annotation: Hit_ID=Q6Z3F8; Match level="QueryCoverage=50%, HitCoverage=31%, E-value=6e-53, Identity=87%"; Hit description =Transducin / WD-40 repeat protein-like
MLIRSDILKGRYDVCCPMMSAWDLHKAWPESEFKVVADAGHSANEVGIAAELSIKGVYNAHPTADVFINFASFRRELRGFGFIQYFDPEDASDAKGKQEEALLTSAQARCIADVRADASSTTFLAGTLSLKEENEVHLIRLSPAESELVCDGVFYHPNEIWDLKSCPFDHRVFSTVYTSGEGFGASVWKIPELNGQSNSPQLEQLFELSGHTGKIRRWTPVSVGFWLL

SEQ ID NO: 57999 - protein, 96 aa, Zea mays
  Coding DNA Sequence Number=SeqID_16220
MATVVKADSQRGRHMLQRVEGWPLSKVRSTTSNHDSDNFFERRIQQINERDESDNEKGNQDISVLTEFTSLYSLIRLASSKGSMQKPILLTKAQKS

SEQ ID NO: 58000 - protein, 88 aa, Zea mays
  Coding DNA Sequence Number=SeqID_16221
MAMMGSTSEKLYLCQVPNFGFEMIKLRPGPFNWSYASSWVSFVSGRLIPERPTRNGSGEMARVACTLHGKRLDGDVSVLSVGVNPVWS

SEQ ID NO: 58001 - protein, 120 aa, Zea mays
  Coding DNA Sequence Number=SeqID_16222
  Homolog annotation: Hit_ID=Q9FUL7; Match level="QueryCoverage=24%, HitCoverage=21%, E-value=2e-07, Identity=90%"; Hit description=40S ribosomal protein S24
  Subcellular localization annotation: CTP_CleavageSite=73; ConfidenceScore=5.56e-01
MAAWTPGGAAAAAPDGRTGTGTGTARPGGAAASTAKWQTGRTGRNPNWAGRWAKFYRRNFTISTFGPMHLSLACMSQSSVMKNGLATKVEKSRKQMKERKNRAKKIRGVKKTKAGDAKKK

SEQ ID NO: 58002 - protein, 334 aa, Zea mays
  Coding DNA Sequence Number=SeqID_16223
  Gene Ontology: Mol. function=transferase activity; Cellular component= integral to membrane; Biological process=glycolysis
  Homolog annotation: Hit_ID=Q2KNB7; Match level="QueryCoverage=85%, HitCoverage=63%, E-value=1e-111, Identity=66%"; Hit description =Hexokinase-9
  Pfam annotation: Domain name=Hexokinase_1; Domain location=38-212; Score=81.2; E_value=3.2e-21; Accession=PF00349.11; Description =Hexokinase
  Pfam annotation: Domain name=Hexokinase_2; Domain location=214-334; Score=-15.9; E_value=4.4e-12; Accession=PF03727.6; Description =Hexokinase
  Pfam module annotation: Pfam domain module=Hexokinase_1::Hexokinase _2; Domain location=38-212::214-334
  Subcellular localization annotation: CTP_CleavageSite=20; ConfidenceScore=5.18e-01
MRKPAALVVSTAVFAAAAVVAVMARQRLREARRWARAGAVLRDLQERCAAPVERLRQVADAMVAEMRAGLASNDSEGDSGSSVLLKMLVTYVDSLPSGCHEFAFLSHTSNSELFDFIAAALAKFIASEGEGFYLPEGMQRQLGFTFSFPVKQNSVASGTLIKWTKGFAIDEMVGKDVVAELNKAIKRQGVDMEVTVLVNDTVGTLAAGRYVDNDTVAAVILGTGTNAAYIEHMDSIPKWCGPPPESGNMVINMEWGNFRSTHLPLTEFDVALDAESLNPDEQIYEKLISGMYMGEIVRRVLLKMAQDASLFSDNVPLELEVPYILRYGILVTVQ

SEQ ID NO: 58003 - protein, 82 aa, Zea mays
  Coding DNA Sequence Number=SeqID_16224
MAPPLSLGAPPPCVLVWGKVEEPGPSTYYRTVVIKLERTPSGGESQPLARDQTGDSASSAWMIVNRGSRIQWPVFNTGSQVK

SEQ ID NO: 58004 - protein, 83 aa, Zea mays
  Coding DNA Sequence Number=SeqID_16225
MAVIFGKLGSARTWSFKPRPASTICCNPPGGVGLVAALPREGHLHQPPRLWTAERQERRREYREGEAQEDVSASSAKSTEGKG

SEQ ID NO: 58005 - protein, 82 aa, Zea mays
  Coding DNA Sequence Number=SeqID_16226
MAPPLSLGAPPPCVLVWGKVEEPGPSTYYRTVVIKLERTPSGGESQPLARDRTGDSASSAWMIVNRGSRIQWPVFNTGSQVK

SEQ ID NO: 58006 - protein, 83 aa, Zea mays
  Coding DNA Sequence Number=SeqID_16227
MRMMVLGFDSGNGELPILPMQTPSDLRESLVAAHATLKVADNEVGSLRACLEEADHRIAGEEIMARCTRAYMQHGIQFGYDRI

SEQ ID NO: 58007 - protein, 127 aa, Zea mays
  Coding DNA Sequence Number=SeqID_16228
MAVIFGKLGSARTWSFKPRPASTICCNPPGGVGLVAALPREGHLHQPPRLWTAERQERRREYREGEAQEDVSASSAKSTEGKGRVCVRILEDVLTREHQDKLTRGWAKERTGHGKITAMMTPLVFIP

SEQ ID NO: 58008 - protein, 60 aa, Zea mays
  Coding DNA Sequence Number=SeqID_16229
MALGLARARRWVMRGRGAGGALARAEGVEHVEAFSAKVGSSQGNTWGVTGFVRVIVHPFI

SEQ ID NO: 58009 - protein, 225 aa, Zea mays
  Coding DNA Sequence Number=SeqID_16230
MASRDTNQSLRTTIHFRSLIFSFDDEGEAEGDMGRATLAWPPPFGSPDTVSEALNALGLAPRKRHEGPRLAPLSEANEIRRQIMIHMGPTPSYDNLSTFFMSYTKFSTSYDAKTSSYYDGSSSRSSAFSPRLCHALAVIATLVAHGHLPTSNDLEFVGMADGGGDLIFDALCTDSDSNLNPPKSSEEEPRPGGKENEDHPTVAASSMIPAQWGATHGRSRRGHRT

SEQ ID NO: 58010 - protein, 646 aa, Zea mays
  Coding DNA Sequence Number=SeqID_16231
  Gene Ontology: Mol. function=binding; Cellular component=nucleus; Biological process=chromatin modification
  Homolog annotation: Hit_ID=Q337E1; Match level="QueryCoverage=98%, HitCoverage=93%, E-value=0.0, Identity=54%"; Hit description=TPR Domain containing protein, expressed
  Pfam annotation: Domain name=SET; Domain location=138-440; Score= -14.5; E_value=0.021; Accession=PF00856.18; Description=SET domain
  Pfam annotation: Domain name=TPR_1; Domain location=27-60; Score =15.5; E_value=0.076; Accession=PF00515.18; Description =Tetratricopeptide repeat
  Pfam annotation: Domain name=TPR_1; Domain location=549-582; Score =5.2; E_value=1.3; Accession=PF00515.18; Description=Tetratricopeptide repeat
  Pfam annotation: Domain name=TPR_1; Domain location=67-100; Score =12.0; E_value=0.2; Accession=PF00515.18; Description=Tetratricopeptid e repeat
  Pfam annotation: Domain name=TPR_2; Domain location=27-60; Score =15.6; E_value=0.18; Accession=PF07719.7; Description=Tetratricopeptid e repeat
  Pfam annotation: Domain name=TPR_2; Domain location=549-582; Score =9.7; E_value=2.4; Accession=PF07719.7; Description=Tetratricopeptide repeat
  Pfam annotation: Domain name=TPR_2; Domain location=67-100; Score =10.1; E_value=2.2; Accession=PF07719.7; Description=Tetratricopeptide repeat
  Pfam module annotation: Pfam domain module=SET::TPR_1::TPR_1::TPR _1::TPR_2::TPR_2::TPR_2; Domain location=138-440::27-60::549-582::67 -100::27-60::549-582::67-100
MAVSDCKVMQELTDPELALCRKDKVKAVELKGHGNACFSRREFGKALRFYSQALRHVPINSGGMDVNLAWYRKGMVKTALKNYSSAIHDLEVALSQEVTSSGKSNIEQELKLILEKHESVNEAGTSNCDSKDRDLPLAGQPHKIVIESISTPNKGRGMISTDDIPPASLIHVEDPLAAFLHKHELKIIMKSSRETHCHFCFSETPADVVFCPSCTIPIYCSKRCQEQSAGHISRDEDTNLGYSTNVANLSITSSCKSPRSKLFAEHRHECGGAHWAAVLPADVVLAGRIIAHSIVKRMPSGKSFAFSGPNLPTGYTHGGQTRNQTSLELKLQSDMPKLVLLIFQIKVNSIAIVCMRSMDRGPEHTINRGFYVAEGAKMCSVEQVRVAQALYVSGSLFNHSCQPNVHAYFLSRAFVLRTTEFIKSGSPVELSYGPQVGEMHISERQKSLQENYYFSCQCSSCSELNLSDLVMNSFCCPQSNCLGAISESTYYRSKENFVNVSLGGSYVCKLSLPVRLKKHTFLDKTLITEALQSLKQLKKLRHPYSKALAQAEDTIAEAFAKVGDQELARKHCEASIQILEKLYHPKHIIIAHELIKLVSILLSLGDGASAAATFAQAEAIFSLYYGSHVEKVLTYMGALKKAVIDV

SEQ ID NO: 58011 - protein, 74 aa, Zea mays
  Coding DNA Sequence Number=SeqID_16232
  Subcellular localization annotation: CTP_CleavageSite=45; ConfidenceScore=5.69e-01
MAAAPWSLALCSHGTWVVFFRRRPPHRRSSPAMVASMPCTLGSTPAGMPSQATCCSPWLPQAPAPHLLPVYVLK

SEQ ID NO: 58012 - protein, 594 aa, Zea mays
  Coding DNA Sequence Number=SeqID_16233
  Gene Ontology: Mol. function=zinc ion binding
  Homolog annotation: Hit_ID=Q2QZH2; Match level="QueryCoverage=90%, HitCoverage=89%, E-value=1e-95, Identity=45%"; Hit description =Expressed protein
  Pfam annotation: Domain name=VWA; Domain location=96-268; Score=31.8; E_value=2.3e-06; Accession=PF00092.18; Description=von Willebrand factor type A domain
METWLVLTALLLSLSLVYFFLPFISCPWIDGTYGDDESSTHTHVPQAAAAGTETVKVITTPVFPHIPRLQASKDFQVLVRVEAPPALQQHRRVPVDLAVVLDVGASTGTGTGVPRLDAVKKAVKFIISQVHDNDRLAVVGPSNYRLVTGFKDTYDARHNAQKSVEQLQHRGEFTSGAGLEEAIKILEELPATASRSSRARFVILVTDRAVAEGSSRFSKLPRESLPPVHTFGLGEAHDPRELLHIARESQGTYSFVDDQNTDGITGAIAVCLSGLKNVVAVGARVRLETPVGSGVTIERIQSGGYTYSRTRPITTRDDKTYVEVALGALYAGEVKSFLVHLSVPALLASTSTVVADGCYRQQLLTASLVGHYTTSDEEYAAAPASPSPTVTQAILYVQRPPPEALDVFCGGALQTVPVPVVMNHIARFGVLEMVATFVDTDIGRHSTVTAEVATKLRAQWEKFVQARQFWSGLNLGVLEDEVSWMVNILEKAASRSGSSAATAYMLSWLSSYQMQRPTAMGSPDSVAAAFVTVNMQLTLLEVRKGIDTLPPPQPPIVCVDPLPPPLFSRPDGTTTPTASSIPPNPPIVLMDDVN

SEQ ID NO: 58013 - protein, 76 aa, Zea mays
  Coding DNA Sequence Number=SeqID_16234
MATKYDNNGRAVARHGLEQGTKVSGEESDELFGREAPATASDAVAMPATTASSGRRATRRREDTMRARHHEGVDFS

SEQ ID NO: 58014 - protein, 282 aa, Zea mays
  Coding DNA Sequence Number=SeqID_16235
  Gene Ontology: Mol. function=signal transducer activity; Cellular component=integral to membrane
  Homolog annotation: Hit_ID=UPI0000D9DFFD; Match level="QueryCoverage =62%, HitCoverage=41%, E-value=2e-23, Identity=34%"; Hit description =PREDICTED: similar to Protein C9orf126 homolog, partial
MAASPQQQGQGGPGSGGWTPEQFWSLLDKADRRFARVRDLPSFGRQEPDEFAKAFRAYTQLWRMQQEHRHRLLDAGLRRWQVGEIAARIAHLYYAQYQRTADTALLSEAFVFYHAVLDRAYFQDADHHLAPAKHLRFLARFLLVALLLGRRSHTVPRLASDIRTLLDDSKKSFQDAEYKEWKHVVQEIARFLRADSPFMNMRPLRYSYAFDPPPDTLRTVPTTVKKRGLVLSDTILCSYYPNEVLSTKCEELPSNGIMLIYLSATVNIKILCRGDGNFWILS

SEQ ID NO: 58015 - protein, 92 aa, Zea mays
  Coding DNA Sequence Number=SeqID_16236
MASGLHAERNEGRGRGDGKRKGRGSPRADGDKRHGLDTASGGWRAGRGEAPTARLGMRQQGWCSAVWHTPRHGVGLDEGKEGEWHGTWAGGR

SEQ ID NO: 58016 - protein, 2040 aa, Zea mays
  Coding DNA Sequence Number=SeqID_16237
  Gene Ontology: Mol. function=protein binding; Cellular component =microtubule associated complex; Biological process=multicellular organismal development
  Homolog annotation: Hit_ID=Q9FQC3; Match level="QueryCoverage=14%, HitCoverage=96%, E-value=1e-144, Identity=89%"; Hit description =Glutathione S-transferase GST 16
  Pfam annotation: Domain name=GST_C; Domain location=116-204; Score =49.1; E_value=1.5e-11; Accession=PF00043.15; Description=Glutathione S-transferase, C-terminal domain
MEGLRIGAPIVQVYHEKSFILPDVSRVLACLYEKDVKFETHTASYRSLLRLQASSHAPVPFYDGPTFLEESREICRYIAEKYENQGYSFLLGKDALERASVEQWLHNEEHAFNPPSRALFCHLAFPLGEEDDDIDVHTRKLEEVLEVYEQRLSDSEFLVGNKFTLADLVHLPNSHYIKASNKFLYLYDSRKNVRRWWDAISDRSSWKEVLRYMKNVEEKNKQEELKKQQQQQEEAPSTDPIRVDSRKQSRTEPRTILVPPADNESSASIVPRTKKPLPGDHLVSTQQGKSRKNVHQYPSQDSELATSHSVPQEPMSMELVQERERTTRRPYTDQSQDVFKEAKVAKSTPSSAKPMYPQQPAPTSGHGEVEDTWDKGVKGRETVPDRQQMLQKWAGTAREQVSDRWKASPPSRQAAAEDVRGATGDTTQSADVLDTSKKSRGAYEEAKGPGSVKEEKTSSIYKKKPLVAQDSQEQAQTIPAGEKTDSSIQKHQQASDAPNTFVEKLNASEPARVKTHSDFSAEQPYRKDTTDDQKVIPPLSTRELTSQVQPPSKPSYDEKPTPMSQQKSDKQRVEPPIQIEAEISGVQHASPSFPRASMDDRATIGDKFAMQSIIDERVGEPTQMQTSSPDAHPASLPTKRETPEGHEIGDLGLASTPGGQISEAKKVGDDPDTVHGDVYYVNLSTQDVGKDAFKEPTVTDSLPSSAQPIQKSAITPSRQTQVEEARDKSMQSRETIPEQHKMVERKTGTPGEQLSERQKEIRPSRQSAAEDAPISDAIQPPDILDTPKKSRATFEEYIGPGSTLPKAQILDAQDSQVTKGESTVPTTDQRKDWKYEKDDETIVTEEKSLSTERSREMFQESASTAPKTHLTDSGGSNALEKTSSVYHKGPLVAQDSQEEAQVIPADEKVDGSASEHHESSGTPYSYNEKLSASAPARGDIHDGHSAEEQHKNYTADDQKVAPSLSNKEPASQVQPASEPLQRAVPDGDLPSKSFTIDQWQRMAASLHGVIMDSADDEAAISLNNDQKSRPMNQEAAPSSQSVNQMAKQSGEQRVEPPVPIVVEASDVRRAAPSLPEAARTDVATISDKFTEQSNIDERVGKPKQMQAPITSAHPASKGTLRRTPDSHEAGELLSTYEGQRLEAAKASQDPATIHEDVYDASLSTNDVAVDKKTATDHAIGDEVVTRSLHDQQTPRPASTQAQPTAEAPQDSDSFQYVRTGDVGKTELAKPTVTDQEATAPAAGPTSVDPQRANIIPAGVAHSEQKSTPPDKGSARVAQPPTPVEPIKEDGNVSAANYTNELQMSFQQQARSSAPTTIGIPASDTQSVIGKIQVVTPDKHGTDDSGKPFDLNQGHVSHASQAILGQEELTSPQGARVFPTSDTQQNFAASDEKSDKASKSFDSAEPREEDTDAATADQTTVPPTDVTRQVTISTPDASDSVSRDQESSPDDSQTRNLGSPLIASQEEASRAGGEGSTPEVHSTIVDEKKTLPSSQAQSSSTGPDSIQIGGDARLSDAGVPATSSIEKQEAEPPAETQAPTSKGLQDSGSIESPRQALTDQTVAPAMNSVAPSDSPEGPNSSRSVQTPYQQAITKGDTVVTAADQAENMQTITYQQAITPVPYTAKPSFPGAQDASRQETIPDEGPMENYSPKPGAQTQPPAATLDVSPYASSKVKSTGQGAKPPTGHQASSPETQLGSSQPGEDAPAVQKIAASDEKSATASKPFDSAEPREEDTDAATADQMTVPPTNVTRQVTSSTPDVGDTLSRDKESSPDDDQIRNLGSPLIASQEEASRAGGEGSTPKVHSAIVDEERTLPSRHDAQTSSTETDSTQIDGDARLSGVGMPATSSMEKQEAEPPTETQEPTSKGLQDSRNIESPRQASTYKTVTPAMNSAAPSDALEGPNSSRSVQTPLSTGPTKGDTVVSAADQAKDMHTIPYQQDITPSSNTGKPPFQGAQDASRQEIIPDDGPVGNYSPKPGAQTQPPAAILDVSPYALSKAKSTGQGAKTPTGHQASSPGTQLGSSQTQGKDTPEEQNIAASD

SEQ ID NO: 58017 - protein, 93 aa, Zea mays
  Coding DNA Sequence Number=SeqID_16238
MDKIMVFLLSSFIKSMELRDRLHNSVSISYIGPKYLDHLSWNSCRMLTLAEEDKKAVDLTSSALTSGPYEPHRSGSARHTHGRQGRAGWGREF

SEQ ID NO: 58018 - protein, 204 aa, Zea mays
  Coding DNA Sequence Number=SeqID_16239
MDKIMVFLFSSSIKSMELRDRLHNSAGISYIGPKYLDHLSWNSCRMLKLAEEEKKAVDLTSSALTSGPYEPHRSRFARRAEAHPDASMQKESWRQEEASRTGQTRDEDAERLSRRGSARRTLVMRLGFSGSETARRAYLEAMMRANLGDTEEGEEAEHEEEMTPRLGTRYRLSRVGQARFAEEQARFAEAGAWCITVNALNTAL

SEQ ID NO: 58019 - protein, 215 aa, Zea mays
  Coding DNA Sequence Number=SeqID_16240
MDPLGIPNHQISPYIYVPPSLCNKSSITFLHGIRLGFLSTHPTSRHNPQPPPPVAAQVRPPPGGSPIGPGRHPIPDVGASPSSLPPDIPAPAARSPFLFDGRARRGRARGTPRARVRAPIANLQPRARKREATTAAPGAPPHDDILPPSRLPWCTPGTGSAIQVQPRRGQGSGTGACSGPGASLPQVDARISTLALDRGRTTLIPSAATKSSALL

SEQ ID NO: 58020 - protein, 342 aa, Zea mays
  Coding DNA Sequence Number=SeqID_16241
MSAQHGARADIEEREMRCLGGGLDDAARSESRRDANRTAASRQVLSKEKLGLEKKPNPNFWLWFIFCRATHSLFKPTNHKTEFLPTCMPPLPESVDAESMLSQSCVLRVASFFGAASQFSFAEVTTWPDVDSEEAVVTSSSGSANKGFNAIPEVLSRLAGSWLDEDGWQVVERRKKFRCVGSPVDLRGKCYNCFSSSHLVARIGLSLTPSFVLDFSSKLAREEIALRRALFVMVIRTRLEVFGMEVLTEVAHMFDIDIESLTIHHSMPEDFLLILPDEETATSVEMVELKSRGAVTMFSSWDGTARAWLSECKFSLSAWLHRNEIKVRFLGAWLLVAQGFRV

SEQ ID NO: 58021 - protein, 175 aa, Zea mays
  Coding DNA Sequence Number=SeqID_16242
MEQPRRRSYNGRIDVIRDGGCREACLGSGVRRAEGGSRGKDALRTMGRSREMGGGWPDGEQGRAPGKDDRRGGQDARHGRATATDELRLGIGLGDGGPRRSSTRLGMETDTAGEGGAESREQGAGGAAASCHDRAGGPSRGWRVEGNLSDAAAWRRRREGDGGEKNQKSARQIKI

SEQ ID NO: 58022 - protein, 349 aa, Zea mays
  Coding DNA Sequence Number=SeqID_16243
  Homolog annotation: Hit_ID=Q6K7C2; Match level="QueryCoverage=17%, HitCoverage=27%, E-value=9e-26, Identity=88%"; Hit description =Putative OsCTTP
  Pfam annotation: Domain name=ChaC; Domain location=3-152; Score=20.7; E_value=2.4e-10; Accession=PF04752.3; Description=ChaC-like protein
MVLWVFGYGSLIWNLGFDFDDKILGFIKGYNRTFNLACIDHRGTTEHPARTCTLETDGEATTRPYAIFACPPFYTVTQCYMGKVSMVQAYKEKVYPKNKVCLVHANPHLLPLLPSQFGVGLISTGVVYQRLLIYIDIYDMCLPVLSRTIQVINPYDRGHEGSSSPLPLLPPSVNSIIPGPIKEVSNCVYENEHVLLGAVPFPSDVLRLKTLGVCGVVTLNESYERLVPTSLYEISFAQALVCGMLVLLPGYEPLGLQFGQQAYGKEKAKDPSEFITHRAKDFVSSMKDIETRFMCIVEAGNKVSRMLETKKILLDICAKIPGTKYMVIQGEPRVVIRGKKFIAFASFVS

SEQ ID NO: 58023 - protein, 700 aa, Zea mays
  Coding DNA Sequence Number=SeqID_16244
  Gene Ontology: Mol. function=lipoxygenase activity; Cellular component=cytoplasm; Biological process=electron transport
  Homolog annotation: Hit_ID=Q9AXG8; Match level="QueryCoverage=99%, HitCoverage=80%, E-value=0.0, Identity=89%"; Hit description =Lipoxygenase
  Pfam annotation: Domain name=Lipoxygenase; Domain location=2-678; Score=1152.1; E_value=0; Accession=PF00305.9; Description =Lipoxygenase
MPAALKPYRDDELRNLRGDDQQGPYQEHDRVYRYDVYNDLGEPDGGNPRPILGGSADHPYPRRCRTGRKPTKTDPNSESRLSLVEQIYVPRDERFGHLKMSDFLGYSIKAITQGIIPAVRTYVDTTPGEFDSFQDIINLYEGGIKLPKIQALEDMRKLFPLQLVKDLLPAGGDYLLKLPIPQIIQGTSQDKNAWRTDEEFAREVLAGVNPMVITRLTEFPPKSTLDPSKYGDHTSTITAEHIEKNLEGLTVQQALDGNRLYILDHHDRFMPFLIDVNNLEGNFIYATRTLFFLRGDGRLAPLAIELSEPYIDGDLTVAKSKVYTPASSGVEAWVWQLAKAYVAVNDSGWHQLVSHWLNTHAVMEPFVIATNRQLSVTHPVHKLLSSHFRDTMTINALARQTLINGGGIFEMTVFPGKYALGMSSVVYKSWNFTEQGLPADLVKRGVAVADPSSPYKVRLLIEDYPYASDGLAIWHAIEQWVGEYLAIYYPDDGALRGDEELQAWWKEVREVGHGDHKDAPWWPKMQAVSELARRLHHHHLDRVGAPRRRQLRPVPVRGVPPEQAHGEPAPDAGARQQGVRGAERDPERGFIHTITSQIQTIIGISLIEILSKHSSDEVYLGQRDTPEWTSDARALAAFKRFSDALVKIEGKVVGENRDPQLRNRNGPAEFPYMLLYPNTSDHSGAAAGLTAKGIPNSISI

SEQ ID NO: 58024 - protein, 54 aa, Zea mays
  Coding DNA Sequence Number=SeqID_16245
  Subcellular localization annotation: CTP_CleavageSite=32; ConfidenceScore=5.18e-01
MDSTGTRAVSNGAPAPRQVHAEPATRSSGTVSASPAAPAWFVSQLQHGAVSENV

SEQ ID NO: 58025 - protein, 333 aa, Zea mays
  Coding DNA Sequence Number=SeqID_16246
  Gene Ontology: Mol. function=DNA binding
  Homolog annotation: Hit_ID=Q9LGH0; Match level="QueryCoverage=65%, HitCoverage=76%, E-value=1e-25, Identity=30%"; Hit description=NAM -like protein-like
MAGSGLSDGGSTGGGGLGSSGGGRRGRGCGGAGRFGGAGGAERGGGGGLGAGVGGGHGGGGDAGGRGGDYWPAVPARARVVADPLASTMFSCRDELPSSFGQGEDVVPGNGYFSNMMMDDYVEGEFDNNSNTCPDIQPQSMQVGPIVPTSRPNHKRSKNFSDQEDEILVSAWLNISMDPVVGKDQKVGRIQLRRQSGTTMQDMVAQACALYKSEDEHEKGFQFMHCWNKLRLQPRWLGKVDDLAAPKPSNKKQKTTREGDANRTLPYETKESQVQVVENYQLTRAPGKKTAKAALVQREEKCDCSIEICGLQERSDAEKEQRRGKIHKAFALE

SEQ ID NO: 58026 - protein, 107 aa, Zea mays
  Coding DNA Sequence Number=SeqID_16247
MPSRWYIRARTGPPWCSTTATTPRTLQTVGYVLGFSQLDEQQMSSSSDLEQQEWKCRLATELISEATATNERLCSSVVDSVTKGTKMLQSYLSNFKVYGKSKTLTTG

SEQ ID NO: 58027 - protein, 476 aa, Zea mays
  Coding DNA Sequence Number=SeqID_16248
  Gene Ontology: Mol. function=adenylosuccinate synthase activity; Cellular component=chloroplast; Biological process=purine nucleotide biosynthetic process
  Homolog annotation: Hit_ID=Q851S8; Match level="QueryCoverage=99%, HitCoverage=100%, E-value=0.0, Identity=80%"; Hit description =Putative adenylosuccinate synthetase
  Pfam annotation: Domain name=Adenylsucc_synt; Domain location=67-475; Score=784.5; E_value=6.2e-233; Accession=PF00709.11; Description =Adenylosuccinate synthetase
  Subcellular localization annotation: CTP_CleavageSite=41; ConfidenceScore=5.30e-01
MPLAPLSLEPPPFRLIRPATGSGGRVLPVPGPAPRLCRSLRAAPVAPDTTEEPFAAARGRLESLSQVTGVLGTQWGDEGKGKLVDILSQRFDVVARCQGGANAGHTIYNSEGKKFSLHLVPSGILNENTQCVIGNGAVVHLPGFFKEIDGLESNGISCEGRLLLFDGLREAELGNSFIGTTKRGIGPCYSNKVTRNGLRVGDLRHMDIFGAKLNTLLRDAALRFKDFEYDNKILKEEVEKYKKFAERLEPFITDTVHFVNQSILQKKKILVEGGQATMLDIDFGTYPFVTSSSPSAGGICTGLGIAPRSLGDIIGVVKAYTTRVGSGPFPTELLGNTGDLLRASGMEFGTTTGRPRRCGWLDIVALKYCCQINGFSSLNLTKLDVLTGLKEIKLGTSYYTDDGNSVQSFPADLSLLEQVKVKYEALPGWEEDISSIRDYSDLPETARRYVERIEELVGIPVHYIGVGPGRDALIYK

SEQ ID NO: 58028 - protein, 61 aa, Zea mays
  Coding DNA Sequence Number=SeqID_16249
MEYGPSLERNLLKEQANIDQKSLTHRKSCRNIDELIKNVDKEYNDYNPKIQNRIVTNQQQA

SEQ ID NO: 58029 - protein, 154 aa, Zea mays
  Coding DNA Sequence Number=SeqID_16250
MAFLFLLASKSCFLHSKNSVLSREEAQLVSLHLIAQPLFPCVGDCGSFLDEVLTSEEDGDGSRRRDATIGVGSGASLLSLLHACHPASPRHASRGPLRASLVPRRTRSHECQRSRLPTPEQIARRLLLARNLGGGNSGYEVLFSAACPRQAQTR

SEQ ID NO: 58030 - protein, 465 aa, Zea mays
  Coding DNA Sequence Number=SeqID_16251
MSGAPARRAWICHYAALSSGAPDNHYSLSEHSLTVTTWSPLAITVVWSPASYTCPCLAPSPHIPLCMSVVSAGLCRRRMSHRQGEDDQDPPRPFKQYKGKAVYLEQLGSKKKRWLDRATYVEVVEEAIADQVEQGDPVTTPPSTMLAPTTLEPSTTSVVPTTSSTPASTAPASASAPPHFRERDETEVRPIVADLRLLDLQRATTVRDPGVLQGSAQIALRAHQCLDLSTFRIAADTESKGHITYLPGLYSLLTFGGRYVEEWVRVFYATVWIDPNHLWMRFRFERPPHRPHGGVAPDTSHIAALFRPPFIDVSQRSPVDFTPATKFLYELMRRTLLPRMGYREATTHIQLWLLGALVSHSVFNVVDFLICEIEDIVLDDGNLADGEYVLVPEQGAAQEVAPDPAPEPAPEDLPATALEGKPRNPFEMDTSSLEDMVAGVTWPSILPPGWTVEWDPTSAEEEHEE

SEQ ID NO: 58031 - protein, 133 aa, Zea mays
  Coding DNA Sequence Number=SeqID_16252
MVIVINDNRRLYVTNVCFAEQMSIQDHEDTLQQQLLADRAEHRAFMTHILQHTGVPIPPVQSAPPPALQATVVPAIQSGTQLHSFGPTISLLRPVTLDFSTQVIGPVSAQSPVPPASPVAEREMCPWTISILF

SEQ ID NO: 58032 - protein, 416 aa, Zea mays
  Coding DNA Sequence Number=SeqID_16253
  Gene Ontology: Mol. function=hydrogen ion transporting ATP synthase activity, rotational mechanism; Cellular component=proton -transporting two-sector ATPase complex; Biological process =intracellular signaling cascade
  Homolog annotation: Hit_ID=Q2RAK5; Match level="QueryCoverage=83%, HitCoverage=73%, E-value=6e-86, Identity=44%"; Hit description =Expressed protein
  Pfam annotation: Domain name=DUF231; Domain location=241-404; Score =145.7; E_value=1.2e-40; Accession=PF03005.6; Description=Arabidopsis proteins of unknown function
  Subcellular localization annotation: CTP_CleavageSite=31; ConfidenceScore=5.19e-01
MHARHVLVSSVFLFFVVALCTVVLPPPRWPRSTSFFQPSWLPPLNRRERDDSADAHPPCDYSDGRWVRDDAADVTTYTEDCPFLDPGFRCTRNGRTDSSFRHWRWRPRRCDLPKFNATDMLERSRDGRIVFAGDSIGRNQWESMVCMLAAAVPAASSSRVYERSGKPISRHKGYLAMVFADYNLSVEYYRAPMIVMVHRFPAANNATAGSVRGGVRLDALPRHADRWAAADVLVLNSGHWWNQHKTVKAGNYFMVGDRLNKTMDIKEAFQRSLQTVKDWELSSAQLSESYFFFRSFSPSHYSNGTWNTGGSCAGQREPPTTNNGRSEEEYSWMNAMIAKMTEDIKSHGRKARFLNITHMTELRPDGHPAGHREPGTPPDAPEDCSHWCLPGVPDVWNQILYAHLLSAGYGTRRNQR

SEQ ID NO: 58033 - protein, 73 aa, Zea mays
  Coding DNA Sequence Number=SeqID_16254
MGWPNTAWKGMARSVVWDEVLKGLLGPFVVSGMGQCSHLVVQIVLCRHEDALDVEDIVGGYQIGARGALGASM

SEQ ID NO: 58034 - protein, 45 aa, Zea mays
  Coding DNA Sequence Number=SeqID_16255
MDQLTKLELPSPPKKYWFFASIRRAPSLFNIKAFCVHMNQLLEHF

SEQ ID NO: 58035 - protein, 424 aa, Zea mays
  Coding DNA Sequence Number=SeqID_16256
  Gene Ontology: Mol. function=RNA-directed DNA polymerase activity; Cellular component=nucleus; Biological process=RNA-dependent DNA replication
  Homolog annotation: Hit_ID=Q9LGH0; Match level="QueryCoverage=70%, HitCoverage=85%, E-value=4e-35, Identity=29%"; Hit description=NAM -like protein-like
MWSGAPRMAERLELERQATLDGHVPQDLEAGVNSGGAQGLHPVRVRRLPPTTGRFGGMDNIWQQYGDTNQAYGNVTYTPGIDLTLSPGNDLTRFQDSAVVHGPGPIIQENQSFSSTSQVPQPVNDRRKKGVAKREKNYSNLEDETLCSAYLNVSKDPVVGVNQPMKSYWARITDYFNEMRTTDVERSSSSLQHRWGDISRDTALFCSYYAEIERKHQSGKSEDDKIKDALKMYEGLRSSKFKFLHCWLILRKEQKWSEFLATTTSSTSQARSKADPVQQGDPTATSTPEVNVSEKIARPIGRDRAKKQRSNNSSSSSACFEMLQKIQLDRSRFEEDMKAASKYESEEMAVRYDRKLAIQEQHLKLVAESTMIQKEMLRFQQKEREDRVMTMDLDKVAPWVREYYINEQKAIAAKSRHEVSSSDV

SEQ ID NO: 58036 - protein, 194 aa, Zea mays
  Coding DNA Sequence Number=SeqID_16257
  Gene Ontology: Mol. function=magnesium ion binding; Biological process=Mo-molybdopterin cofactor biosynthetic process
  Homolog annotation: Hit_ID=Q309F9; Match level="QueryCoverage=60%, HitCoverage=20%, E-value=8e-30, Identity=57%"; Hit description =Molybdenum cofactor biosynthesis protein
  Pfam annotation: Domain name=MoeA_N; Domain location=75-194; Score= -7.9; E_value=3.1e-07; Accession=PF03453.7; Description=MoeA N -terminal region (domain I and II)
MQTLCAAAVHSGFEILRHVPIESCLALQLQPFCHARSPAPHAGATAGPENDGVAAARDRGRSRQKRGREARQLYCATIVEARAAVLSAAEGHAAPRAVPLHDALGLVLRAPDPLPPFRASIKDGYAIVASDGPGEYPVVTESRGRRRRPRRPVPDGAYTVVLVEDTKQVSDGSDGFRRMRILARAADGLNIRNV

SEQ ID NO: 58037 - protein, 445 aa, Zea mays
  Coding DNA Sequence Number=SeqID_16258
  Gene Ontology: Mol. function=alpha-1,4-glucan-protein synthase (UDP -forming) activity; Cellular component=cellulose and pectin -containing cell wall; Biological process=cellulose biosynthetic process
  Homolog annotation: Hit_ID=Q9ZR34; Match level="QueryCoverage=78%, HitCoverage=100%, E-value=0.0, Identity=88%"; Hit description =Amylogenin
  Pfam annotation: Domain name=RGP; Domain location=97-445; Score =995.8; E_value=1.5e-296; Accession=PF03214.4; Description=Reversibly glycosylated polypeptide
MDKIYRKEWAIKRRSRSRSGPMRPPSLLSLTLDAALLRIANIADLSHLPDHLLIDLFRRTLSAGKLTEKVLKLFLATDCEDIILAVRLLNIKQPLKMPLEIQDSEVDIVIAALQPNLTTFFEAWRPFFSRFHIIVVKDPDMAEDLQIPAGFDLKVYTKSDINGLLGASSSINLSGHSCRYFGYLVSRKKYVISIDDNCLPAKDTAGSTVDVVAQHMANLKTPATPFFFNTLYDPYRKGADFVRGYPFSLREGVECMLSCGLWLHNADYDPMTHVVKRNQRNTTYVDAVMTVPLGAMLPVSGINVAFNRDVLGPAMFPGLRLRNEGKHRWDTLEDIWNGLCAKVVCDSLGYGVKTGLPYVMRSDAEAGKALESLKEWEGVKVMDDVLPFFQSLKLSRTAVTVDDCVKELAGVVREKLGPKNAIFTKAADAMVEWNNLWKVHGAQNA

SEQ ID NO: 58038 - protein, 148 aa, Zea mays
  Coding DNA Sequence Number=SeqID_16259
MALKEEPEGSRRGFVGSGPSCDPGLEIQVPSDPFLLWIRKESLNVGDHIYSWKATCFLSFQVVDAKVIHLGYNNSCIFLSLKDVKVMVETTLGKEELKEAVLMCTNRVSQAEGMKVDISTRFSYEELSGAINNFSMDHKIGHDDFGFV

SEQ ID NO: 58039 - protein, 619 aa, Zea mays
  Coding DNA Sequence Number=SeqID_16260
  Gene Ontology: Mol. function=transporter activity; Cellular component= membrane; Biological process=oligopeptide transport
  Homolog annotation: Hit_ID=Q5N7W6; Match level="QueryCoverage=92%, HitCoverage=95%, E-value=1e-129, Identity=42%"; Hit description =Putative nitrate transporter NRT1-5
  Pfam annotation: Domain name=MFS_1; Domain location=47-538; Score =0.2; E_value=0.00031; Accession=PF07690.6; Description=Major Facilitator Superfamily
  Pfam annotation: Domain name=PTR2; Domain location=109-522; Score =185.0; E_value=1.8e-52; Accession=PF00854.12; Description=POT family
  Pfam module annotation: Pfam domain module=MFS_1::PTR2; Domain location=47-538::109-522
MASHRRPQSAGLSSGLPVPEQEAAGGGGGGAAEATRRPRGWRAVAFIIGFYAAASIAGNAFSFSLTSYLIGRYNMKQNAATNVNNIFSGTYNFSPVIGAFVADAFWGRFRTLLVGTVFGVAAMAVITLSATVHQLKPPPCSPLAQQAGTCAAPSALQRAVLYLGMGLLVVSAGGTSPTGLPFGADQFDERKEQHSKQGGLARFYNWYYAVAMVATFLALTVVLYVQVKVSWGLGFAIPTALMLIAFLVFLVGTKLYVYVPPEGSIFSSVARVFVASCRKWRLRLPHPDDARRQEELLYDPPAVGIGGGRRVFKLPLTLQLSFLNKAAIVTDAAAEIRPDGAPARPWSLCSVQQVEEAKCLLKIIPVWISGTVWFTMVTELTNYTFLQASTMDLHMGKHFTVPPASIVAVFYLAVALFVPVYDLLVSRATLRRGITLLQRQGAGLVVAALAFVVAAAVEPRRRRSALAHGDGMSPLSVFLLAPQLAVMGVSGGFTLVGQVEFYNTQFPEQMRTLANAVFYCAQGISSYLATLVVNIVNARTRRHGGSAGWVTDDINAGRIDYFYYAMAVLSGANFVYFLVCSYFYQYKGEQAADTPPARCEPATDSDSRTSESAAALLRT

SEQ ID NO: 58040 - protein, 110 aa, Zea mays
  Coding DNA Sequence Number=SeqID_16261
MGRLIKRPMERFCALVRGWSWGESRLSLPPEVSLGRVDTLSPADIDLERAVTTSSTEVGLGRIVTASPVQGWSWADQNCISCPRLVSDESEQRLLSEVGLAESELCFLCS

SEQ ID NO: 58041 - protein, 57 aa, Zea mays
  Coding DNA Sequence Number=SeqID_16262
MADMRARGSDGIRRGQGAAQAYARAGEPGRAVTVASPRREQHRIPEEHAVGNDSLRA

SEQ ID NO: 58042 - protein, 58 aa, Zea mays
  Coding DNA Sequence Number=SeqID_16263
MGNGCPASDDAEPALAASADPSSRLHYGSLSLKADASAGSAPRPTKPPAPIGPGGKAG

SEQ ID NO: 58043 - protein, 64 aa, Zea mays
  Coding DNA Sequence Number=SeqID_16264
MASTVRRLRGRWCVAVGRCRDATIAPIAVRWAEEIQRAPRAELCFVAALLIGEEERVGGNSREP

SEQ ID NO: 58044 - protein, 217 aa, Zea mays
  Coding DNA Sequence Number=SeqID_16265
MDLANGRDDAQKGGVGVETRRKKKVELVQDSIHGFLEEKWSDGKGEEKRLTSRQEEQELLSSLLTKLGEVENDADSDMLEPNLPHLDHQAAGKGEHSKEVELADIAKELNKIKRQNKVTHLLLGTVIVLTAVWQVNEVSFLLWVRNKLSNPFKSLGDMIKGSLKLRGRRPVLESSPLPLAGVPDVSRPDLPTLVIGSTEDRAGVSLVRSELKGIEGD

SEQ ID NO: 58045 - protein, 57 aa, Zea mays
  Coding DNA Sequence Number=SeqID_16266
MEQTQPETQGGEIGERAGEIGGVRQQPHWKECYAVSIERIALGNVQPRSVFRSRSDG

SEQ ID NO: 58046 - protein, 204 aa, Zea mays
  Coding DNA Sequence Number=SeqID_16267
MAWRKPQKNKKTPPKENIEVTLETLLSDCSNYASWSTKVINAFRTVDPQLEQITDKSIKPKGSTTSIAGDVGSLLRGMKELTTRAHTSVESCCSSSKLGTCGQNRFVGNNLVGRAYGSAGGCLQFLKVTLGIGFQSVKSSFVFRSEKVPKVHNKPIKRSRERVQTKEQRDNRRHPGRAHRTVSGAPGDSKLNFAPSGKLGAAAL

SEQ ID NO: 58047 - protein, 145 aa, Zea mays
  Coding DNA Sequence Number=SeqID_16268
MRLDPGNRHTTVEKKITMTNSHGLELSQSSGLPKIPPQCSHKALQVPPKATIACRRESRVAALSPFALGSSQRSYWRWLEMAWRARPSDLPHYIAARVTTHDQPMLDLRHKPRRWKRYALLSTGRGGGANGNGPRPERSGFTGHN

SEQ ID NO: 58048 - protein, 54 aa, Zea mays
  Coding DNA Sequence Number=SeqID_16269
MAFQTGDFYNAIPRNYSSAHMKRTRLYPLNPAQLLVMRQNLLFALQNTCEPIAE

SEQ ID NO: 58049 - protein, 61 aa, Zea mays
  Coding DNA Sequence Number=SeqID_16270
MDNIDEVTDKRLMALREIEKDKIMVVKAYNKKTTIRYLRCHEWPTDPEALLELSSPTGDKI

SEQ ID NO: 58050 - protein, 78 aa, Zea mays
  Coding DNA Sequence Number=SeqID_16271
MRQVCHSLGKREDLSKAEATSPSSSVLGAFGFRRYLRTRIREGEAQKIRRLTQRRSCEAGKLRHVRRKGNRLEDEKAI

SEQ ID NO: 58051 - protein, 102 aa, Zea mays
  Coding DNA Sequence Number=SeqID_16272
MGKGKRGKGWPHRADGKRKRPTSPPSEYFGDLLEGGGSSNSEEWRGGDGDGKGGSDGEDGDGEGDGNSKGDGDDSSKGDGKGDDDCKGDGDDNKANNITSLA

SEQ ID NO: 58052 - protein, 79 aa, Zea mays
  Coding DNA Sequence Number=SeqID_16273
MAAAVTSLLGGSRRGIQEEVLARMGEGSTICSRGSRLHGQLVWQRLRRSVTAPARVAQRIEPKRRADRTGPQTSEGGQD

SEQ ID NO: 58053 - protein, 134 aa, Zea mays
  Coding DNA Sequence Number=SeqID_16274
MCKGRRLGRKNRAKVKGREDEWDVRRWCAHAVKRPRGRAISTDRVDVVAGVERIRGGGDCSHALCREWGGGRRRHEGREKRCRMANEVAATEARTIIIVRSSGVTPNGCTFGAPNGVMKSQEKTMNSKASGEDL

SEQ ID NO: 58054 - protein, 426 aa, Zea mays
  Coding DNA Sequence Number=SeqID_16275
  Gene Ontology: Mol. function=ubiquitin-protein ligase activity; Cellular component=cell surface; Biological process=protein modification process
  Homolog annotation: Hit_ID=Q6ZKB8; Match level="QueryCoverage=98%, HitCoverage=97%, E-value=1e-178, Identity=72%"; Hit description =Putative UVB-resistance protein UVR8
  Pfam annotation: Domain name=RCC1; Domain location=112-169; Score =34.0; E_value=5.1e-07; Accession=PF00415.9; Description=Regulator of chromosome condensation (RCC1)
  Pfam annotation: Domain name=RCC1; Domain location=205-254; Score =15.9; E_value=0.013; Accession=PF00415.9; Description=Regulator of chromosome condensation (RCC1)
  Pfam annotation: Domain name=RCC1; Domain location=257-307; Score =23.8; E_value=0.0006; Accession=PF00415.9; Description=Regulator of chromosome condensation (RCC1)
  Pfam annotation: Domain name=RCC1; Domain location=59-109; Score =25.6; E_value=0.00018; Accession=PF00415.9; Description=Regulator of chromosome condensation (RCC1)
  Pfam annotation: Domain name=RCC1; Domain location=9-56; Score=14.9; E_value=0.017; Accession=PF00415.9; Description=Regulator of chromosome condensation (RCC1)
  Pfam module annotation: Pfam domain module=RCC1::RCC1::RCC1::RCC1::RCC 1; Domain location=112-169::205-254::257-307::59-109::9-56
MATPLRATAVLAWGSGEDGQLGMGGNEEKDWPHFVEALGPYAVTAVVAGSRNSLAICDDGRLFTWGWNQRGTLGHPPETKTESSPGPVDALAGFKIVQAAIGGWHCLAVDDKGRAYAWGGNEYGQCGEEPERKEDGTRALRRDIPIPQRCALKLKVRQVAAGGTHSVVLTQEGHVWTWGQPWPPGLEKVRVIAVGAFHNLALTEDVILWAWGNNEYGQLGTGDTQPRSQPIRVEGLSDLSLVDIAAGGWHSTALTIDGEVYAWGRGEHGRLGFGDDKSSHMVPLKVELLAGEDIVQLNSFQAFPMALKRLNILLSQAEQQSSFSMFAGFTNPSSDIIYVYHVFALHIVLSSFAAHINGESLFCWQYGRGDHGRLGYGRKVTTGHPMELPINLPPLSSSRDGRWQAKYVACGGRHTLAIAEWTEATD

SEQ ID NO: 58055 - protein, 115 aa, Zea mays
  Coding DNA Sequence Number=SeqID_16276
MGQKSSYLLLLVGLLAIAMLCAGPGHALSQLNDANDGGLEFSLGSKEAMAGAKTEPLDPSLSEDYEVCAVMGYGDGWFVAGGGRMAMALRWGCALWSGAGCDSEGIGGTTAIVLF

SEQ ID NO: 58056 - protein, 93 aa, Zea mays
  Coding DNA Sequence Number=SeqID_16277
MAPRKPCDDGGSQLPYGSRGTSARTQPLRQLSLRQGDGKCTRACLDEEQSHALLLGYCSWQQTLLGDLLNDLQDHLQLEKPQIEELTPLPLPL

SEQ ID NO: 58057 - protein, 356 aa, Zea mays
  Coding DNA Sequence Number=SeqID_16278
MDHSKSLALESSHQGRSKRRPLQEWWVVTKHSVDSRSPIVLVTNFPHRVVGLSVGGEVISLSSSCSPDRESKAGPYGDKPASLVPPAGTIGTPVIVGCSVMVVRLVFTGPNLGTPYVVFENIIQGYDEAACEGYLGVEPNLTLWRYFFCVELLRKREEQRLPVIDRSTPSEAPFNWSSDATPKEKTRIQSHLSGVLFHREKGVIEVDVIGAYLQRRDGSSEGLIYALYKMGKDFSSLGVEVLPSDSDVARWMRQALEIWKEVQGAAWPSLPIALECPPMRPEPSFIEFALSGTAVPTVHPSLAAREPTVMGVVEVRPVGSEFGQPAWPEHLKVKTNDGLPTAHLGLEETRSPCGRV

SEQ ID NO: 58058 - protein, 106 aa, Zea mays
  Coding DNA Sequence Number=SeqID_16279
  Homolog annotation: Hit_ID=Q94KM3; Match level="QueryCoverage=96%, HitCoverage=50%, E-value=6e-29, Identity=57%"; Hit description=MURB -like protein hMURB17
  Pfam annotation: Domain name=Zea_mays_MuDR; Domain location=1-106; Score=11.4; E_value=1.1e-06; Accession=PF05928.2; Description=Zea mays MURB-like protein (MuDR)
MQPGGKIGKVVGHLDHVCNMLEKTSIVCQQDLDNRYPSWDLLSPLDVDEHPNDVDDLLKGYISEDPELCEMTFEDQKWQDNKVVVSLAEHYRIMGYNYEEIYDSNV

SEQ ID NO: 58059 - protein, 106 aa, Zea mays
  Coding DNA Sequence Number=SeqID_16280
MVTPKEVPVELHHLRVENGVIFEDSSEEILETPTTLSESDAFAAGASSSAPHVPAAQASAPGGDDSDDSGDDEDDEEEEEENNDNIEDANIGQEDNFDGLRTVAEH

SEQ ID NO: 58060 - protein, 111 aa, Zea mays
  Coding DNA Sequence Number=SeqID_16281
MPRIILVPTLITVSEFSLCIIVVSESQFHIHFFKKGSLILISLCSVVHQFKRQFAHLEEHHSEKEKEVLHCKESMLLYQGTTAIKLNIIWLEPEMAETLRNHGATVHRSLV

SEQ ID NO: 58061 - protein, 101 aa, Zea mays
  Coding DNA Sequence Number=SeqID_16282
MHLPPRPRGESQTSVVPGEAGEDRLNTLVGVVAGLNTDLDSATLDLSRVHEELEDTHARIAAHEAQFEGRNPPEPQVPAIAVSPPRKRIRYGAPGSITRLL

SEQ ID NO: 58062 - protein, 138 aa, Zea mays
  Coding DNA Sequence Number=SeqID_16283
  Gene Ontology: Mol. function=nucleic acid binding
  Homolog annotation: Hit_ID=Q2QLR6; Match level="QueryCoverage=58%, HitCoverage=16%, E-value=6e-21, Identity=69%"; Hit description=Zinc finger family protein, putative, expressed
MEERPSPEASAGNSRAEDDFRSCCGDEEEWEDTEESFTAGVAKGELDEASVRLFFKGVSSPEAEGKKLSSIGVRIVPGVPVLPRSPPSTPADPPPPSSPPPVMEGVADPPCPCPGASGLHLRVRARALKSRIHINGRW

SEQ ID NO: 58063 - protein, 59 aa, Zea mays
  Coding DNA Sequence Number=SeqID_16284
MYYDVVNGLRHGITAVKDANSSDGRKATSPVQVVEGQRGHRGEAGNMEDLEEFQDYDEF

SEQ ID NO: 58064 - protein, 107 aa, Zea mays
  Coding DNA Sequence Number=SeqID_16285
MEEEESDPSDKNSNEHENLSLTGGCSGFGVLHDVMLDIPCLRVPRKGVYAISHLESFARSQGAMGGTIAVVPSLPPTTRRAVTGARTLQRDRWEEYHVILNAERHEL

SEQ ID NO: 58065 - protein, 271 aa, Zea mays
  Coding DNA Sequence Number=SeqID_16286
  Homolog annotation: Hit_ID=Q10KZ6; Match level="QueryCoverage=86%, HitCoverage=51%, E-value=5e-41, Identity=41%"; Hit description =Proline-rich family protein, putative, expressed
MRTAAATVPAAPALGVGLQSQLPIAAAAGKEGPALLASTDAKRIIDEERANARLEIGRAKASVQKIQSALKEQEKFSHRTGKQDVDELKEEVQEAPRVKMLHCPSKAMDIENEIQVLCDQLAKTSSYSLRLLKVISGTVQSSGFAYSLKEARKKLFEVEQFSSYKAPQNQHMLQNHMMWAGTPKLKSNLVAKHQSQKLLVQYILFFSFVAAGLVHYVEALVRRRETGYDVVILQVNGVAQAADSVHILCIGRLQMRLAKEKTIIVKEFYST

SEQ ID NO: 58066 - protein, 167 aa, Zea mays
  Coding DNA Sequence Number=SeqID_16287
MSRPSPGWPQPCLSTATGRLATELLRRGPREERRLGVIRAPRGLERASREEVRDGGVHLVGPGGAGSHPRALWARQGPRRGTWGGVRAVGGWAGSGARVGARWASGARHARRSAGRVGRALGGPRGGGWALAAWAAQEKGELGLGEKEGGAGGSWAGEAGPPGKRGG

SEQ ID NO: 58067 - protein, 147 aa, Zea mays
  Coding DNA Sequence Number=SeqID_16288
MTRASEALSPLASDLRDTAGSLSDLRLDPPQENHGSQGLPSPDHTEVVGVLDHVWDLFMDILLSGSEDGLTFLPSEASCDPGQECLTINTTRDHFPCVGSPGQNSPNIMEHIMVSAPPQLNLPPQKLSSGSSLSGSEHPPTAKGKDA

SEQ ID NO: 58068 - protein, 382 aa, Zea mays
  Coding DNA Sequence Number=SeqID_16289
  Gene Ontology: Mol. function=DNA binding; Cellular component=nucleus; Biological process=regulation of transcription, DNA-dependent
  Homolog annotation: Hit_ID=Q6YWJ9; Match level="QueryCoverage=99%, HitCoverage=100%, E-value=2e-87, Identity=50%"; Hit description =Putative MYB transcription factor
  Pfam annotation: Domain name=Myb_DNA-binding; Domain location=127 -172; Score=48.5; E_value=2.3e-11; Accession=PF00249.21; Description =Myb-like DNA-binding domain
  Pfam annotation: Domain name=Myb_DNA-binding; Domain location=75-121; Score=50.6; E_value=5.4e-12; Accession=PF00249.21; Description=Myb -like DNA-binding domain
  Pfam module annotation: Pfam domain module=Myb_DNA-binding::Myb_DNA -binding; Domain location=127-172::75-121
  Subcellular localization annotation: CTP_CleavageSite=51; ConfidenceScore=5.53e-01
MPCSSPAPTWLLRVSPAAAAADQAAASSSCSSKGGGRVLTAGTTTMDTAATAAAGGNAADLQESSSSGQSRLAARGHWRPAEDAKLRELVALYGPQNWNLIAEKLDGRSGKSCRLRWFNQLDPRISKRPFSDEEEERLMAAHRFYGNKWAMIARLFPGRTDNAVKNHWHVIMARKYREQSTAYRRRKLNQAVQRKLEAASAAVAMPPGAGAGDVAVGQHHHLLAAAAAAHAHDAAYSFAADPYGFGIRHQYCTFPFPPGAASAEDPPPPTQIHPFCLFPGPSSAAAHADSRRLPWPPSSDAPGVARYGEPHQLLQLPVQSGWIDGVGVAAAGHHEPPFVLGNNGGAAAFEGTTRQQGSGAHFEAAAAPPPPAFIDFLGVGAT

SEQ ID NO: 58069 - protein, 244 aa, Zea mays
  Coding DNA Sequence Number=SeqID_16290
  Subcellular localization annotation: CTP_CleavageSite=65; ConfidenceScore=5.60e-01
MAPRTLPNDGGSRPPYGSKRTSTRTRQPRQLSFRQAPTLLRRPRHHTNRAGPPLPRLDRDRGQIRLTALPQAHALGPLPTRRREARMWGRVTPCARAGQQRPGRAVGATTGHRPMLSRVPSRLSKPGRPLGLRACPARVSHLCARARASSSPRAGGPHARTPSWPLHPQQAAVPPSRGPRADARAPNSRGRCGPAPGKRNGVKGLLARSTAWPRAWASTPPTGAAGASPSRRRGLAAARKKGKM

SEQ ID NO: 58070 - protein, 761 aa, Zea mays
  Coding DNA Sequence Number=SeqID_16291
  Gene Ontology: Mol. function=nucleic acid binding; Cellular component= spliceosome; Biological process=nuclear mRNA splicing, via spliceosome
  Homolog annotation: Hit_ID=Q7XIR8; Match level="QueryCoverage=89%, HitCoverage=52%, E-value=0.0, Identity=88%"; Hit description =Putative DEAH-box RNA helicase
  Pfam annotation: Domain name=DEAD; Domain location=61-221; Score= -3.8; E_value=1.2e-05; Accession=PF00270.19; Description=DEADDEAH box helicase
  Pfam annotation: Domain name=DUF1605; Domain location=583-685; Score =107.2; E_value=4.7e-29; Accession=PF07717.6; Description=Domain of unknown function (DUF1605)
  Pfam annotation: Domain name=HA2; Domain location=459-549; Score =100.8; E_value=4.1e-27; Accession=PF04408.13; Description=Helicase associated domain (HA2)
  Pfam annotation: Domain name=Helicase_C; Domain location=304-398; Score=61.5; E_value=2.8e-15; Accession=PF00271.21; Description =Helicase conserved C-terminal domain
  Pfam module annotation: Pfam domain module=DEAD::DUF1605::HA2::Helicas e_C; Domain location=61-221::583-685::459-549::304-398
MSVSTFRRFNNHAKFDDRQKLKLCSINNLLRFNNVKYLVCLIFVNPSPCGALVHLCGHQPISFTTLTINVVRENQVVVVVGETGSGKTTQLTQYLHEDGYTTTGVVGCTQPRRVAAMSVAKRVSEEMETDLGDKVGYAIRFEDVTGPNTIIKYMTDGVLLRETLKDADLDKYRVVVMDEAHERSLNTDVLFGILKKVVARRRDFKLIVTSATLNADKFSKFFGGNSFVCSVPVFHIPGRTFPVNIMFSKTPCEDYVEAAVKQAMTIHITSGLGDILIFMTGQEEIEATCYALAERMEQLISSSTKTIPKLEILPIYSQLPADLQAKIFQKAEEGARKCIVATNIAETSLTVDGIFYVIDTGYGKMKVYNPRMGMDALQVFPVSRAAADQRAGRAGRTGPGTCYRLFTESAYQNEMLPNPVPEIQRTNLGNVVLLLKSLRVENLLDFDFMDPPPQENILNSMYQLWVLGALNNVGGLTEIGWKMVEFPLDPTLAKMLLMGEQLECLDEVLTIVSMLSVPSVFFRPKDRAEESDAAREKFFVPESDHLTLLNVYLQWKSNQYRGDWCNDHFLHVKGLRKAREVRSQLLDILKTLKIPLTSCHMEWDVVRKAICSAYFHNSARLKGIGEYVNCRNGMPCHLHPSSALYGLGYTPDYVVYHELVLTTKEYMQCVTAVDPQWLAEMGPMFFSVKETDTSLLDHKKRQKEEKTAMEEEMEKLRRQQAEAARMEKEKEREKRAKQQQQVAMPGLKKGATYLRPKRMGL

SEQ ID NO: 58071 - protein, 83 aa, Zea mays
  Coding DNA Sequence Number=SeqID_16292
MKKTVDIDNSQQPLSEGPGELVPKHTTAKKEIAKLLGRLLVSTTPSSLDADYVSSSLVLVNFVDSCIHGLALPFADVLRFPGT

SEQ ID NO: 58072 - protein, 622 aa, Zea mays
  Coding DNA Sequence Number=SeqID_16293
  Homolog annotation: Hit_ID=Q69S26; Match level="QueryCoverage=89%, HitCoverage=99%, E-value=0.0, Identity=70%"; Hit description =Serine/threonine phosphatase PP7-related-like
  Pfam annotation: Domain name=DUF1723; Domain location=136-185; Score =81.3; E_value=3.1e-21; Accession=PF08330.1; Description=Protein of unknown function (DUF1723)
  Subcellular localization annotation: CTP_CleavageSite=28; ConfidenceScore=5.33e-01
MPPKRGAAGTRCTTSAAHGATEFATGSRSVAGQSAAQFVVEAATQLAAQATTPTIALVLRYASKDKMDLAPQGLITQQQKANERRPVGSSQIWTRYGVLLPSQQTRKLKEWILTDEQQQLVNASGLGHLALTTGFTIDRSLLTSFCERWNNETNTAHFMGFEIAPSLRDVSYILGIPVTGHVVTAEPIGDEAVKRMCLHYLGESPGNGEQLCGLIRLTWLYRNFHQLPEHPTINKIAYSTRAYLLYLVGSTLFPDTMRGFVSPRYLPLLADFGKIREYAWGAAALAHLYRGLSVAVTPNATTQFLGSATLLMVNWNPYKDMNPAIVPEYCIAADNICYSRTWLISFNIKEAYVPDRFARQFGREQGRLHGVPMWTRRTWSKWKDWRTEYAREIEEFHQLVGCHFTPPAETNINSFPLHESSAGQNDAGCSLNISHNFSAMVEDLKNDLPVIGRYLEGNLLPSDVASFLERVSTMIKSYTPPQGSRRKDRVSHGPADPVRSKNPRKRGRHSLFQDSFPHRYLGTPVNIVFDGTIPLLNGGEALKEQVAMDPWRVSQSHLTMTTSSSSLDSSSPESMKRRREGGDEIPITRDTDCLQSGRLCVQLKMFKHRDGVNAEAANPIFR

SEQ ID NO: 58073 - protein, 45 aa, Zea mays
  Coding DNA Sequence Number=SeqID_16294
MAVSDLDPGASEFGRARTAHWYQAGLADCLLGIEGKYDFWKILRN

SEQ ID NO: 58074 - protein, 158 aa, Zea mays
  Coding DNA Sequence Number=SeqID_16295
  Homolog annotation: Hit_ID=Q7XIR7; Match level="QueryCoverage=90%, HitCoverage=51%, E-value=3e-36, Identity=53%"; Hit description =Myosin-like protein
MKMEVELRAVHEMRAELAQVRMDIQNLGAMRQELMGQVQGLTQDLAQSAEDLHKVSALQAETQEIKHETQHLRCRGLLGEADLSPAGYIGSYGNPKANYAANPFNSGYGINQASAATDYGSQYGTGAAHGSWVPTTCKGHPDVDKYCQFARPFTKVYT

SEQ ID NO: 58075 - protein, 233 aa, Zea mays
  Coding DNA Sequence Number=SeqID_16296
  Gene Ontology: Mol. function=transferase activity, transferring hexosyl groups; Cellular component=integral to membrane; Biological process=electron transport
  Homolog annotation: Hit_ID=Q2QXP0; Match level="QueryCoverage=74%, HitCoverage=36%, E-value=3e-28, Identity=45%"; Hit description =Glycosyltransferase 3, putative, expressed
MEELMHPCAPVKPAVLDRNSDDDPDAGPDDNDEAPTSTSSSAATGDHYDCGAAWTTANYRLQPRVTRWKAKRRRWLHQNPGFPSRDARGGPRVLLVTASPQGPCGSPDGDRFLLRATKKQARLLPPPWRRYGARHGATGGPRAAVGPATATGGPKLALLRRLMLAHPEVEWLWWLDVGALVTDMGFKLPAGALRGRPPRGARRLVPALPASGLGRRQHRQLPAPQLSVVTGPA

SEQ ID NO: 58076 - protein, 172 aa, Zea mays
  Coding DNA Sequence Number=SeqID_16297
  Gene Ontology: Mol. function=protein serine/threonine kinase activity; Biological process=protein amino acid phosphorylation
  Homolog annotation: Hit_ID=Q9SPZ8; Match level="QueryCoverage=33%, HitCoverage=14%, E-value=1e-18, Identity=72%"; Hit description=Wee1 -like protein
MDNPILMQMTCSHENVIRYFTSWFENEQLYIQMELCDRCVSMNQNQPLKCREALELLYQFFRTEPYAYEPSSIPRYSPCKERDMKMKYEKHKRFNDTLCTYCNYLLAFVHGRLQRVVLFRKSRVNGSVYRHRNRQHTSQNLGSVFSQDSSNKLQANLKLVIKLAPMMWEHVC

SEQ ID NO: 58077 - protein, 118 aa, Zea mays
  Coding DNA Sequence Number=SeqID_16298
  Homolog annotation: Hit_ID=Q5JN76; Match level="QueryCoverage=50%, HitCoverage=43%, E-value=7e-22, Identity=71%"; Hit description =Allergen-like protein
MQRWRWCGRSMLKLAGLCVAVAICLCGVRSWACSGSGSGCRGSTVLLRSGVLHDWAMAAAAGGRSGVIPATVHVQVRRLQPVLPGARGRAAGRACHHRILPGGVEVQVRQPALHAMSP

SEQ ID NO: 58078 - protein, 106 aa, Zea mays
  Coding DNA Sequence Number=SeqID_16299
MISKEWSSNCSSSLHGKSTDVDGMHGEEAKGTMTGIGIEVFDRNCRRHWSEGPHCLRGGSLQPREGAPFGSDNSAQRDSLDELKGSASYSERRCARAKATPLYGGV

SEQ ID NO: 58079 - protein, 212 aa, Zea mays
  Coding DNA Sequence Number=SeqID_16300
  Gene Ontology: Mol. function=hydrolase activity; Cellular component =nucleus; Biological process=metabolic process
  Homolog annotation: Hit_ID=Q69Y17; Match level="QueryCoverage=53%, HitCoverage=37%, E-value=6e-36, Identity=62%"; Hit description =Putative PrMC3
  Pfam annotation: Domain name=Abhydrolase_3; Domain location=71-211; Score=-12.8; E_value=7.6e-07; Accession=PF07859.3; Description =alphabeta hydrolase fold
MEQEELALARAAASRRYGRGSERVRAQGTILFRALVSVSRVSSVCWRNPSRHPAAEQNSGWQWQGIDRRHAFVGPRIQTFGVPPAMTGAIDVSVYYRLASEHKLPAAYDDAWAALRWAVTLGEDLWLLEHADLSGVFLVGCSAGANIVHDTAVRASAAGVAIRGLALVPPYFTGREAMGGETVFGPEIRSSMDRTWRDDVRGRRGAQGLRAC

SEQ ID NO: 58080 - protein, 173 aa, Zea mays
  Coding DNA Sequence Number=SeqID_16301
MAYDGGAAKKRGGLIRAFNGDARGLIFPEDDWKGARGLIRVIKGHRRRMETRWMNGMMSVSRGTCSISAIHFTCAFFFSVNKLRGSEADRFSPVSWRLDRKKGLTRSLAVAVRQYLDRTIAQSNNPARGGRGERRIGELEPREAEDKGYWARRRDEPTVEVVRCHSGAAVKVF

SEQ ID NO: 58081 - protein, 92 aa, Zea mays
  Coding DNA Sequence Number=SeqID_16302
MYKYTCSIHSAFALYYERLAHPFGLELMFRGYQMVVSSVLLVGYFKLIENILEKHNLYPSFFRSADDCIFMYEGLPIPVFFSYVGMHMTEDD

SEQ ID NO: 58082 - protein, 97 aa, Zea mays
  Coding DNA Sequence Number=SeqID_16303
MEKSGSRGGARRSARRAADGVDREYGKNVGHPWPCRDRARTIVQGCLWPDSRWIANVGARSGRTTAGKGHEELAARGGWGLESAAPCAGRKHARPRR

SEQ ID NO: 58083 - protein, 158 aa, Zea mays
  Coding DNA Sequence Number=SeqID_16304
MKLSKLEPRPYPAGTMSATSPDFGRQPPHVDPATRRAPPPTHEVRPTPTIFNADPHTDVTIVTSPTSSTTSSELNRHCIIVQIHPKSINRKGKRGELVKVMNLTHNDFSKNLVRISTKRLKSATSLMESTCSFPSKELSKRKSKSQPKSLPPRIFPQL

SEQ ID NO: 58084 - protein, 199 aa, Zea mays
  Coding DNA Sequence Number=SeqID_16305
  Subcellular localization annotation: CTP_CleavageSite=31; ConfidenceScore=5.04e-01
MAGAPPLRAQLLCAALLHQLAARPSAELMARAGYGSVAPAATRRASLMHAVCRPCPFTSGLLVACTDCLVFSAVGRLALAVLGFLSITALTFVTASASSQCKTVTAAFYSAPTHVHALDHARPSARACPRLALRSCLLSARVGSRKPVRRLCGARALVHRVSHVLVFAVEPLNPFFPAQPRLRPSSGYSQYDAGLRSFI

SEQ ID NO: 58085 - protein, 162 aa, Zea mays
  Coding DNA Sequence Number=SeqID_16306
MAKKEKSKRHPGSRRWGREERGWAELRLGARRRGRSSAGEGKQGRGQASTKDEPGTAGKGARRTAMEAGQGRGQREELGATQEKDGGREARVEESRSAERRTSGESDVGGRARELEARHGRKTHALEEDEGGQVSLLLERMRLGTGIGGAQEYQTREAVERR

SEQ ID NO: 58086 - protein, 141 aa, Zea mays
  Coding DNA Sequence Number=SeqID_16307
MSRTRRRLMTRNNGVSQHTKGVMKMSGIVYGKRPQLHGSFTDTARMQGAATVLQWQEDWNWMLVVRTEERTAQEVSTARTARVLDAHRETSWRRGELDGGPCAGRSRGRAKSRHAQMLERRELGAALGAGQQRGVRQGSSA

SEQ ID NO: 58087 - protein, 143 aa, Zea mays
  Coding DNA Sequence Number=SeqID_16308
MVNRSLYGGGSLTQYLPSHRRDTHNALEMSRHVARARMSTQWHHNEVSGPHGGNWHMGRNRGKLAHGSRQGEGLTGWESLVGERKGGEREGEEREELTTGSTDDNNLSSVIQTRAGREEEEGEVGANSTLLDLACFSSNSFRE

SEQ ID NO: 58088 - protein, 213 aa, Zea mays
  Coding DNA Sequence Number=SeqID_16309
MGQGTHASRGSCAGTAPGAVAPGTATPGQGAEMGEARQGRGTTEGRGWVARGKGRGFARWGKSRRAGEATPREGLVWRGSLAERGCTRGCRGPSGGTPGRVATWGRGRHAQGGAPGRGAVRRKRKGGKREEREELTMGSMDSNNRSPVIQMRARTETERRLHPLPTSRVSRLARVCKVLRHFRGRAIAKLPNSSFVCKEYYLVKESDQGHNLP

SEQ ID NO: 58089 - protein, 216 aa, Zea mays
  Coding DNA Sequence Number=SeqID_16310
  Gene Ontology: Mol. function=citrate transporter activity; Cellular component=integral to membrane; Biological process=citrate transport
  Homolog annotation: Hit_ID=Q6YWA2; Match level="QueryCoverage=60%, HitCoverage=36%, E-value=5e-48, Identity=75%"; Hit description =Putative Na+/H+ antiporter
MANEGRPDPPRRRLRMADGGRRRQETATTAEDGGCPDPLRRRQRKREKPESWGGRTTGRLAAMGGRRSNDATEPKKFDQGRIRRILRQLANYLDANIPNADLIASAIGVASAIIDNVPLVAATMGMYDLTSFPQDSDFWQLVAFCAGTGGSMLIIGSAAGVAFMGVEKVDFFWYFRKVSGFAFAGYAAGIISYLAVQNLHLSLPTSLVEIPFISGS

SEQ ID NO: 58090 - protein, 144 aa, Zea mays
  Coding DNA Sequence Number=SeqID_16311
MSITGGATHGSIGEKGEAGERKLQQYARLAEEYFFCKKCALPGYPPASSRCDRPLQQIALAPGQRRASRPCPILDWQGTCGLAQRCPFLQGDPCGSSKQLHGWPPACAQGESRGSAPHEDQDLELKKQELELCQTGPKIVRSGS

SEQ ID NO: 58091 - protein, 94 aa, Zea mays
  Coding DNA Sequence Number=SeqID_16312
  Subcellular localization annotation: CTP_CleavageSite=62; ConfidenceScore=5.61e-01
GPARRGRLRGRHLSGNYHTSPSSRSFGHRNKSCTCCSIGSAARGMSTTTPTNAASQQTVEVRSSAGQPDEEGVLKPVKVVHEIPAKDSSGVKQD

SEQ ID NO: 58092 - protein, 152 aa, Zea mays
  Coding DNA Sequence Number=SeqID_16313
MDDITDEKRDLLVRDLCVEGAVWTGSHQKNYTLHCHFLTLQAILGKLSPFPLPKFPVFPPIIHNYDLSSSDVDLEDRDRSVASPPIVQVSDNEKEEESRDIEECLRKIDNLFEDDIFANKEDTIVEKKVDAAKAEVVAEEEVVAEEEVVAKE

SEQ ID NO: 58093 - protein, 69 aa, Zea mays
  Coding DNA Sequence Number=SeqID_16314
MTRFNAPQAYGKGRAFGKESHEKGRIDNVTTWTHETHCECDPTLESLELNLARTFSFLPNLSNTKVSYT

SEQ ID NO: 58094 - protein, 42 aa, Zea mays
  Coding DNA Sequence Number=SeqID_16315
MDNRVVPGNTSIAKSTSRSGGNSDNRAWSELLCNLQFNQAKI

SEQ ID NO: 58095 - protein, 162 aa, Zea mays
  Coding DNA Sequence Number=SeqID_16316
ITWNFTGKQWLFNRGSKVRRLKERRWMEEAEVAWAVASGRRDSRGFLPVRRMQKLKTPMDLRGFISIDCAKDCFWKPGKRGRRAWVAETVANGDRDCVYADQSHGLCITIGSPDHVPTSSGATLRQVTDGSAPLGTSDSDAPEAGAQAATTFSKRTYGGGAP

SEQ ID NO: 58096 - protein, 74 aa, Zea mays
  Coding DNA Sequence Number=SeqID_16317
MGTPQYTMTTSPTPLGAAGVPLPATFHQPYGTGANFGGVDVLGPYGSVQGGWGQFEGAIEREIGLHLFLIDFGG

SEQ ID NO: 58097 - protein, 145 aa, Zea mays
  Coding DNA Sequence Number=SeqID_16318
  Subcellular localization annotation: CTP_CleavageSite=39; ConfidenceScore=5.12e-01
MTTVERATGTTTVNANQNPTRCHLLPSTDTPTHEVPTTRGVALSNPKMAEVRNPTLRVGEIQDNTLNRLSRPPPHEDYATVSAPSISSPASPKPPQATVEPSTAMALMALAAPPMPPRREHAADQVRHRHRSHAPGHSPLSARKQ

SEQ ID NO: 58098 - protein, 356 aa, Zea mays
  Coding DNA Sequence Number=SeqID_16319
  Homolog annotation: Hit_ID=Q2QPI6; Match level="QueryCoverage=31%, HitCoverage=23%, E-value=1e-08, Identity=35%"; Hit description =Expressed protein
  Subcellular localization annotation: CTP_CleavageSite=2; ConfidenceScore=5.23e-01
MQASARLSYSVASRKVIAGVSIAPPRSCYRTSRGKAHAAPLPAQEPPPKGLKRITKQERRVRIVEFVENYRASNEGKFPTVKNICQQIGGGYYAVRELLQEMKYNHAKLPLGNAKAAPLQTTVEVTEHPMPKDEARVVESQGILEVSEHSMAKDDAEVAQPQGTAEVFEHFLSKDEGKVAQCQGTFHFPEHSRPKDDSGKTARHDMDTSETCKTADAPALSDLTENEGILSDQTESEDKPDPGNQQREIEANKFDLKNFEKNLNANDSNASDQSGSDTVNEAKTHASSFVMINYLDLARGLLLPLSVYNWLIQAVEDEFSLRLRGDNPKLEESANTGLLGSLRSFAYGIRNFWKNM

SEQ ID NO: 58099 - protein, 112 aa, Zea mays
  Coding DNA Sequence Number=SeqID_16320
MSGREVREYTNLSDPKDRKFGKGKDKIDDEDITFQRMVAKMQEVAGDRGGYLHGRGALDSDDLLYLKEQMEAEEDAERLLRHTEKRAFAAFKISFINHQQLCFSCYTVNDTV

SEQ ID NO: 58100 - protein, 86 aa, Zea mays
  Coding DNA Sequence Number=SeqID_16321
MSPKFPPYLTSSLAEPRPENTVHFREKTETNKRRQEGDQSGGAAGACCSDRTVRNGDGAPLLVSPAASALMATVLELPMGDAGGRP

SEQ ID NO: 58101 - protein, 582 aa, Zea mays
  Coding DNA Sequence Number=SeqID_16322
  Homolog annotation: Hit_ID=Q8H912; Match level="QueryCoverage=36%, HitCoverage=21%, E-value=5e-10, Identity=24%"; Hit description =Putative zinc knuckle domain containing protein
  Pfam annotation: Domain name=zf-CCHC; Domain location=202-219; Score =18.6; E_value=0.00084; Accession=PF00098.13; Description=Zinc knuckle
  Pfam annotation: Domain name=zf-CCHC; Domain location=221-238; Score =15.0; E_value=0.0033; Accession=PF00098.13; Description=Zinc knuckle
  Pfam module annotation: Pfam domain module=zf-CCHC::zf-CCHC; Domain location=202-219::221-238
  Subcellular localization annotation: CTP_CleavageSite=13; ConfidenceScore=5.26e-01
MGRPGPPLSAPASGSHGPPFSPDLASNSLNPASLAAIPHSQTGDLQLGGGCGEDGSVARERFPPSRKPGGVVSSLSQIDLLDSTFSTKSPPRSAKSISDPKTRDQKMKGAADISPVARQLAGGLNADSDPSRRRVLASGCAPDHDDHPPISRRKAVSQRAEDDGWTEVKPKYWWRKIQGNLGKSLQQIDAMGARLFKSKLQGKCFNCLSPNHFAFRCSATARCWLCLHTGHRARLCPRNGYTSKSSASRSCDISVKHSSQSAGIYSSTYRQPAPGSIPLHKGQGMQLGTAPGFSPLTLKKTFRQVVQQGQNMEARYPGDPRGRPAHAHCAVAATGSIKRRRDEMINKAVVCSFDDNSHEVDSLQAGDMLREKFNLQHELRFELKVFLFTAGGSDSRLEGGEDVVARVLGKSCAIHYVQERARRRGTPPVSTPLSLAGVNYDVPSDLKKGHVYTLRNHIEIVEDLSFLRGRDSRGDLQTVSLAESLNGPTVSLIPLVRKENIRVFVVEGMWFAGTGTKMMMMSISMVEGAALVDIAAFLAGFVRRAVGVGLLTASARMENSELPPPSGAMRWGCHTQSVGFLN

SEQ ID NO: 58102 - protein, 149 aa, Zea mays
  Coding DNA Sequence Number=SeqID_16323
  Gene Ontology: Mol. function=hedgehog receptor activity; Cellular component=integral to membrane; Biological process=cholesterol transport
  Homolog annotation: Hit_ID=UPI000034F451; Match level="QueryCoverage =38%, HitCoverage=4%, E-value=4e-13, Identity=54%"; Hit description =hedgehog receptor
MVTVGRRRGFVTFAAAAIALMQISYLLFPISAQQSNGSRVVPAEGYCSMYGICAQRSDGKVLNCANATKAVKINSTMTVDGIDYYVTTNYGEELYNSCKDVKFGTLNTRAMDFIGAGAKTYKVDVIKHFSARLDRRLCNFECIGYFVSF

SEQ ID NO: 58103 - protein, 76 aa, Zea mays
  Coding DNA Sequence Number=SeqID_16324
MPNGGGDGSSKSMGGGYAGGGSGGQVNRVEGAGAITTGEHGHKNTPDKVVVVKEDVHNDHGEKGSNRGRAKGGTAV

SEQ ID NO: 58104 - protein, 159 aa, Zea mays
  Coding DNA Sequence Number=SeqID_16325
  Gene Ontology: Mol. function=protein disulfide oxidoreductase activity; Biological process=cell redox homeostasis
  Homolog annotation: Hit_ID=Q5QLR2; Match level="QueryCoverage=99%, HitCoverage=100%, E-value=1e-32, Identity=54%"; Hit description =Glutaredoxin-like
  Pfam annotation: Domain name=Glutaredoxin; Domain location=71-132; Score=26.7; E_value=8.4e-05; Accession=PF00462.14; Description =Glutaredoxin
MYQAIPYSSARPWLMPAGEAAAVVAVKPEPEPAAAATVAEERARADAAGGTDDDGDGGRAEVGRAVAESPVLVVGRRGCCLSHVVKRLLQGLGVNPAVHEVADEAALAGVVPAGAEAAAAALPAVFVGGKLLGGLDRLMAVHISGELVPILKKAGALWL

SEQ ID NO: 58105 - protein, 184 aa, Zea mays
  Coding DNA Sequence Number=SeqID_16326
  Homolog annotation: Hit_ID=Q6QP54; Match level="QueryCoverage=18%, HitCoverage=12%, E-value=9e-09, Identity=88%"; Hit description =Putative kinase
  Subcellular localization annotation: CTP_CleavageSite=57; ConfidenceScore=5.16e-01
MDSAVQPLWTASKRQLRWSLPELSGTIIRGTLKAPNSQLAVRPDLTRHRKLRSARPRARTRAQPRKTANSAPSDPGLGLGLSPGRRRTPLCPTQGSDSAPEDDELRFARPQGSDSALASADGLRLARPRGSDSTTATEDRLDLDLGGASTSPNLGRGPATSTRGAIITLPQADSGYGEQDRRPI

SEQ ID NO: 58106 - protein, 520 aa, Zea mays
  Coding DNA Sequence Number=SeqID_16327
  Homolog annotation: Hit_ID=Q2R2E6; Match level="QueryCoverage=70%, HitCoverage=95%, E-value=3e-48, Identity=53%"; Hit description =Expressed protein
MEKRKRILELRDRLDRTLAMPDLAEEASLRALVKKQILASSLPGSDQGDIDLIAETRAKEVSEFLEMLDTSRDGRSSKVHGLPQKEWKVKQDTDQLRVMYREGPEGTPFHTLLAEGFADGPIDAVSTVASHDDDYRKALRGPLYVRIREYQDSDDKAKVAATEENATEAPPDNATTQNRLSLTNTVSNSEIVEESEQNTSVTVDSLPTSQQPYVPVEQAWQVGNRPYTSPEVERALCILDTSIALLRGDDKAGNVTTLQNLLSYDASLEASTAAGSVTCQTNVLNADSLPNGHPVAAAPQDSREKASDSAAEEEDAGDENSLKNPTASTVTKSVSMTLRSAIRVHGEESLDTDGFFHQNVGFSSARQLHVDQKIVTVRAAQILRRHGSRASVCWCYPLIPMSPRPPLPTPTPASSSGSVDTVSLSRILHRWPCRCLCCHRSEESLSGRILDVLGPVEAILTAAHRGKVWSVLPPPNPSPPKLDACADKAPIRSLPFRILPPTPARACFLVLGYSADPFIV

SEQ ID NO: 58107 - protein, 208 aa, Zea mays
  Coding DNA Sequence Number=SeqID_16328
MESTRRKECLPVRGKRKTTTEGLHIRGLGESSGMGAAVEGQEHSGMTLLWTRSTLRGTARRGFIGFWNPGEQPSHAVSDKDAQADAPRSANCNGSATGADIFESPAVHDAIAHASLRERRSFVIYTSACCMSEEKKMSKEKKMSEKKKISEEKKVVDPFLARFYESMAKTNTKKITKEIMVDLSEDSDDSDDYDVESGDEDSEDRPCG

SEQ ID NO: 58108 - protein, 420 aa, Zea mays
  Coding DNA Sequence Number=SeqID_16329
  Gene Ontology: Mol. function=DNA binding; Biological process =regulation of transcription
  Homolog annotation: Hit_ID=Q84Q21; Match level="QueryCoverage=88%, HitCoverage=84%, E-value=1e-127, Identity=64%"; Hit description =Putative regulatory protein
  Subcellular localization annotation: CTP_CleavageSite=59; ConfidenceScore=5.10e-01
MKSATSLLLGAALATAFFLLYTSLCRDLGSAAAAAPRSGSPPPTTPRREQETGDTAAARQEAATGEGGEERVAASSDGDHRGGDATAEENGQSKEEEQRRIVMPATSTTHERSEVNLMFPTTHQATSHHRPQPKQQKKSPPPASQDLADLLRRAATADKTVLMTAINEAWAAPGSFLDLFLESFRQGEDTAGLPRHLLVVAMDGRALERCNAVHPFCYLFRVDGMDFAAEQKYMEGDYLEMMWRRNRFQQSVLELGYSFLFTDVDILWFRSPFPRLPRAAQVVMSADFFVGDADSPNNYPNGGLLYVRSSPATVGFYRHWQASRARFPGHHEQYVFDRIVKEGYAGARVQFLDTAVFGGFCQHGDDLGRVATMHANCCVGLDNKLFDLKNVLQDWKTYRARAAAGNAQGFSWRVPGKCIH

SEQ ID NO: 58109 - protein, 251 aa, Zea mays
  Coding DNA Sequence Number=SeqID_16330
  Gene Ontology: Mol. function=nucleocytoplasmic transporter activity; Cellular component=nuclear pore; Biological process=nucleocytoplasmic transport
  Homolog annotation: Hit_ID=Q9VDV3; Match level="QueryCoverage=69%, HitCoverage=51%, E-value=8e-38, Identity=43%"; Hit description =Probable nucleoporin Nup58
MSRSDGESGSGATGAIWVVICAPPPPSKPNGDGDGVACCWNPKGEGEGVAPNAGAEEGVPNAEVDEGVPKLSAPNAGAEDGVPNAEVDEGVPKFSEPNGGVVEVVPNAGVDDDAPNAGVVEAVPNAGVDDGVPKAGVDEGVPKAGVDERVPKAGVDDVAPNAGVADGVPKTGVLEGFPKAGVMDGVPNMAVAAEIAGVNVRDAGLGFCSSESRGEETRRGRGLFKFQKLSGVGTKASPVSRRGCLVTPAKV

SEQ ID NO: 58110 - protein, 199 aa, Zea mays
  Coding DNA Sequence Number=SeqID_16331
  Homolog annotation: Hit_ID=Q6QP51; Match level="QueryCoverage=81%, HitCoverage=57%, E-value=3e-13, Identity=43%"; Hit description =Putative growth-regulating factor 1
MNSALNPRKSLTDRASSGFSRVPIRVSGIPGDNDGLPCDVVGPSPGSGEAEAPPRSRSSLSSEVEVESEPRVGRGGYHRLRPRLSPSPGVGQGGVRRLPEPRPSPSPGVGRGGVRRLSGPRPSPSPGSGEAEFVVFRGRGRVLGSGEAELPMAPEAGLGCCQPHSVERHSSRSDIGGAILLLGRSVERRSDCGHFGSVD

SEQ ID NO: 58111 - protein, 163 aa, Zea mays
  Coding DNA Sequence Number=SeqID_16332
MAGTGCRRLAGKGAGPDRHTGTARRGSAPGRCAWQQAGCAVAPRPRHGPWATLLHGRVGRDQGKRLGVGWREGEGNGVMGLQMEPTRERHAYEAVWRRGIGVGRLVGRAHALAAAAAGIARGGGAVLRVQDVRTEWLCYSRDLGMKRLCKWSPLDIERRWGGK

SEQ ID NO: 58112 - protein, 795 aa, Zea mays
  Coding DNA Sequence Number=SeqID_16333
  Gene Ontology: Mol. function=binding
  Homolog annotation: Hit_ID=Q10L98; Match level="QueryCoverage=34%, HitCoverage=99%, E-value=1e-138, Identity=89%"; Hit description =Diphthine synthase, putative, expressed
  Pfam annotation: Domain name=PPR; Domain location=235-269; Score =16.4; E_value=0.085; Accession=PF01535.11; Description=PPR repeat
  Pfam annotation: Domain name=PPR; Domain location=297-331; Score =30.2; E_value=7.5e-06; Accession=PF01535.11; Description=PPR repeat
  Pfam annotation: Domain name=PPR; Domain location=399-433; Score =50.7; E_value=4.7e-12; Accession=PF01535.11; Description=PPR repeat
  Pfam annotation: Domain name=PPR; Domain location=434-467; Score=8.9; E_value=0.66; Accession=PF01535.11; Description=PPR repeat
  Pfam annotation: Domain name=TP_methylase; Domain location=523-735; Score=89.1; E_value=1.3e-23; Accession=PF00590.10; Description =Tetrapyrrole (CorrinPorphyrin) Methylases
  Pfam module annotation: Pfam domain module=PPR::PPR::PPR::PPR::TP _methylase; Domain location=235-269::297-331::399-433::434-467::523 -735
MDAVAHRLGACLPRVPVAWADMAPPPSQTHGKDGGAAEGPRSGLSSFTWRMVTYDLRLRLPSSGSGCRPLPWSMDRSPAAAGLQPLPNRLPATGFRPQPATGVCHLRIRPLGTSVPSLPPTFIVRSPTPGPQLQQYSTSSRNSEEEPSPPNPQPIYCPPGVRPKSRVVARLPQGLLPRSFPLEALHLFKHARQHLADDTFVFKFVLKACAGLGWHRAGAQLHALVVQKGFEFHAYVHIALINVYVMSRCLVEARKVFDEMPVKNVVSWNVMITGFAGWDEVEYARLLFDQMPCRNVVSWTGLIDGYTHACLYAEALTLLRHMMAGGISPSEIIVLAVIPAISNLGGIVMGEMLNGYCEKKGIMSDVRVGNSLIDLYAKIGSVQNSLKVFDEMLDRRNLVSWTSIISGFAMHGLSVEALELFAEMRRAGIKPNRITFLSVINVCSHGGLVQQGLAFFKSMVYEYNIDPEIKHFGKYGEVEMGERAIKMISDLERESGGSTPYYTTGVFPFGRHSVLSQPAAGAMLYIVGLGLGDERDITVRGLDAVRSCSKIYMEAYTSLLSLGLDPAALANLEKLYGKEITVADREMVEERVDQVLSEAADTDVAFLVVGDPFGATTHTDLVVRAKKMGVEVKVIHNASVMNAIGVCGLQLYRYGETISIPFFTDEWRPDSFYEKIQNNRQLGLHTLCLLDIRVKEPTWESLARGKKVYEPPRFMTVNTAISQLFEVEEARGGYAYRRETLCIGVARLGSDDQKIVAGPMEKLLDVDFGPPLHCLIIVGETHPLEEEMLEFYMIK

SEQ ID NO: 58113 - protein, 278 aa, Zea mays
  Coding DNA Sequence Number=SeqID_16334
  Homolog annotation: Hit_ID=Q6QP54; Match level="QueryCoverage=20%, HitCoverage=24%, E-value=1e-12, Identity=68%"; Hit description =Putative kinase
MGRRETEREGGKKPKGDRRERRKERIQGNDGASCDVVGPSPRLGKVEAPPRLRSSLSSEAESSPSPWVGRGRDRRLRPGLSPNPGVGRSGVRRPSELSPSPSTRPESEPWGRAKRSSSSSGAEPESEPWGRAMRSSSSSGAEPESEPWGRAMRSSSSSGAKPESEPWGRAKRSSSSSGAESESEPWGRAKRSFLWRLGPDLATVSLTLSSGTAVEAAQAALSSCQACKWSDESAGMATWPRLLLGEDWASGEPKLCADGGYPLRFRSLEGTPNCGPRQ

SEQ ID NO: 58114 - protein, 70 aa, Zea mays
  Coding DNA Sequence Number=SeqID_16335
MTWEVPSHVPPPLLGARRALCLDNEQPMVPECVVEDLSEQQPGEGKCPLTYYVLLTYNSPSRITLLKPKD

SEQ ID NO: 58115 - protein, 102 aa, Zea mays
  Coding DNA Sequence Number=SeqID_16336
MTAETEDNPRRVATAGALSRWRKTELGRKRNWRVVVANRRQERLLWLRDYLTELAVRLIYSVQERWPPILDWRASSRRGRWVLEHTIGGHTLGNLTGDHWIS

SEQ ID NO: 58116 - protein, 129 aa, Zea mays
  Coding DNA Sequence Number=SeqID_16337
MALSDDAVGGDRQDIGDGSASEVSHSANDLAAEVGELTTTLASQDKLLRLATHERKDFKRKYESTLRGLESARASVVVSDETRYYELGVRYEHDGRAQLLPWDTNKADPRREHYEKWDIDDLHHVDTHR

SEQ ID NO: 58117 - protein, 105 aa, Zea mays
  Coding DNA Sequence Number=SeqID_16338
MDVGALCVHVQAWTGVLRIAVVLIFRLSGVAIIARMLFVEVQEGTDTTKLVRKGIIVILTRRSQIASVLIILCLQKIEVFILFDGSYIREPTSPLYTHRDSGPKG

SEQ ID NO: 58118 - protein, 182 aa, Zea mays
  Coding DNA Sequence Number=SeqID_16339
MKQVNTCLGSLPRRGQACPLWAGAEDRDKLPYWEWDGLSLPPKHLPSNQRRDTNQAPLPAHKTSNLQDLSKDLIQLWTDWSERPREGSLRNGAIIRSERPSARSCLADESHIRLVPIWSSFGSHRNQSDEHEPDAVAIDTAPACRVSDAGGSMGAPLWLRLPPGAPSSWSSPWATARRRRPA

SEQ ID NO: 58119 - protein, 44 aa, Zea mays
  Coding DNA Sequence Number=SeqID_16340
MGDTLLGKSVLDGPVMLGDDEPVLLTHLFCAADLGTDALNPLST

SEQ ID NO: 58120 - protein, 87 aa, Zea mays
  Coding DNA Sequence Number=SeqID_16341
MARAREHKSLLLPLVCDSPHQLPHATTVVLPVAVIHAPDRLAPPELHATEVACSAPKAPNFVSNYAPVAWVSGNFSASPQKQGLFTD

SEQ ID NO: 58121 - protein, 58 aa, Zea mays
  Coding DNA Sequence Number=SeqID_16342
MAPQRAPPVGSLQVFSAQIGVKNALTRHARIEQIKADVDQSKAMERGGALKRVDNSCF

SEQ ID NO: 58122 - protein, 293 aa, Zea mays
  Coding DNA Sequence Number=SeqID_16343
QFAPLGMASPSTEAPLPHPTIRDVMGHDDDDDYYGDHTIAEEEEGDEEEEEWDMSKRMSRLSLEGSDGGDADDEAGVDEEEDDEFEVPERSDVNAATAYRAWPPYEDPQQAPSSASLPGTPDRGAQAAGWPGASAKEYASETEARWPPGADGRGGRRQRQHQRRWQRMGREAWLERAWRMRKQRRQLQEEVVPVVVLGGGGDSPASRGGVAMDMEEVRACRDLGLDLPCDWTVEIPSYYALSGVDTASSGGNSPASAGSWRISSPGDDPKDVKARLKVWAQVVALASASRLGS

SEQ ID NO: 58123 - protein, 93 aa, Zea mays
  Coding DNA Sequence Number=SeqID_16344
MTLRFWFIHDMDTCHHTGLKLGRRSETGREKALHKESMIVESLIATLDVEEKARSKDVPRSGPMDSGTSNGNMVEGKSSGKNKNKTNWKPNAK

SEQ ID NO: 58124 - protein, 173 aa, Zea mays
  Coding DNA Sequence Number=SeqID_16345
MTQGESAARMALWRGIIVVSEALKGNHQHHRVPEIESSTKTDVCGRGESLPAPRQVTPSSFPWRDVCSHARFLPILLCIGQFGFAGVWPRIRTLLTHSSPPRLPRLPGGRVCLISDNEQLVVPECVAEDLPEQQPEWESRLVGKVYDLWRVLETGGDTGNMEDFEEFQDYDEF

SEQ ID NO: 58125 - protein, 91 aa, Zea mays
  Coding DNA Sequence Number=SeqID_16346
MKLGTTNLQQPPNRIPHLPPGNSDLARAFGLVPSMNDLWCSSVLTRVELAAWPPLPLGKGIGPAYASIAGMGLDLGKESLWAVDRLMMGSD

SEQ ID NO: 58126 - protein, 128 aa, Zea mays
  Coding DNA Sequence Number=SeqID_16347
MAGLRLREGCSGERGPAKPGREGAHRRVSRVADSKAELTVALYRARTRRWPQNRQRLTAGGGGAPCTRGQSEREGERVWQRAQMGEGRWASRVRGSKGARVHGRGRRMRGRGRIHDGEIVDGRLRTAG

SEQ ID NO: 58127 - protein, 190 aa, Zea mays
  Coding DNA Sequence Number=SeqID_16348
  Gene Ontology: Mol. function=ubiquitin-protein ligase activity; Cellular component=ubiquitin ligase complex; Biological process =protein ubiquitination
  Homolog annotation: Hit_ID=Q6Z2K3; Match level="QueryCoverage=85%, HitCoverage=29%, E-value=3e-39, Identity=57%"; Hit description =Putative Avr9/Cf-9 rapidly elicited protein 276
MWIRDLQLAFGNLSGCHLQEYWSSVQVDLVRAQLRREMEKNGGLDVTVFMKVHDILAQIDNAAPQSQQPHQQPEQPQMEKFSNDDLELRNVVLLVSEISGLSKPDMSKIVSDLIQGLENVETPESPKPDNVDRQPPSDETKGSSEEVKKSDSVAIPEDFRCPISLELMRDPVIVSTGQVRLHTITLSLVL

SEQ ID NO: 58128 - protein, 83 aa, Zea mays
  Coding DNA Sequence Number=SeqID_16349
MARRHSRRVPQAALRLLPRINAAVSWHAPSELRLACHLDLRAHYGAPAGEPSWSSSEPSGHRLSLPPAVGPLVATKLVAAALP

SEQ ID NO: 58129 - protein, 95 aa, Zea mays
  Coding DNA Sequence Number=SeqID_16350
MTRVVVFDLSSSSNTHLDVLRLLVVSTIWAMRAVDLDTASHFYFREKLAKGVEKEAKLHNTRMMFDDKPESGFISILTSIESRLMLMFAKIPQHL

SEQ ID NO: 58130 - protein, 149 aa, Zea mays
  Coding DNA Sequence Number=SeqID_16351
MEQRRAVRARRPRRWEWRATRARSERGAMGTSLTSWKSCAGQEIRTRSRAPEEQRWGRPRMQRQENSGGHGGELQQGATTRSWLGESRAPGGVDDFEDEGRGEHAAVANIHGELRREKRCGGGADEPEREREIRMAWRAEWLGVVAMAV

SEQ ID NO: 58131 - protein, 163 aa, Zea mays
  Coding DNA Sequence Number=SeqID_16352
AALAQGQNARGRGGSTAPRLQAGKEVEATSDWAQWASGQVELDGEHRSYLAMDGKHAWGMRMSWAHWEDVGDARKMLMRDVQQASARGACGWAWQGAARWADWPGGAAALGARFAGRWAGASGENTARPREVGRPRGPREGGREERRGRGYVGRGGARSRAGG

SEQ ID NO: 58132 - protein, 113 aa, Zea mays
  Coding DNA Sequence Number=SeqID_16353
MAFGAVQLVVPVWTARHAPLARGWLAASAPGVAWGAAWCPGVARPSPGARNWGVVRFAVVPLMGLGVCGSLCQGGDVDDVYDYGNGCPHCNHCSREDEAVEDDFQEFQEYDEF

SEQ ID NO: 58133 - protein, 98 aa, Zea mays
  Coding DNA Sequence Number=SeqID_16354
MGVNLARTSKERPNHAHGRVHDVEPVFPQNRARNGQMITTMSFTESYQVRLATKREEGRARRVPMRGKWRRDDFWWKQWVTSGLYGHKGPPIHRAQPI

SEQ ID NO: 58134 - protein, 629 aa, Zea mays
  Coding DNA Sequence Number=SeqID_16355
  Gene Ontology: Mol. function=DNA binding; Cellular component=nuclear origin of replication recognition complex; Biological process=DNA replication
  Homolog annotation: Hit_ID=Q945C6; Match level="QueryCoverage=99%, HitCoverage=100%, E-value=0.0, Identity=91%"; Hit description=Origin recognition complex subunit 3
  Pfam annotation: Domain name=ORC3_N; Domain location=21-341; Score =728.0; E_value=6.4e-216; Accession=PF07034.2; Description=Origin recognition complex (ORC) subunit 3 N
  Subcellular localization annotation: CTP_CleavageSite=60; ConfidenceScore=5.38e-01
MSPPPCDALPTAANNIQPFLRQIQTSQPSSPNRKSANRCRQPAGEECEDEGDSELYEQLRAEAFHRTWSKIQSTIDEVLRAINLKLFDQVLQWAKESFASAHAITKKHHTEVQQPYPLLTDVICRRIPTVFVLTKNAEFVDDITTFHDLAGHMKSNGCHIVKLSAAELSAKHGVGGCFRSLLGQLLSDVPDVADVSALASWYCEAENFDQPIIVIIDDLEQCSGDVLGEFVMMLSEWVFKIPVFFVMGIATTLDAPKKLLSSEALQRLEPCKLTLGSPSDRLNALVEAVLVKPCAGFCISHEVALFVRNYFFRHDGTITSFITALKLACSKHFSMEPLSFLCLGMVEEDSEEFWHDKLESLPQTIWKHAFDLPSNKNARNSCNMVEGLSRLLKSQKDWSSVLLCLYEAGRHDKVQLLDIFCEAASPDWQTENAPDSYLFASKVALLGVKSGSARRFIAQVMNTIRMLSGNIWYLLNAYLFHEIVCFKNVDILRSALIGNPRRMIQLDLLRSQSHLKCSCCSRSGAAVSGSLHDTSILCSLAQEYGDMINLHDWYTAFEGIIKSTNSKAKGKSCSSPSKKKKKSNPTPLEGDGMIQARFCSAVTEMQVTGLVRMPSKRRPDLVQRIAFGP

SEQ ID NO: 58135 - protein, 91 aa, Zea mays
  Coding DNA Sequence Number=SeqID_16356
MSPAVVDVCSRYRSRIRVRLAGQSLRLEARPANGALFGGDLVDRLPCKLARWGLGRSTLQDLLSEDLIGRVASQICSSTLLGGDLVDHFAS

SEQ ID NO: 58136 - protein, 146 aa, Zea mays
  Coding DNA Sequence Number=SeqID_16357
  Gene Ontology: Mol. function=protein kinase activity; Biological process=protein amino acid phosphorylation
  Homolog annotation: Hit_ID=Q60DP4; Match level="QueryCoverage=70%, HitCoverage=26%, E-value=7e-14, Identity=74%"; Hit description =Calcium binding EGF domain containing protein
  Subcellular localization annotation: CTP_CleavageSite=81; ConfidenceScore=5.38e-01
MAAAVPNGHTAAAGDDDAPPAASSSLVFLGTGCSSAVPNARCLIQPPDPPCPVCSQSLSVPPELNPNYSVFTIITGSVRICDGMRSERFGLTLDAVRRICPKRALLIGMTHEMDHHKDNQTLEEWSRREGIDVQLARDGLRVYIDL

SEQ ID NO: 58137 - protein, 194 aa, Zea mays
  Coding DNA Sequence Number=SeqID_16358
MDLVDASPLEVSPRTVSCRRTKPWRRSISIGRSSSGGGGSNIEYTSLRDVLEEEECGGGGAGGDCVGGGGEQHQQQQPWRWGSSWGEYSCHDIHEFDASNIGIRNQLLKHAASAYLQSAVVVAAGRDQGCCLTRLWRRAQLRAGGRRGRGGRGRVLMRACSWQGCVDDPAAFLARSARRLASFVADRVSAIWAW

SEQ ID NO: 58138 - protein, 162 aa, Zea mays
  Coding DNA Sequence Number=SeqID_16359
  Homolog annotation: Hit_ID=Q9LU25; Match level="QueryCoverage=55%, HitCoverage=18%, E-value=6e-26, Identity=63%"; Hit description =Arabidopsis thaliana genomic DNA, chromosome 3, P1 clone: MYA6
MGGGGPHSAELSAQSRRQGASEVQSLETHHGDGPGIQDYSNANDMQLALAHRSCSFLYGKGRVSIEWGSGPDCIDWGRLLRNHGISDSEKVLIFFDDHQSELKRLKQALKAGFRHLIFEDNYDTGTCDHYFLRHIYDPSYIRGLWLVTLDSKCPWYNWSIVQ

SEQ ID NO: 58139 - protein, 75 aa, Zea mays
  Coding DNA Sequence Number=SeqID_16360
MAKKHEAQIGVLEDEEEEDNNTISYYAQYNFFADAIMGDVADPKENNAHEQTLCDEEKYYHKEKIRQTREHVRGP

SEQ ID NO: 58140 - protein, 223 aa, Zea mays
  Coding DNA Sequence Number=SeqID_16361
  Gene Ontology: Mol. function=kinase activity
  Homolog annotation: Hit_ID=Q6QP54; Match level="QueryCoverage=52%, HitCoverage=44%, E-value=2e-09, Identity=56%"; Hit description =Putative kinase
  Subcellular localization annotation: CTP_CleavageSite=76; ConfidenceScore=5.58e-01
MTDSASPDPRARTQPRRRMTDSASPDPRARAQPRRRMTDSASPDPRARTLPQPRTTVSASPDPRARTLPRPRTTVSASPDPRARTQPRPRRSHRLARPWARTDHATRGAIITLLLASSGYGEQDRRPIWFAPKCRVQRLRNLEEAEARYLEVLKKACPDLAIKFHAPKPEDPSVAQMDLGSQPVVLKKPTEKGYKHLKVLYLKGYINGKPLKRMMVNTRDGNG

SEQ ID NO: 58141 - protein, 625 aa, Zea mays
  Coding DNA Sequence Number=SeqID_16362
  Gene Ontology: Mol. function=transferase activity; Biological process= paclitaxel biosynthetic process
  Homolog annotation: Hit_ID=Q7G4G7; Match level="QueryCoverage=96%, HitCoverage=99%, E-value=1e-103, Identity=63%"; Hit description =Transferase family protein, expressed
  Pfam annotation: Domain name=Transferase; Domain location=25-611; Score=129.8; E_value=7.5e-36; Accession=PF02458.6; Description =Transferase family
MDWTVSCFAGDIVLSIEIDGKMVSFKARRSEPQLVPPARPTPRETKMLSDIDDQHLLRYYETVVGFFRTCPGRTDSPGDLKGAIKAALAEALVYYYPVAGRLREEAGGKLVVDCTAEGVVFVEADADVRLHEFGEPLLPPYPCLDELLCDPGDIKAVIGRPLLFMQDLLGGDHEAQATVGDEEMEAELTTERTWVKSSVAATSEPPQRPLRSPRGLNRLWHRCLFPHSLPRTHARLLMYGSGGVANAVRMVMGRMTHMIGDEGSDAHTTFAAPRPRRMGRRAGTARRGRGGVRGVRRRRQGRQGHAIKVTELKCGGFVAGFHMCHNIADGFGMIQLMISVAELMVGEATPSIVPVWNRELLTGAYNTGPIPYPNPAYKPLLNSLDNTSDDVMLSTPPDRMVAQYLVFGQREVTALRSHIQGHLADSATSFELLTAVMWRCRTRALGYEPSRRVRLMITMNARGRWNHHTLIPWGYYGNAHVSPIVELTADELCRQPFADTVALVRDTKLSVTKECLASMVDTTAYIRQWPSLTMDRTYEVSDTRWIAAGDGLQLGWAEYVGGGIPLAGDLTSKLGSHHMRCRKEDGEDSTVVSLLLPRPAMERFKNEMAVWLSKDDKNFVIPSSL

SEQ ID NO: 58142 - protein, 47 aa, Zea mays
  Coding DNA Sequence Number=SeqID_16363
MTKDFAKTAKLPPYEDMFLASLRRASFPWLVSKVRRTELVVAFFGMV

SEQ ID NO: 58143 - protein, 157 aa, Zea mays
  Coding DNA Sequence Number=SeqID_16364
MGKMMKKVKYVSGSLNPPPGDRSEQTEEGVEIDCKPDPIFEGFKEATEAYAERTVNDAIENMTKGFIWEAKLVFDNNNDGDDGDDLVVTVSDYSNMLRGIATPDPNGSPDPLPKPYNAENGPTLKEIHAEFKVVHAAIDEAIETMLNEAAKKVLKED

SEQ ID NO: 58144 - protein, 82 aa, Zea mays
  Coding DNA Sequence Number=SeqID_16365
MPAALPSSAARLQSTTVDSGSTSSFHRHLEDLGQERDVGEEREFLLATTAMMHGELARLGTPRSRLRNGRRCRLQFAANKAE

SEQ ID NO: 58145 - protein, 172 aa, Zea mays
  Coding DNA Sequence Number=SeqID_16366
  Homolog annotation: Hit_ID=Q10L41; Match level="QueryCoverage=41%, HitCoverage=20%, E-value=2e-24, Identity=74%"; Hit description =Galactinol synthase, putative, expressed
MNKLSTNETRTRFNAVHKSGKEISTSLGLEIVYALALLLDQLAERRCLLLQPDDLDSVPRGEAGLGTRSGWRNGWSCQSGAGSTTSPRCRRSCSSLQATSGWWTTGGTSTGSAATTSRADVGVSIRAISTSFTGAARTCKPKGARRFCLTNVNCMEATASAAGLVPCWSTVA

SEQ ID NO: 58146 - protein, 57 aa, Zea mays
  Coding DNA Sequence Number=SeqID_16367
MQNAQLFQFSFSMSADSTLLQKKRLDTGSCGKIRLSDLLESHHLVPEARDKKKGKKS

SEQ ID NO: 58147 - protein, 195 aa, Zea mays
  Coding DNA Sequence Number=SeqID_16368
MARSLLCDRDSDVVSTQHRTHGSDQAVSTASSERASTRLQDARPDVGHDAEASGRGWRRVGRGRSDGWARFSHFFASWVVDEEDTGHQWGIVPGAEGEPTTRGMVERDICAPCARVRQSGGVAWKPSGGRVARRQLGARMRLGFEAWLGQEGGCGAARWASEKKGGGLAGLGHERESCDYYDFVVVKVVPELASG

SEQ ID NO: 58148 - protein, 169 aa, Zea mays
  Coding DNA Sequence Number=SeqID_16369
MGPMKVVAPLVGLLIPLARAVQPSSTIGIRDVAETVVASPVRGFQEAKALATVTTNLSMDDYITNENFYFGIRERTTSSGVVEVGGDVAGVVISDEVAKATARVARKVVEAAKVAGIKGYPGGRKCILTIVCDIAFADHVAMGDLASSATSQLEAEKKALEKKVEWLLS

SEQ ID NO: 58149 - protein, 197 aa, Zea mays
  Coding DNA Sequence Number=SeqID_16370
  Gene Ontology: Mol. function=DNA binding; Biological process =regulation of transcription
  Homolog annotation: Hit_ID=Q84QT1; Match level="QueryCoverage=60%, HitCoverage=31%, E-value=7e-14, Identity=43%"; Hit description =Transfactor-like
MGKAPALPTPAATVAGLGYKLEEKGETFKSQEVKEALRAQMEVQRRLHEQVEGAFRFANTVLIKWFLAKTTAAYKALLITIVGWFYHYQVQKRVQIRMEAFQKYIDSILESACKMVTEQFASSGFSISDPDLPEISPGGVVMCGGPTDTLSSSVFNQLSVSSIGSHSPGGKPSPSPSGMECPPLLLHKSHELKRRSS

SEQ ID NO: 58150 - protein, 71 aa, Zea mays
  Coding DNA Sequence Number=SeqID_16371
MGFRQNALVLTGEAKAVVETREDEQPRGGEDEGEDGTEQDLLRVFTDNQRQQIWNPWMRTPSYCTLALRAK

SEQ ID NO: 58151 - protein, 136 aa, Zea mays
  Coding DNA Sequence Number=SeqID_16372
MDTTRQRLRIAIHSPSYFYLVDAGKTPQDLCGLGFFTSSWSKGRRNGRDRDTACPSSPPDQHQPNRHCLLDAALLHLHCIALQHVRAAKACSQPAMATFAADQNTTLHLERKACLFQFRLQTRRLDACSNGCNVEA

SEQ ID NO: 58152 - protein, 246 aa, Zea mays
  Coding DNA Sequence Number=SeqID_16373
  Gene Ontology: Mol. function=hydrolase activity; Cellular component =nucleus; Biological process=metabolic process
  Homolog annotation: Hit_ID=Q0ZPW9; Match level="QueryCoverage=75%, HitCoverage=51%, E-value=1e-34, Identity=46%"; Hit description=CXE carboxylesterase
  Pfam annotation: Domain name=Abhydrolase_3; Domain location=73-245; Score=55.8; E_value=1.4e-13; Accession=PF07859.3; Description =alphabeta hydrolase fold
MEAGAGGGEPSTPRSRTLPCKVRLQLFCLEVVAGGLSARRPVHRHGRGRVARPVGARVFWPSTEASSSPLPIVVYFPGGAFALLSAASYVYDAMCRRFCRELGAVVVSVNYRLAPEHRYPAAYKDGVDVLRHLASAGLPDGVDDVPVDLSRGFLAGDSTGANIARLVAQRWTTASVESSSSPPRSSPVCPAGAVLVQPYLGGEERTEAEVRLDGEGAGGDRQGLGLDVAAVPARRRRPERPSCARD

SEQ ID NO: 58153 - protein, 264 aa, Zea mays
  Coding DNA Sequence Number=SeqID_16374
  Gene Ontology: Mol. function=methyltransferase activity; Biological process=metabolic process
  Homolog annotation: Hit_ID=A0E2S4; Match level="QueryCoverage=81%, HitCoverage=95%, E-value=2e-27, Identity=34%"; Hit description =Chromosome undetermined scaffold_75, whole genome shotgun sequence
  Pfam annotation: Domain name=Methyltransf_11; Domain location=71-152; Score=8.0; E_value=0.0089; Accession=PF08241.2; Description =Methyltransferase domain
MSSSSPPPRPDDDDGAQEVGASDGRSLGYGEAEYWDARYVEEGGAPYDWYQRYDALRPFVRCFAPPASRILMVGCGSALMSEDMVTDGYVEIVNIDISSVVIEMMRKKYFDVPQLQYLRMDVRDMSMFPDESFDCAIDKGTLDSLMQCRLAAFIVWCGCSPQCSSDDFGSGQITYGDPSVRMPHLNQSACDWKVVLYILPRPVFTGKITRRVLDPVPLTERGRLPDGFVPEDPDSHYVYVCKKMQGLTGTGSPTVNHIERQGEE

SEQ ID NO: 58154 - protein, 579 aa, Zea mays
  Coding DNA Sequence Number=SeqID_16375
  Gene Ontology: Mol. function=serine carboxypeptidase activity; Cellular component=cellulose and pectin-containing cell wall; Biological process=proteolysis
  Homolog annotation: Hit_ID=P52711; Match level="QueryCoverage=94%, HitCoverage=93%, E-value=0.0, Identity=64%"; Hit description=Serine carboxypeptidase II-3 precursor (EC 3.4.16.6) (CP-MII.3) [Contains: Serine ...
  Homolog annotation: Hit description=carboxypeptidase II-3 chain A; Serine carboxypeptidase II-3 chain B]
  Pfam annotation: Domain name=Peptidase_S10; Domain location=84-567; Score=644.6; E_value=8.3e-191; Accession=PF00450.12; Description =Serine carboxypeptidase
  Subcellular localization annotation: CTP_CleavageSite=57; ConfidenceScore=5.07e-01
MKPTTSSTLLLAAAVLCLALPLLPGATAKAARARQGDYLARLRGSSPWPAESASLAVAATDRASRHAASPGVGRKEDDRVDRLPGQPSGVDFEQYAGYVTVDAAAGRALFYYLAEAVGGGSASAAKPLLLWLNGGMACSLLPRVGSWLVDLLTAVTLWLLRSLLISRVGRGPLDSRRLCHGLMGVDGRTGPGCSSLGYGAMEELGPFRVKSDGKTLYRNPYAWNNAANVLFLESPAGVGFSYSNTTADYSRSGDNKTAEDALRFLLNWMEKFPEYKGRDLYLAGESYAGHYVPQLAHAILGHAAAGKPSSSSPLNLRGIMIGNAVINDWTDTKGMYDFFWTHALISDATADAIGRHCNFSAAADADAAASNDKCNEATSEADEALQDIDIYNIYAPNCQSPGLVSPPITPSMDRFDPCSDYYVNAYLNDPDVQRALHANVTRLDHPWSACSDVLRRWTDSATTVLPILTELLNNDIRVWVYSGDTDGRVPVTSSRYSVNQLQLPVAAKWRAWFSSTQGAGEVGGYTVQYKGKEKGSLSLVTVRGAGHEVPSYQPRRALVLVQGFLAGKTLPGCKTCESA

SEQ ID NO: 58155 - protein, 209 aa, Zea mays
  Coding DNA Sequence Number=SeqID_16376
  Homolog annotation: Hit_ID=Q6JB15; Match level="QueryCoverage=12%, HitCoverage=36%, E-value=2e-07, Identity=100%"; Hit description=MEG1
MAALYLSSSGCGGVAGQGGAAARARGVTCPLQWWSGGQRWLYRRCLRWQLQLLVGDGCAAKSSRHRIGREEFLNISCDMEYKKRVDALVFFSLLLLGYFAAHAHGNALAHDSHARASTFGSTLQRVETPTMFIHDQAQPPPNTVYFIHGYTVSPSVLGKSLVQRLVVGSSLSPQSLDMTCVDKAPGLDAMGLSSPITTYRGDALRPLVL

SEQ ID NO: 58156 - protein, 95 aa, Zea mays
  Coding DNA Sequence Number=SeqID_16377
MTRLEQSRSLAVAHPGHVMSVPPRLDLALFLLVLGRLDGVVVHAMQSVGMGNAAQMCGNGKQRRVYKRHGNGNREEATRDMGMGMAEPGMGQPTP

SEQ ID NO: 58157 - protein, 515 aa, Zea mays
  Coding DNA Sequence Number=SeqID_16378
  Gene Ontology: Mol. function=transferase activity
  Homolog annotation: Hit_ID=Q9FTE2; Match level="QueryCoverage=99%, HitCoverage=99%, E-value=1e-172, Identity=65%"; Hit description =Putative HGA6
  Pfam annotation: Domain name=DUF563; Domain location=146-371; Score =346.9; E_value=3.2e-101; Accession=PF04577.5; Description=Protein of unknown function (DUF563)
MGGDPGKVIRNVKGAAQKYLGVGFLLGFFLVLLTYFTVSEQFAITAPNAVRRTSPGHAHTTRSPITSAVEEKRQQPPAIEEKPPKPEVAPEEKPPKEEKPPRVDVEGPHAETDEDQKKPVPDDDGRSSGISGGDGVATESAPAKKPACDIQGPWASDVCDIDGDVRIHGSAGTVLIAPSIESGGNPNPQEWRVRPYSRKHQGGIKEVTVRELASSADAPACDVRSPVPAMVLAMGGLTGNYWHDFSDIMIPLYLQAARFEGEVQLVVENIQPWYVGKYRAILRRLSRHDIVDMDRDDRVRCFPGAVVGIRMHKEFSIDPALEPLGHSMPEFTAFLRETYSLSAGRAGEAGGRRRRGGRAGAAPHDGHLAPPPAEAGELGRRGGSGAARRFAKEVNAVDVLVGVHGAGLTNSLFLPTGAVFIQINPYGKMEHIGEVDFGIPAVDMGLKYIAYSAGVEETTLVDTLGRDHPAVKDPESIHRSGWGKVAEYYLGKQDVRLDLQRFEPVLRKAMQLLRE

SEQ ID NO: 58158 - protein, 272 aa, Zea mays
  Coding DNA Sequence Number=SeqID_16379
MESRLERKLIDHTAMKDERTSALEGAAEELALCPVQPSGAARLRRLTGGLHLSKAVLALARSLLPPLSSESRVLAPFLACPRAYALSAQHAPSIGASARCHDCAFVSLSCGPCLSAPPPSSNLRSARPSWPRPRPRKSQPLPTCPTPTQTPLSFALPFAPLADSSQLAFARALPLPRAWKTAGFHRAHASVLPPSLRPRRAHCLGEFCLDVRNSRRASIYPIPLWFSLPVFTGAFPALSPLTEARTVSLSPFKGPGVFSRVHRMLKLLGPRH

SEQ ID NO: 58159 - protein, 1841 aa, Zea mays
  Coding DNA Sequence Number=SeqID_16380
  Gene Ontology: Mol. function=ubiquitin-protein ligase activity; Cellular component=intracellular; Biological process=protein modification process
  Homolog annotation: Hit_ID=Q6YU89; Match level="QueryCoverage=93%, HitCoverage=91%, E-value=0.0, Identity=62%"; Hit description =Putative HECT ubiquitin-protein ligase 3
  Pfam annotation: Domain name=HEAT; Domain location=156-193; Score =19.6; E_value=0.011; Accession=PF02985.12; Description=HEAT repeat
  Pfam annotation: Domain name=HECT; Domain location=1492-1783; Score =66.3; E_value=9.5e-17; Accession=PF00632.15; Description=HECT-domain (ubiquitin-transferase)
  Pfam module annotation: Pfam domain module=HEAT::HECT; Domain location=156-193::1492-1783
MDSSGDNNSNPVPPPRRRGRPSNTDKGKEQQQPEPSHSSRVREAERLLGLGFEGIDDDEDSGFGAGAIPHSLTSASTALQGLLRKLGAGLDDILPSSALSAAAAAASSSSASGQLSGRLKNILAGLRADGEDGRQVEALTQLCEMLSIGTEESLGAFSVDSFVPVLVGLLNHESNPDIMLLAARALTHLCDVLPSSCSAVVHYGAVPCFCARLLTIEYMDLAEQVLEHASVCLTRIAESFSPFPEKLDELCSHGLVAQAASLVSVSNSAGQASLSTSTYTGVIRLLSICASGSPLAAKTLLLLGISGILKDILSGSGLVAGTTVSPALTRPADQVVARALPEFGSGVALAAAHGLAVRLPVGTALLAGMNEIVKLADELLPSLPVGTISLPVYSGVHMKGCSVKKSTSSKQGEHGSTANELSGREKLLRDQPELLQQFGMDLLPTMTQVYGSSVSGPIRHRCLSVIGKLMYYSSAEMIQSLLSTTNISSFLAGILAWKDPQVLIPALQIAEVLMEKLPEIFLKMFVREGVVHAVESLICPELSGQVTPHVDSITSSHNRRNRRRNNAVNTGNNLPDGPKGSNSMIANSPPSMAEVPNNSLRALVSNHAKSFKDKYFPSEPGSSDIAVTDDLLKLRALCAKLNTTADTIKTKAKGKSKVVSDNSFDVLCNIEEQLDDIIAEMLSELSKGDGVSTFEFIGSGVVTALLTYLSCGTFGREKVSEANIPNLRHQAVRRYKTFISFALPNDKDGNKTPMAFLVHKLQSALSSLERFPVVLSHSGRASTLGGSRLTTGLGSLSQPIKLRLCRAPGEKSLKDFSSNVVLIDSLASLAAVEDFLWPRVQRTEPVLKPPMSSANNSGSGAASSTACAPSIPSETQSVRRTSLRSKSSAATSGAIKKDYQEGSINTSKGKGKAVLKLSLDEPKGPHTRNAARRKATSEKDVELKPSHGHITSEQPPIHEQLSTLHTISAAEGAAAVSDDILNPLISFTCTLHRGGKQFQQGRKAGEGDEQGGEQPTGEENSPAGEQGGEQPAGEQQEGMSAGGGAISVTDEDLDASPVEIDDALILDDDDEDVPDDEDDDHEAVLRGSLPSCVPERVHDVKLGDADDSSVASLANDNQAQPSSGSSTKNTSSRGLDTAEFRSPATFGSRGAMSFAAAAMAGLTPVGGRGIRGSRDRNGLPLGARATEHYNKLIFTAAGKQLNKHLTVYQAVQRQVVHAEDDEDRFGGSDLPDDGNHFWDDIRGDVFTITYQKADNTAEKGSVGGSASVPKSSKSDSCRTLSEKQCTSLLDSILQGELPCDLEKSNQTYNILSLLHVLEGLNQLSPRLRLQSACDDFAEGKVATLNGLYDVGAKVPSKEFINSKMTPKLARQIQDVLALCSGSLPSWCYQLTKACPFLFPFETRRQYFYSTAFGLSRALHRLQQQPGNDNNTAFEREVRIGRLQRQKVRVSRNRILDSAAKVMEMFSNQKAVLEVEYFGEVGTGLGPTLEFYTLLSRELQRVDLGLWRSHSSDNSGMQIDANADDLIRSKNHESESLTESRNIVQSPLGLFPQPWPPTAAASEGSKFFKVVEYFRLVGRVMAKALQDGRLLDLPLSTAFYKLLLGQELDLYDILSFDTEFGKTLQELQILVARKQFLDSCSSESQKIDLCFRGAPVEDLYLDFTLPGYPEYVLKEGGENAEVNICNLEEYISLVVDATVKTGIMRQVEAFKAGFNQVFDISSLQIFSPQELDYLICGRCATGGLVGPTVGALPTGALVPVTSIAAPVAPVALAFAVAIYGMGAASQGPDLADSGLAYLSVALLPPDVAFAHSTLAIAPIAAKTTNAEGHLLGSSCIETLPAL

SEQ ID NO: 58160 - protein, 163 aa, Zea mays
  Coding DNA Sequence Number=SeqID_16381
MGLSIGRPRAQGLKYRNALGYLLHAIDIPCNRPSHLLVGYSALGILNKGKPLVKVSSNYELVETYADVPNSKTVNTVVLKRVDREVDDADVVVVDQGTHGEWVVKLLEKLVQLARLSHPISNSQYSTSALERETTGYRLEDQEMRFAEVYRQVSRTLGPSASV

SEQ ID NO: 58161 - protein, 405 aa, Zea mays
  Coding DNA Sequence Number=SeqID_16382
  Gene Ontology: Mol. function=DNA binding; Biological process =regulation of transcription, DNA-dependent
  Homolog annotation: Hit_ID=Q8LMR9; Match level="QueryCoverage=28%, HitCoverage=36%, E-value=7e-40, Identity=88%"; Hit description =Putative RAV-like B3 domain DNA binding protein
  Pfam annotation: Domain name=B3; Domain location=86-165; Score=44.8; E_value=2.9e-10; Accession=PF02362.12; Description=B3 DNA binding domain
MEFASSSSRFSKEEEEQEEEEDEEVSPREIPFMTAAATAGTGATSSSPSPSAAASASASSSAAALRSSGGGGGGDDDMEVVEKEHMFDKVVTPSDVGKLNRLVIPKQHAEKYFPLDAAANEKGLLLSFEDRAGKLWRFRYSYWNSSPELRHDQGLEPIRQRRSASTPGTPSPSAVAPPTLRGTASSSTGGSAAPTPPATRTACCHASRSTCRHSRRPTAMAPGGGGAGGFFVPPATLYEHHRFRQALDFRNVSAAAAPARQLLFFGSAGMPPRASIPQQQQPPPPSLHSIMMVQPSPEATAGLPMLLDSVPLVNSPTAAAKRVRLFGVNLDNPQPGSSAESSHDTNALSLRMPGWQRPGPLRFFESTPQRGAAGAAAGAESSAASSPSSPSSSKREAHSSVDLDL

SEQ ID NO: 58162 - protein, 638 aa, Zea mays
  Coding DNA Sequence Number=SeqID_16383
  Gene Ontology: Mol. function=protein-tyrosine kinase activity; Cellular component=integral to membrane; Biological process=protein amino acid phosphorylation
  Homolog annotation: Hit_ID=Q339I2; Match level="QueryCoverage=95%, HitCoverage=95%, E-value=0.0, Identity=64%"; Hit description=Protein kinase domain containing protein, expressed
  Pfam annotation: Domain name=Pkinase; Domain location=330-599; Score=- 98.7; E_value=0.011; Accession=PF00069.15; Description=Protein kinase domain
  Pfam annotation: Domain name=Pkinase_Tyr; Domain location=352-595; Score=-102.0; E_value=3.3e-06; Accession=PF07714.7; Description =Protein tyrosine kinase
  Pfam module annotation: Pfam domain module=Pkinase::Pkinase_Tyr; Domain location=330-599::352-595
MTPLPLHLHHLLLALLAASAAQATDPSGCGGGEDRCGDLVLPYPFHLNSSCASAGGANSSLFRLSCNASGSATLTLALGSATFRVLAFLPSGSLLLDYAPAASKSPCDAAYAAFSRPSSPATALDAAPFLAVTPANVLRLYACEDSSLCRAGCDDVATCGGRSGCCYPLSDGSVWKPGNGLGVFADYGCRGFSSWVRNRSSAAAGAARGVVRGVEVEWAVPRGSAMAKCADGAALVNATALHDGVRCACAAGLVGDGFAQGTGCTKGTSCSNGGGEHASDGRDCCQGRFCSRKAVVLAGSLSKESRRWDLDPACIPKILRSVCDARQFTYEQLEEATRRVDGEKAVDTADDGAVHAGVLDDGSLVAVQRIGYETQGRLRLVLDRMELLSEISHPSIARVVGFCLDSSSNALLLVHEHFAGGTLEEHLRQVRRRVVLSWYHRVNIAIELASALTYLQAHEAAPTFLHDLRSSDIFLDAGFTAKIAGYKLTGPGPATACCSAAASSCEQDVVCNFGHLLVELLTGLRQQVPLDSVAPKVREGRVHEVIDPTLLSSGGGNGKQLPASHDEVRKVFELAVRCLSCAETGLCMLAVAKELMHILRDNNGSSSKIEISLEETFSSSSLLQMISMSPETLHHHLP

SEQ ID NO: 58163 - protein, 104 aa, Zea mays; identical to SEQ ID NO: 45902
  Coding DNA Sequence Number=SeqID_16384

SEQ ID NO: 58164 - protein, 97 aa, Zea mays
  Coding DNA Sequence Number=SeqID_16385
MVPGHGDAGFCGGAGVPTPPSQSNADAHAQWLRWRGDQSMRRKLHPGPGLTGGGMVEGLARRRRERVAGGRTSLGKSLYGRPGRAWRGSRDAGFAAR

SEQ ID NO: 58165 - protein, 207 aa, Zea mays
  Coding DNA Sequence Number=SeqID_16386
MSKTSTESKTYLSAEIRNNLLLSTEYSGDNLGWGAPPYSAVEFHRRRGHGHDGGPGVLERSQASSRWHGRLGRGLDTDIEAPEGTGLRQSDPVAALAYFGEQLREQQGRGARLRAQMSRGKWASGVRALKGRGHANVARKCADMGASTVGVRGQEITDGGSDGWGPRPAREDVHMLEVNSVNRTGPPGSGRERGGKRTRGQWRAQDL

SEQ ID NO: 58166 - protein, 63 aa, Zea mays
  Coding DNA Sequence Number=SeqID_16387
MAAGTDRNPLELEVVPNRSIGYTPYFMVYGAEAVLPTDIEHGTARKYEDNLLADPALGSCERN

SEQ ID NO: 58167 - protein, 133 aa, Zea mays
  Coding DNA Sequence Number=SeqID_16388
  Homolog annotation: Hit_ID=Q6H6J8; Match level="QueryCoverage=31%, HitCoverage=9%, E-value=2e-10, Identity=76%"; Hit description=F-box -like
MSFDEDDTEEGSDCVKPFITLQDCIKANPEAFSKEILEEEENDEEADKSNLKVRAPSWLRLRAPALRGRAGASAPGALAVAGERAMVLRAAVTMAVANRVQLSQLAEEQRNATRLWKQLERDVRATLQQDKEA

SEQ ID NO: 58168 - protein, 273 aa, Zea mays
  Coding DNA Sequence Number=SeqID_16389
  Gene Ontology: Mol. function=ribonuclease H activity
  Homolog annotation: Hit_ID=Q6H5X3; Match level="QueryCoverage=87%, HitCoverage=100%, E-value=2e-75, Identity=62%"; Hit description=ABA -responsive protein-like
  Pfam annotation: Domain name=GRAM; Domain location=139-228; Score =39.6; E_value=1e-08; Accession=PF02893.10; Description=GRAM domain
MAPSAAALRYQSAIIPCTLRHGSRSVELAMMKKSSSGHVIGVPVISKAYGIEEEASRDPSSFSKGGDVDADHLAVSFTHPSPYASFGYKHSSSNHWVSKLSRRAQGFREHVTLGPKLSETVKGKLSLGARILQAGGVERVFRQAFSAADDDKQGERLLKALQCYIYTTGGPIAGMLFVSTRKVAFRSDRPVTVVTSSSSPAGVVRGTARVTYKVVVPLRRIRRVRPSENVHRPEEKYVHVATVDGFEFWFMGFVSFQRSCRCMQQAVSEVQTQ

SEQ ID NO: 58169 - protein, 382 aa, Zea mays
  Coding DNA Sequence Number=SeqID_16390
  Gene Ontology: Mol. function=nucleic acid binding; Cellular component= intracellular
  Homolog annotation: Hit_ID=Q9FNN4; Match level="QueryCoverage=71%, HitCoverage=56%, E-value=1e-63, Identity=45%"; Hit description =Arabidopsis thaliana genomic DNA, chromosome 5, P1 clone:MAH20
  Subcellular localization annotation: CTP_CleavageSite=33; ConfidenceScore=5.37e-01
MDRGSVCFRRCPFSLTIPARTAPRRPAPLLVVRAKRAGSQPPAAAASRQPANPSAVPKRDVEEEEEEVEEEMPWIQDKALDLVEFTGTVTQAIPGPRVGSSPVPWLLAVPLAYVGVSFVLAVVRTVRKFTSPHTKKKRRKGREAINYPALQDLMQKTGFDMDDVVRKYIRYTLNEKQFSPDVVVDLIHLRKASMLEDAEVAEILNEISRRIVREKEQGFKRKLAVQALFGKILYLSEHGASVHGGGSGGEEAREQAAEAECNKGVVDRGWATGLNQCDVYGLGFERRWQLPEFCSRDSSLVVKEIFGVTDEDADSLRIHTLSATGDIESIQKMVDDLDLEQAAEVGLGPVNTGYFRLEPGGFNAGFFSLGHASILTLRRKIL

SEQ ID NO: 58170 - protein, 287 aa, Zea mays
  Coding DNA Sequence Number=SeqID_16391
  Gene Ontology: Mol. function=transporter activity; Cellular component= integral to membrane; Biological process=transport
  Homolog annotation: Hit_ID=Q7XKI5; Match level="QueryCoverage=90%, HitCoverage=91%, E-value=3e-79, Identity=59%"; Hit description =Probable aquaporin TIP3.2
  Pfam annotation: Domain name=MIP; Domain location=20-260; Score =284.3; E_value=2.4e-82; Accession=PF00230.10; Description=Major intrinsic protein
MLPGRHPARRADTTGTGPLLPDATRAVVSEFVATAMFVFAAEGSVYGLWKLYKDTATPGGLLAVAIAHTLALVAAVAVASNASGGHVNPAVTFGLLVGRRISFGRAAVYWLAQMLGAVVASLLLTLVSGGTVPVRHTKVLGGLFGKICLTIPMRPVGFGLVRGVHERHALLLEAVMTFGLMYAVYATAVDHRSRGGAVAIAPLAIGFVLGANILAGGPFDGAAMNPARAFGPALVGWSWRHHWVYWVGPLIGAGLAGGLYEFVMVEQEPEAPAPAAVPRMPVASEDY

SEQ ID NO: 58171 - protein, 174 aa, Zea mays; identical to SEQ ID NO: 49909
  Coding DNA Sequence Number=SeqID_16392

SEQ ID NO: 58172 - protein, 215 aa, Zea mays
  Coding DNA Sequence Number=SeqID_16393
  Gene Ontology: Mol. function=transcription factor activity; Cellular component=nucleus; Biological process=regulation of transcription, DNA-dependent
  Homolog annotation: Hit_ID=Q2QK76; Match level="QueryCoverage=79%, HitCoverage=72%, E-value=1e-30, Identity=48%"; Hit description =Dehydration responsive element binding protein
  Pfam annotation: Domain name=AP2; Domain location=45-95; Score=48.5; E_value=2.3e-11; Accession=PF00847.10; Description=AP2 domain
MAPLAAAAAAAVKMEAEQAAMASAAAPQLGSAHQHQHQHQQMQPRRQYRGVRMRKWGKWVAEIREPHKRTRIWLGSYATAVAAGARLRHGRVLPARPGEGDGDGGEPARDPADGGGGGTLSAASIRKKAIEVGSRVDALQTGMMVPPPHHRERQRHHHHHHHHLPQLRMHAAAAEAAAAEHRQEVKQSPQRPAWSGRVKNPDLNRAPSPESSDAE

SEQ ID NO: 58173 - protein, 74 aa, Zea mays
  Coding DNA Sequence Number=SeqID_16394
MANGSISDLAVPVEASLSPSGYGLKRELWLRLRLREPNECCLYNLARQVPASFRRACVRICWFVDLLTKEYMGE

SEQ ID NO: 58174 - protein, 124 aa, Zea mays
  Coding DNA Sequence Number=SeqID_16395
MAQGRLSLTVFFSQQAQARRSPLVALRRDAAAACRPDGRREGGSRLLLAQEQKASPVANHMWKGGKSGGRRGPCAVCSCIGKPDEAAAAVALPSFKSARSPTNHRRVGLGWEDATTTLPGFQSD

SEQ ID NO: 58175 - protein, 484 aa, Zea mays
  Coding DNA Sequence Number=SeqID_16396
  Gene Ontology: Mol. function=transcription factor activity; Cellular component=nucleus; Biological process=regulation of transcription, DNA-dependent
  Homolog annotation: Hit_ID=Q9XHD4; Match level="QueryCoverage=44%, HitCoverage=42%, E-value=7e-63, Identity=58%"; Hit description =PHAP2A protein
  Pfam annotation: Domain name=AP2; Domain location=167-231; Score =93.2; E_value=8.1e-25; Accession=PF00847.10; Description=AP2 domain
  Pfam annotation: Domain name=AP2; Domain location=93-137; Score=34.8; E_value=6.7e-08; Accession=PF00847.10; Description=AP2 domain
  Pfam module annotation: Pfam domain module=AP2::AP2; Domain location =167-231::93-137
MWDLNDSPAAEAAPPSPSADDSGASSSSAAALVEIPDDADDDSAAAAAEAVVTRQFFPAPAAVGAAPGPGSSSARAGWLRLAAAAPPPAGGRHSQYRGVTFYRRTGRWESHIWAYDRAAIKFRGVEADINFSLEDYQDDMKQQMGHLSKEEFVHVLRRQSTGFPRGSSKYRGVTLHKCGRWEARMGQFLGKKYVYLGLFDTEEEAARAYDRAAIKCNGKDAVTNFDPSIYAEELEPAASTGGGGDDHNHNLDLSLGSSAGNKRGSLDDGGGGGGGGDDETSDQRVPMAFDVDWQTAAPRSTKAKVPVRFGLAFRINEACLVKCCLIKQALSRFNHRVRWPAQLDASSKQPQTQMLPPPPPAVLRVAHQLPLPFGPRHPQFLSNGGDPGTSGGLSLAIGGAGGGHWPPQLQHLQQQRLHGAWANGGGTSWPPPPHPHPHPHPPPPSTAATAAAASSRFPPYVVTTTQGPAGWAQKNGFHSLARPT

SEQ ID NO: 58176 - protein, 155 aa, Zea mays
  Coding DNA Sequence Number=SeqID_16397
MDRLRSRRRLKALPGGTTVVICSQIDANKVKFDKHGAEFQGKTQSCSAVAQSEHPEQACIHSERSMAPDGYVSPPTMHPVDRSSELAGHDEGAQHCGRQRTDSEGRGERRGIEAESTLTDAQKATVATHQTDETTQRRLCRLTGVGWMEQISPQP

SEQ ID NO: 58177 - protein, 292 aa, Zea mays
  Coding DNA Sequence Number=SeqID_16398
MAARVPPTTHDGEAGLVVEQTSKVRKKNTHMKLINVGKGLPLPGLVQNMFDPLFREMLGKGLNLSPITVRCPLKLICRSHYFVERSSRCSIVTPLRSCFINKNPLYSGTEQKQQIANRRRARRGRTSSASRRWQRSVWRTRGGFVVNADAATGAEACEQSRPRAGGTRTADTSSGNGPPGHAQGRTASAAPRTPATYMHGAPVTPSSPSASQYVSHARVFSWLNGLGLAHSHTTLPVPEEPERTVMLRRVRFALARDGDVPRQRRYPLVRDTDLPAVGLRLRPSPVASGKDP

SEQ ID NO: 58178 - protein, 677 aa, Zea mays
  Coding DNA Sequence Number=SeqID_16399
  Gene Ontology: Mol. function=protein serine/threonine kinase activity; Cellular component=cell; Biological process=protein amino acid phosphorylation
  Homolog annotation: Hit_ID=Q6RFY4; Match level="QueryCoverage=59%, HitCoverage=64%, E-value=1e-142, Identity=62%"; Hit description =MAP3Ka
  Pfam annotation: Domain name=Pkinase; Domain location=268-524; Score =311.9; E_value=1.2e-90; Accession=PF00069.15; Description=Protein kinase domain
  Pfam annotation: Domain name=Pkinase_Tyr; Domain location=268-524; Score=149.4; E_value=9.5e-42; Accession=PF07714.7; Description =Protein tyrosine kinase
  Pfam module annotation: Pfam domain module=Pkinase::Pkinase_Tyr; Domain location=268-524::268-524
MPAWWKSKGRSKSSKAAGAAAAAAADESIAAAAAIGDVKEEKGKKKASSFDEALLAKGVRGKQQHAPAAAGEGMGLPLPLPRPASLPTPLPSASASASASASASSGGDSSLGSSTSDDQLDLGVYRLSETSSTLLGRTVAIESRKQSQVPAEGTIFTNNQAVEHTRLSETSVSPRKEFRPQNLDLANDRTTYCRGRRSTEIVFSTQVPTSPPSSRGHHYQNSPVPSRTFGQCPASPTSWQDDSRSSSSPQPLPLPPGSPCLPSSSLQWKKGKLLGSGTFGQVYMGFNSEGGQMCAIKEVKVISDDSNSKESLRQLNQEIVLLSQLSHPNIVQYYGSDLCNETLSVYLEYVSGGSIHKLLQEYGPFGEAVLRNYTAQILSGLAYLHGRNTVHRDIKGANILVDPNGDIKLADFGMAKHISAYTSIKSFKGSPYWMAPEVIMNSNGYSLSVDIWSLGCTILEMATAKPPWSQYEGVAAIFKIGNSKDIPDIPNNLSSEAKSFLKLCLQRDPAARPTAAQLMDHPFVKDQATVRSSRSSITRDMFPNSTDGKNSRVKIETSSYRSLSPLRDPDILGRNLPGPTSPIPSTSSRRIAALNTSNVRMNMSLPVSPCSSPLRQYRQSNRSCLRSPPHPAYSAGAANYNPINNALYPTRPSSGLTDPWLEISQVKTQTFDSPRRL

SEQ ID NO: 58179 - protein, 91 aa, Zea mays
  Coding DNA Sequence Number=SeqID_16400
  Homolog annotation: Hit_ID=Q9LLN5; Match level="QueryCoverage=53%, HitCoverage=5%, E-value=2e-07, Identity=46%"; Hit description =Receptor-like protein kinase
MADIHTVRRNSPKVYTTSSCHISYFPLQAITMLHDGDANNLVDPQLHGELTHKKFIPRVGATMVTRNLENRACKNDIHVGTCSQAQGGQQG

SEQ ID NO: 58180 - protein, 126 aa, Zea mays
  Coding DNA Sequence Number=SeqID_16401
  Homolog annotation: Hit_ID=Q6QP51; Match level="QueryCoverage=33%, HitCoverage=20%, E-value=8e-07, Identity=63%"; Hit description =Putative growth-regulating factor 1
MQAACNRTKGAHPFDFDAPSMEAQAHTSCNRRAGYYVRETAPPLALVPCLLDCRTVATTRGTPAHGPTVSTEPHRVTGTGKGDTPKGILLREGSGPRAFLLIRGSKAGPSEGFDSRLRALGPRAYY

SEQ ID NO: 58181 - protein, 73 aa, Zea mays
  Coding DNA Sequence Number=SeqID_16402
  Subcellular localization annotation: CTP_CleavageSite=38; ConfidenceScore=5.02e-01
MGNDLGSAGLTGQARRQGRRVPGSTTVAPLTLMGGGPPEMRVWGALGGPGGIGKGSGRFEGNVANTSVGMATT

SEQ ID NO: 58182 - protein, 306 aa, Zea mays
  Coding DNA Sequence Number=SeqID_16403
MTAQVEPNPDDNLVDASLEDVVEGGNGVKMARYVVEEEDDEEEEVLSLVRRKRRSRTHSNTSSLAAAAKMMDICGLTMSTIEGVLEDAIPQDLLLELPEIRAIDIHIDHLNVVSVLVHHGASAPILEITLAPKGPLAPKGALDPEGAPAHKGASVGSPSAASMDVHVGSLMPRTNDVGATSSIMPIEPSEPTTLELSGSGAEIRMGTSSAEIPMGASGAEIPMGVALSLGDLDPLTLVPAHTMASVNAISSRGVLDLVAAQLEAHGALKLETAYRNIKVLESDREIMKALASSDPVIDAPLENAPT

SEQ ID NO: 58183 - protein, 493 aa, Zea mays
  Coding DNA Sequence Number=SeqID_16404
  Gene Ontology: Mol. function=RNA-directed DNA polymerase activity; Cellular component=mitochondrion; Biological process=RNA-dependent DNA replication
  Homolog annotation: Hit_ID=UPI00004C1731; Match level="QueryCoverage =91%, HitCoverage=30%, E-value=0.0, Identity=90%"; Hit description =UPI00004C1731 related cluster
  Pfam annotation: Domain name=RnaseH; Domain location=1-123; Score= -13.1; E_value=0.00096; Accession=PF00075.14; Description=RNase H
  Pfam annotation: Domain name=rve; Domain location=205-364; Score =112.5; E_value=1.2e-30; Accession=PF00665.16; Description=Integrase core domain
  Pfam module annotation: Pfam domain module=RnaseH::rve; Domain location=1-123::205-364
MFFDGSLMKTGAGTGLLFISPLGKHLRYVLCLHFPASNNMAEYEALVNGLRIAIELGVRRLDARGDSQLIIDQVMKNSHCRDPKMEAYCDEVRRLEDKFYGLELNHIARRYNETADELAKIASGPSGILQRCISIAEGQELLQEIHSGACGHHAAPRTLVGNAFRQGFYWPTVVADATRIVRTCEGCQFYARQTHLPAQALQTIPITWPFAVWGLDLVGPLQKAPGGYTHLLVAINKFSKWIEVRPLNSIRSEQAVAFFTNIIHRFGVPNSIITDNGTQFTSRKFLDFCEDHHIQVDWAAVAHPMTNGQVERANDMILQGLKPQIYNDLNKFGKRWMKELPSMVWSLRTTPSRATGFTPFFLVYGAEAILPTDLEYGSPRTRAYADQSNQANREDSLDQLQEAQDMALLHSMRYQQSLRRYHARGVRSRDLQVGYLVLRLRQDARGRHKLTPPWEGPFVVAKILKPGTYKLANSQGEVYNNAWNIQQLRRFYP

SEQ ID NO: 58184 - protein, 731 aa, Zea mays
  Coding DNA Sequence Number=SeqID_16405
  Gene Ontology: Mol. function=triacylglycerol lipase activity; Biological process=lipid metabolic process
  Homolog annotation: Hit_ID=Q1SDA9; Match level="QueryCoverage=40%, HitCoverage=45%, E-value=1e-102, Identity=69%"; Hit description =Lipase, class 3
  Pfam annotation: Domain name=Lipase_3; Domain location=392-531; Score= 126.9; E_value=5.7e-35; Accession=PF01764.16; Description=Lipase (class 3)
  Subcellular localization annotation: CTP_CleavageSite=8; ConfidenceScore=5.38e-01
MDVLRFVRAAAAPQPAVAPPASAATVPAQRQRLRMWPRGGGDQPPPVGAASTRGAEPRSPPDEERKAEGAQRGQGNWVLQMLRVQPRWVDAADAEATGGGQEPDEETAAAAAAGAGGVEECASCGCGEDDEGCAVGYGDGDGEVFDRASFSRLLRKASLGEAKEYSMMSYLCNIAYMIPRIQCSSSSVNVELLSVNAQISSEFPLNQSFLPFPPPNSGILLLSCFPSQPKCLRRYNLRFVTSSVQDKAGVSNPDQKQERSTKKDESGDQASEAVDDAVPRRGLGTIKPFGAYHVVSSAASYLHSRAMGVMPFGPGNGVKDDHPAAVTSLVSGASGDGLSVDEASFVATTSSVTSMVAAKEETRQAVADDLNSSRSCPCEWFVCEDDQNSTIYFVVQGSESIASWQANLLFEPVKFEEVDVLVHRGIYEAAKGMYHQMLPYVKAHLKSWGKSARLRFTGHSLGGSLALLVNLMLLVRGEAPASSLLPVITFGAPCIMCGGDHLLRRLGLPRSHVQSVTMHRDIVPRVFSCHYPDHVANILKLANGNFRSHPCLANQKLLYAPMGEVLILQPDERLSPHHHLLPPDSGIYHLGGGGGGGGAGTAANAGEGSLPQLRSALSAFFQLAAPARDPQGRRRVRAPGLRVPGPRRELVPPVRARRGPQGGQARAGGRAGALAPAPLVAVRRARRVVGVGGAARGPRGRRQRGCQARASLAGGAAARGAARSRRAPGRH

SEQ ID NO: 58185 - protein, 58 aa, Zea mays
  Coding DNA Sequence Number=SeqID_16406
MTGDRLVCGLWPVACGGGMGAANATCEVPVYTLHSQQVKLYRRYTYNNNHESTSCFFG

SEQ ID NO: 58186 - protein, 176 aa, Zea mays
  Coding DNA Sequence Number=SeqID_16407
  Homolog annotation: Hit_ID=Q6QP51; Match level="QueryCoverage=57%, HitCoverage=31%, E-value=4e-09, Identity=52%"; Hit description =Putative growth-regulating factor 1
  Subcellular localization annotation: CTP_CleavageSite=10; ConfidenceScore=5.22e-01
MTVPRTARTRATTASRTTRPVALTPRRDRRRLRREKQATLRLRHNDRVEKGTGKGDTPKRILLHEGNRPRASLLIRGSKAGPSEGFNGRLRALGFCAHYWSEVRWTAPRKGSTAASGHSGSAPTTDQRFKGWPLGGVQRPPQSAWVLRPLLVRGSMAGPSEGFNGRLRPLGLRAQY

SEQ ID NO: 58187 - protein, 64 aa, Zea mays
  Coding DNA Sequence Number=SeqID_16408
MVDQLHERENQGVAQVPTQQPKQMIAPMLCLSLVEKSSKPAARSTFHWRFSLSNVSERNRWVRF

SEQ ID NO: 58188 - protein, 394 aa, Zea mays
  Coding DNA Sequence Number=SeqID_16409
  Gene Ontology: Mol. function=hydrolase activity, acting on glycosyl bonds; Cellular component=amyloplast; Biological process =carbohydrate metabolic process
  Homolog annotation: Hit_ID=Q2HVV9; Match level="QueryCoverage=93%, HitCoverage=83%, E-value=5e-85, Identity=43%"; Hit description =Glycoside hydrolase, family 28
  Pfam annotation: Domain name=Glyco_hydro_28; Domain location=57-390; Score=250.4; E_value=3.7e-72; Accession=PF00295.8; Description =Glycosyl hydrolases family 28
MAKAVPSPLAAVAVLALLLLCRGAEARVLLTLDDFGGVGDGIANDTQALLDAWAAACSSTQEAVLAVPAGKVYQIWPVQLSGPCKKRLKLLISGAIVAPSSPDEWAGRDPMKWLYVYGVDGLSVSGGGTIDGMGQQWWASTCKRKKTQAVHFEECREVSVQGVTLQNAQQFQLTFTRCSCVKASFLRVVAPADSPNTDGIHLNDTSHVRITDNLISTGDDCVSMDLISDTGTNNVRVSIGSLGKNRTTDMVEDVKEQRATTPSGSNTCDFFQGGTGFARDLRFENIVMRNVSNPIIIDQYYCDQPTPCANQARHSSTQAVEVRRVEFAGIRGTSATPQAISIACSDAVPCRDLELANVNLTLEGGGAGRATALCYRASGKSAGTVVPPSCLARS

SEQ ID NO: 58189 - protein, 62 aa, Zea mays
  Coding DNA Sequence Number=SeqID_16410
  Homolog annotation: Hit_ID=Q8RXD8; Match level="QueryCoverage=85%, HitCoverage=16%, E-value=1e-09, Identity=50%"; Hit description=WD repeat protein-like
  Pfam annotation: Domain name=WD40; Domain location=16-54; Score=21.0; E_value=0.0043; Accession=PF00400.22; Description=WD domain, G-beta repeat
MAAALSQLDDEIVRGMAIGAVFTDYAGKINCLDFHRKEDLLVTSSEDDSIRMYNITSATCNV

SEQ ID NO: 58190 - protein, 180 aa, Zea mays
  Coding DNA Sequence Number=SeqID_16411
MMRYTNIALVSDKKRDFVYTAWKRSLDFYSHPDTNHSTNYQPNENTLALYNPDNTQEAPVDPYDSDMTQSLQEALHRSTMDISGAEYRGKEVPLFVLPTSLSPAVITLQDRLKENELRLSMLKEECKQLEADTQGMRNGSPRRLMNHGAGGSGSPMAQSRHPFSSQGSPRSPSGGSRRRA

SEQ ID NO: 58191 - protein, 111 aa, Zea mays
  Coding DNA Sequence Number=SeqID_16412
MAQKLGIHTLISDYHDLIDNIDEVTHKRLVALKEIKKDNIMVAKAYNKKLTQKAGACVEHHMWQLGRTHSPTMLPERSAIRLDQVRPSQPSSEDRYILTEIMLRRTKGIDH

SEQ ID NO: 58192 - protein, 131 aa, Zea mays
  Coding DNA Sequence Number=SeqID_16413
MSDAPGWLGGELAVLENRQGDVAKNHRTVRWCTGLSGESSAPAPKYNGNELVPLGKSPRTLRLKFTGLSGESEPPEPTVTNDQRATRGLHQQSVGGPIKDLKGVQRVMGFLAALSRFISRLGDEAYLYTVS

SEQ ID NO: 58193 - protein, 106 aa, Zea mays
  Coding DNA Sequence Number=SeqID_16414
  Gene Ontology: Mol. function=voltage-gated chloride channel activity; Cellular component=membrane; Biological process=chloride transport
  Homolog annotation: Hit_ID=Q6ZKN1; Match level="QueryCoverage=82%, HitCoverage=12%, E-value=1e-08, Identity=58%"; Hit description =Putative CLC-f chloride channel protein
MTSAIAFTGADLGTHPAIECNNADDVGEPEASYEQQRPLRWRATVEVVAVLVDDTPASPSWCPAPAPPRLWLESRLSTLCTRYSTRLQHGVAVGEPPQGVAGITWI

SEQ ID NO: 58194 - protein, 220 aa, Zea mays
  Coding DNA Sequence Number=SeqID_16415
  Subcellular localization annotation: CTP_CleavageSite=32; ConfidenceScore=5.17e-01
MTTNRELRARPTDSLAMTTNRELRARPTDSLRAGTSRRTARSSTRGIGELGRHRSREQALELGAAYVCRGLDDGRQRELGYRETSGRTGAVQAPWPRARAAGRDPSRGEALRELSGEVAARYGVPWRGLLRALEESSGQVRPWGARGAVQGRASSLGRRGAGRPGVEPEGRGYGKGEAPGRTSAAMGAGELAAGHSAIEQARLGVEERKSWATESSLPRA

SEQ ID NO: 58195 - protein, 225 aa, Zea mays
  Coding DNA Sequence Number=SeqID_16416
  Gene Ontology: Mol. function=calcium ion binding; Cellular component =membrane; Biological process=homophilic cell adhesion
  Homolog annotation: Hit_ID=UPI000051A0D1; Match level="QueryCoverage =77%, HitCoverage=10%, E-value=4e-19, Identity=29%"; Hit description =PREDICTED: similar to corin isoform 1
MVSPEAPPRPTPELGLNLNAGRRTPPRPTPELGLNLNAGRRTPPRPTPELGLNLNAGRRTPPRPTPELRLNLNAGRRTPPRPTPGLGLNLDLRRRTPPRPTPGLGLNLDLGGRTPPRSTPGLGLSLDLGRRTPPRPTPGLGLNLDLERRTPPRPTPGLRLSLDLGRRTPPRPNPGLGLSLDLGRRTPPRPTPGPGLSLDLGGASASPDLGLGPTTSQGGPSLPYP

SEQ ID NO: 58196 - protein, 377 aa, Zea mays
  Coding DNA Sequence Number=SeqID_16417
  Gene Ontology: Mol. function=protein serine/threonine kinase activity; Cellular component=membrane; Biological process=protein amino acid phosphorylation
  Homolog annotation: Hit_ID=Q9LRY1; Match level="QueryCoverage=77%, HitCoverage=74%, E-value=1e-110, Identity=68%"; Hit description =Receptor protein kinase-like protein
  Pfam annotation: Domain name=Pkinase; Domain location=79-363; Score =151.2; E_value=2.7e-42; Accession=PF00069.15; Description=Protein kinase domain
  Pfam annotation: Domain name=Pkinase_Tyr; Domain location=79-360; Score=112.2; E_value=1.5e-30; Accession=PF07714.7; Description =Protein tyrosine kinase
  Pfam module annotation: Pfam domain module=Pkinase::Pkinase_Tyr; Domain location=79-363::79-360
MVGCFACFKPAGDQEADEEAPLPSTSRRRGRSLRLPSCSSSNKGNQQADNPIAAASSSNVDSRARAFTYDELAAATENFRAECLLGEGGFGRVYRGRLESGQVVAVKQLDREGVQGNREFVVEVLMLSLLHHPNLVNLVGYCADGEQRLLVYEYMALGSLADHLLLDTSSRDKGNAAPEQEQRALSWETRMRVALGAARGLEYLHETANPPVIYRDLKSSNVLLDDALCPKLSDFGLAKLGPIGDRSPRVMGTYGYCAPEYVRAGTITVKADVYSFGVLLLELITGRRAVDSTRPTAEQLLVAWAMPMLRDSKRYRELADPLLRGGFPERDLKQAVAVAAMCLQEEASARPLMSDAAMTLAYLAEAAASAAASSSTS

SEQ ID NO: 58197 - protein, 497 aa, Zea mays
  Coding DNA Sequence Number=SeqID_16418
  Gene Ontology: Mol. function=translation initiation factor activity; Cellular component=fibrillar center; Biological process=translation
  Homolog annotation: Hit_ID=Q5N7Y7; Match level="QueryCoverage=95%, HitCoverage=96%, E-value=0.0, Identity=82%"; Hit description =Putative eukaryotic translation initiation factor 3 subunit 6 interacting protein
MAAAPYDREDGLQPSAPPHAVDAYDPSYVPDSVKTFVVHLYRHIRDKNVYEIHQMYEGGFQRLSDRLFRDAPWPSAEAVAPYCDGDPVFLLLYRELWYRHAHARLSPLTAAHRAESWTNYCDLFRVVLHGVVNMQLPNQWLWDMVDEFVYQFQSCCQYRAKLKTKTEDELNQLKQFDKAWNVYGVLNYLQALVEKSMITQILEREKEGLEQFTATDGYDYEGGSNVLKVLGYYSMIGLLRIHCLLGDYHTGLKCLGPIDLNQQGVYSIVIGSHISTIYHYGFANLMMRRYVEATREFNKDSSVYPQVQAVSSEVPSNKLIDENVSTQLKEKYNDKMTKMQRYDDEAYAAYDELFSYACPKFITPSPPVLDQPLTNYNQDAYRLQLKLFLYEVKQQQLLSGIRSYLKLYSTITISKLAQYMEVDEATLRSILMTYKHKMHAVDSDGKMVSSADFDFYIVEDVIHVVESKPTKRHGDYFLRQILKFEEMIGGLDKVQLD

SEQ ID NO: 58198 - protein, 115 aa, Zea mays
  Coding DNA Sequence Number=SeqID_16419
  Homolog annotation: Hit_ID=Q6QP51; Match level="QueryCoverage=59%, HitCoverage=31%, E-value=2e-18, Identity=69%"; Hit description =Putative growth-regulating factor 1
MVGRSHGDGCGDPHASVLARRRGYSEYGAKTHNEIFSLQIVYKLDITSASPDLRPRPWEEVSASPDPKTRPQPRPREESRPRLTPTSASGEVSASPDLGLGPTAPQGIHHYPTPS

SEQ ID NO: 58199 - protein, 70 aa, Zea mays
  Coding DNA Sequence Number=SeqID_16420
MAIQEVTRPGAWPLQGHHCEGIQQEQEKSIVTRNTLELKHGTARQVAAASVLCVYCGQHNAYDADIALGA

SEQ ID NO: 58200 - protein, 312 aa, Zea mays
  Coding DNA Sequence Number=SeqID_16421
  Gene Ontology: Mol. function=DNA binding; Cellular component=nucleus; Biological process=regulation of transcription
  Homolog annotation: Hit_ID=Q9AV06; Match level="QueryCoverage=72%, HitCoverage=66%, E-value=6e-64, Identity=57%"; Hit description =Putative NAM (No apical meristem) protein
  Pfam annotation: Domain name=NAM; Domain location=10-153; Score =191.5; E_value=2e-54; Accession=PF02365.6; Description=No apical meristem (NAM) protein
MGLREIESTLPPGFRFYPSDEELVCHYLYKKVANERAAQGTLVEVDLHAREPWELPDDGFENIYDVGLVIRDFAYGKWNQSKLAIFRDRKYATGSRTNRATKTGYWKATGKDREVRSPATRAVVAMRKTLVFYQGRAPNGVKSCWVMHEFRLDSPHTPPKEDWVLCRVFQKRKDSEQDNGGGSSSPPTFAGASSQGVVLDLPDDQQPSMTMAGAYVAVDHHQPGSSAVGFALPPHAQDNGLGDGGLDALLMNGATMWQYSSSALADHFPPEEVTAAPMMGLGSRGGGDGCSFFYDSGFDDMANMGFPQGWMG

SEQ ID NO: 58201 - protein, 575 aa, Zea mays
  Coding DNA Sequence Number=SeqID_16422
  Gene Ontology: Mol. function=RNA-directed DNA polymerase activity; Cellular component=intracellular; Biological process=RNA-dependent DNA replication
  Homolog annotation: Hit_ID=UPI00004C1731; Match level="QueryCoverage =99%, HitCoverage=46%, E-value=0.0, Identity=88%"; Hit description =UPI00004C1731 related cluster
  Pfam annotation: Domain name=RnaseH; Domain location=348-563; Score= -31.4; E_value=0.048; Accession=PF00075.14; Description=RNase H
MSFLDAYLGYHQIRMKESDQLATSFITPFGMYCYVTMPFGLRNVGATYQRCMNHVFGEHIGRTVEAYVDDIVVKTRKASDLLSDLETTFRCLKAKGVKLNPEKCVFGVPRGMLLGFIISERGIEANSEKIAAITNMGPINDLKGVQRVMGCLAALSRFISRLGERGLPLYRLLRKAECFTWTPEAEEALGNLKALLTNAPILVPPAAGEALLIYVAATTQVVSAAIVVERREEGHALPIQRPVYFISEVLSETKIRYQQIQKLLYAVILTRRKLRHYFESHPVTVVSSFPLGEIIQCREASGRIAKWAVEIMGETISFAPRKAIKSQVLADFVAEWVDTQLPAAPIQPELWTMFFDGSLMKTGAGAGLLFISPLGKHLRNVLRLHFPASNNVAEYEALVNGLRIAIELGVRRLDARGDSQLVIDQVMKNSHCRDPKMEAYCDEGTGRSSTTAAPQASSSDAYPSPKARSSYKKYTRGLAVTTQRPEPFLETPSDKKAPGGYTHLLVAIDKFSKWIEVRPLNSIRKFLDFCEDHHIQVDWAVVAHPMTNGQVERANSMILQGLKPRIYNDLNKFGK

SEQ ID NO: 58202 - protein, 156 aa, Zea mays
  Coding DNA Sequence Number=SeqID_16423
  Homolog annotation: Hit_ID=Q6QP51; Match level="QueryCoverage=47%, HitCoverage=33%, E-value=3e-13, Identity=56%"; Hit description =Putative growth-regulating factor 1
MNRHQSSRCHYKRNSGSTSAGTGKGDTPKGILLREGSGPQAPLLIRGSKAGPLEGFNSRLRALGLRAHYWSEVRRLAPRKGSTAASGHSSSAPTTDQGFVGWPPKGSTTASDAERGMTLGSGAALANLALAKPLTTSTYQPETWDSTVHPGYDQFA

SEQ ID NO: 58203 - protein, 146 aa, Zea mays
  Coding DNA Sequence Number=SeqID_16424
  Subcellular localization annotation: CTP_CleavageSite=25; ConfidenceScore=5.42e-01
MAGGSLPGPLDQSSLASSLLRPGFSAASPWPHSAFPFPSLAWELLRPPIRRGSHEFVAALRLSRPSRRAAWASSQPPQQPVRTSPIAPPWASNAVARVRFVNGGVDGGIDCDRRWCSSRVSTPPCIFSPEVADGFSAVDWIANVRD

SEQ ID NO: 58204 - protein, 146 aa, Zea mays
  Coding DNA Sequence Number=SeqID_16425
  Subcellular localization annotation: CTP_CleavageSite=25; ConfidenceScore=5.51e-01
MAGGSLPGPLGQSSLASSLLRPGFSAASPWPHSAFPFPSLAWELLRPPIRRGSHEFVAALRLSRPSRRAAWASSQPPQQPVRTSPIAPPWASNAVARVRFVNGGADGGIDCDRRWCSPRVSTPPCIFSPEVADGFSAVDWIANVRD

SEQ ID NO: 58205 - protein, 93 aa, Zea mays
  Coding DNA Sequence Number=SeqID_16426
MRSTPVVTVGKNSLAIRARLPVTLAGDAAPIRARVRGSPRSGPHMEVSPNKKKKGRSVEWAGGEDFQPKRSSEGADGWAELNEVSPGAEIPSG

SEQ ID NO: 58206 - protein, 885 aa, Zea mays
  Coding DNA Sequence Number=SeqID_16427
  Gene Ontology: Mol. function=peptidase activity; Cellular component =cell surface
  Homolog annotation: Hit_ID=Q10RW7; Match level="QueryCoverage=95%, HitCoverage=92%, E-value=3e-93, Identity=30%"; Hit description =Expressed protein
MEMGDDDNSSSRKCNTSSLKMLLEKEMSKEAESKRRHPSVIARLMGLEEDLPTKEPTVHHTVSDLSRDLNATNNTLQGKEHHHFIMSKTQNYQSCHEKIEYNDVFEVSEGQPGTDCFHDRTSQKGWSSENKSEQFNIARDKIMEPEQLAIEEKLLCTKELPEALVFPCSNRDLFLEFPEEHNPTFSRQSSGLHANQAPPQTKRITVLKPIRSVDSDGIRRPRAEIGKQNVLKMRRFHQIPSSKEEIPSQPSRIILLRPTPGKPGISKAKLTSRATSFQLPNRNSLNGSLDDNQASIGSAGLVHGMMQCRQDGCHQRDDSLLSSAYSNGYGGDESSFSDSEVDYTSGSEINYIEDCDTLSDSEGGSPLSRHSWNYIRRYEGQCSSSSFSKISHFSESSVVTEAKKQISERWSMVTCNEMSQVQLSRRKCTLGEMLSIKEAKEDEATTGMFYVSSNQSCGLENELTTRSTNVTTSRKNGDNGERSSKLPRSKSVPVISSTSDNMTVNMQASNPESCKLKVAVVSNKGKSAFKGRVSDFFLSKSKRPRRQMPAYHQSDCIAEGLEGCITHNRQDCNHKMDAIEKAMHYDDEFNSFSTRISTSIPDRTTSGASVSLGSSTGNLDKLGVNKCLNGNRDQPSPTSVLDAPSEDSSCNEPETLGTTTSKNAISRSSAIETVARFLSLDDTASESQSLCNPRPSSLLPDADDDESECHVLVQNIMSSAGLGTSQSRMVFAGWHLPDHPLDPVLRNKVSQLQEKSSYRRLLFDCVNVALIEIGENALLSALPWSKRSSRTWRGTSSPDLGVEVWSILKDWIHGARMFVVSKRDNAGIILDRIVKQEVEARGWVKLMMAQVVVITEELEGGVMEELVEEAVLDFYSLFSVVRYRL

SEQ ID NO: 58207 - protein, 499 aa, Zea mays
  Coding DNA Sequence Number=SeqID_16428
  Gene Ontology: Mol. function=receptor activity
  Homolog annotation: Hit_ID=Q1SQZ7; Match level="QueryCoverage=82%, HitCoverage=84%, E-value=2e-61, Identity=36%"; Hit description =SPla/RYanodine receptor SPRY
  Pfam annotation: Domain name=SPRY; Domain location=295-410; Score =3.8; E_value=0.013; Accession=PF00622.18; Description=SPRY domain
  Subcellular localization annotation: CTP_CleavageSite=44; ConfidenceScore=5.15e-01
MAALWLKLLLAVGLPIAALIAVVFLVYRRRSLPRNAPPALPEVSPTAVAEPTASPGLAKLNMRYNAASGRVGLRFQQLHQHQHHARVDARHRGSGGGAQQGPFQWADHPRLVTEAAENGWAQFVFAVAPPRSKSKSASSSPLWGTCPLCDAGTSRDMAEAAAWELPMGSSERMQAVRLDPAAAAASSRKWLPGSNPSPLRGDTDAGNPNALCLARMSLPLPGPPLAGAPFPQDAYFEITIIYLNTKRPEWSASRASRRGRDGSSESDRVKLVSFAPAAKNPVQENRAVKDDEQDKRRHLVMSLGLATASAAPQRPSLVGTYASSIGFHSDGAVYLDGMKLVYESDKSSWAGVDKVVGCGFEPAKRKVFFTVDGQLVHAVSCNAEAFSSPLYPVLASSFDVMALVNLGQSKFRYAPGNARRTANPCFVRAASTVDARGSGSMGLDFDDSGELFSVGRVDSGWLETAKTSRSRKESVGGSGAASVGDPEAESDLFEIPLRD

SEQ ID NO: 58208 - protein, 785 aa, Zea mays
  Coding DNA Sequence Number=SeqID_16429
  Homolog annotation: Hit_ID=Q6K5X7; Match level="QueryCoverage=99%, HitCoverage=99%, E-value=1e-119, Identity=38%"; Hit description =Transport protein-like
  Pfam annotation: Domain name=DUF869; Domain location=7-665; Score= -77.8; E_value=1.9e-11; Accession=PF05911.2; Description=Plant protein of unknown function (DUF869)
MTEMGEALRTCMERLVVAREEREQIIVEAANEISSKKKKVRELQLKLEDANKKIAKLAAENSNLCKAADVKDALIGELRESAAATGDKLADATARLESAQKQAGSLEYEVRMLQKELEVRGQEREYDLKSVDAARRQQAEHQKRIAQLEAECQRLRAMVRKRLPGPAAIAKMRDEVDQQQAQTPTASPRRPRPATPSSPRSAVAPFSPRTPSPRRSVSGGADGYAFRLRAVEDENTALKQALAKRESELQFMQMKYADEACKLTAAQMQVKELTEENRQLSDANTQSESWASALVSELDKFRSGNENGGACASIMASSEMNLLHDFSEVEKLETASGDQKRNVQRASPHKADTGLATEEQNGNAPVLDGSVSNGHPEKVRHIWELVVQKHEASGESFEAIIEQISQALEQTATRAKRDGSDVPSDQSEIEKAVRDMVEQTTSMIQAAYAEEDDVARSRALSHHKSEMFRRFKRLVQVRHELLEGKCDLGKFVDEVCLILKYVVSQCFSDQDQIDTVSRDTEDFDGAKPSGAVTADGTHDTESAKPTATSAFRTEADGEPVQSVESQTTAANRLQKPDIELIHALQHEDGSSILSERKSAAYREMQSPASEASVERRAVQEENHLATNSEILAAADKLAECQETITMLSKQLQALKTPATPGPLDASSACIPRTSSAKSDYKPQSLASILAEASTSPSPTPTTPTPQVLSKEDEGEVRATATPTTRSAARQEENDAGGNNSMQIVVVHAEPRPDDGGSADPTKRRKKRGTSLLGRIVFRKRAEGGS

SEQ ID NO: 58209 - protein, 48 aa, Zea mays
  Coding DNA Sequence Number=SeqID_16430
MAFIQIFTVAECLPCDKSPGPDLVSQVAFVVNVFNALFEIGAKEPSLG

SEQ ID NO: 58210 - protein, 167 aa, Zea mays
  Coding DNA Sequence Number=SeqID_16431
MAVRIVDAGVLIAIRRCSTSLMRLASTPWCQSSADTGSRLRDEAHHVKDIVGLKVMNLQLIVVGESAHKGMQGQAELALIEGRKPWRRLSQIKETWNDAIRVVGKLDGHEEARRHNSQRASREERKQGFKRKNMGHLGYQARKDCVPCRFSPLGTERQRGTPQKIHQ

SEQ ID NO: 58211 - protein, 80 aa, Zea mays
  Coding DNA Sequence Number=SeqID_16432
MTLQHLRYAQSVAWNSLGPGGGEGAMAQVVSHPSVSSVLLGHHAGKSSWELPPPWLKWRHGWRFKRCRHLRHLQRLLGRK

SEQ ID NO: 58212 - protein, 144 aa, Zea mays
  Coding DNA Sequence Number=SeqID_16433
GYCSPQEETLEHRGNGEDTGIARVDSGGLRLHGENAGERGPGELERLGANWKGVTMGHPKPQRPPPPPTFAYPKTLNEWHQQEYGVSFITPKDEAEGFDDSFFQSAPAAAPGPIPGDPRPSGSEHPPSSPSFSGSFPFLWFSFI

SEQ ID NO: 58213 - protein, 146 aa, Zea mays
  Coding DNA Sequence Number=SeqID_16434
MGTDGHLDLNKGGSPIHPSRCSHIRRRGKKLFGRGEDIDGVDFIQTEIAEGGWHNGCGSCWLRHGAEGGVRGQWARRAPGDGEGTDGTRDIEDGDTTETAAPRVGVGRGEHRAQGRRRDTVPLVVYITVLMVVESILYARSRGQSS

SEQ ID NO: 58214 - protein, 80 aa, Zea mays
  Coding DNA Sequence Number=SeqID_16435
MAGVRATGDFYSYFPIRPMVQAEEDRANLIGAYSPRKSQLQIKPCMILGVFYFLISWFWMGEDVGLLMMVDKCRWARPST

SEQ ID NO: 58215 - protein, 166 aa, Zea mays
  Coding DNA Sequence Number=SeqID_16436
  Subcellular localization annotation: CTP_CleavageSite=49; ConfidenceScore=5.55e-01
MAHFTTSSCECVPGVSHHADPSSLGSVVRGSCAGRFMLRRSAFCTVGLRTSLGVAPELRVDFCERSTRRSSLQGITAEVWTYIRSIERAGLEGSDESEYSSDEENSSDSSEEGSGGDGGDGDDDGGDGDGGGGDSGKGGDGSDKGGSGDGGSGSKGSSKGSNKASG

SEQ ID NO: 58216 - protein, 79 aa, Zea mays
  Coding DNA Sequence Number=SeqID_16437
  Subcellular localization annotation: CTP_CleavageSite=17; ConfidenceScore=5.12e-01
MKGIIKSTHVECVFFVYSMLTPSVSTTRNRFISGYMLTVTLVQSKVLVLMGELLKGQYLSLQISIEIIKIPHSIRGTFV

SEQ ID NO: 58217 - protein, 91 aa, Zea mays
  Coding DNA Sequence Number=SeqID_16438
MALAMTMVLVENLDAIECGVVGAAVAWRTGQSGAPPDTVQCAATSTSRWVLTVGALTGGASGLSGGAPDRSCRLSGAPIVRALSSARAGVH

SEQ ID NO: 58218 - protein, 81 aa, Zea mays
  Coding DNA Sequence Number=SeqID_16439
MSELHQGLHTHGSTAAAAMVIQGKIGPGDQDHLQNDPNLVEFFFEVVDTGLRWDAQGEEDVRVRKLCSGEQWPRIVEAVRR

SEQ ID NO: 58219 - protein, 240 aa, Zea mays
  Coding DNA Sequence Number=SeqID_16440
MPTGPEQCTATGRRTLAVSLLASSVLTRETQARQQQSRDAATEAGVTGRLAVAGAVAYALKDRFTTRREPHVARRSGAPDGHGPGPGPRGAVAGVERIDGVAVAGAVLPIRRAGGYAGAHRAVAPGAGLLPLEAVRVRRQPAAGPAGRTTTAAAWNARMAAGRPQGSVGGSACWSSWPATRCRRSWPRRRWAGAWTTPVAASAACAARMGGAGRGASSWLAADDAQSGGSTGSSAVISER

SEQ ID NO: 58220 - protein, 259 aa, Zea mays
  Coding DNA Sequence Number=SeqID_16441
  Gene Ontology: Mol. function=hydrolase activity, hydrolyzing O -glycosyl compounds; Cellular component=vacuole; Biological process =carbohydrate metabolic process
  Homolog annotation: Hit_ID=Q5JKK9; Match level="QueryCoverage=90%, HitCoverage=92%, E-value=8e-68, Identity=57%"; Hit description =Putative beta-1,3-glucanase
  Pfam annotation: Domain name=Glyco_hydro_17; Domain location=30-256; Score=267.8; E_value=2.1e-77; Accession=PF00332.9; Description =Glycosyl hydrolases family 17
MAKQAVLLPMAALALVLGALATIPAGVRSIGVCYGMNGDDLPSASDVVQLYKDNGIDSMRIYSPDTDVLQALSGSGIAVTVGVPNADVGGLASRPSAAAAWVQSYVLGLPGRPVPLHRRRERATPGAVDINYALLAMPAGTVVVQDGGYSYDSLFDAMVDCFYSALENAGAGNVTVVVSESGWPSAGSDAANTTNSQAYSQNLINHVGQGTPKRPGPIEAYIFATFNEDQKLGDDETRRHFGLFNKDRSLAYPIDFVNP

SEQ ID NO: 58221 - protein, 286 aa, Zea mays
  Coding DNA Sequence Number=SeqID_16442
  Gene Ontology: Mol. function=protein serine/threonine kinase activity; Cellular component=Golgi apparatus; Biological process =protein amino acid phosphorylation
  Homolog annotation: Hit_ID=Q6ETL7; Match level="QueryCoverage=94%, HitCoverage=48%, E-value=5e-85, Identity=60%"; Hit description =Putative oxidative-stress responsive 1
MAPEVMEQKDYDFKYILLPCYYYRKLLIFIYSSPADIWSFGITALELAIGHAPFSSQPPAKVFLMTLQHAPPSLHNTKEKKFSDSFKSMIATCLIKDPTKRPPAKKLLKHPFFRRARSDHNAVKCMLNKLPSLAERMQFIKENEAKLQADKKPLDNCKEKASQEEYRRGVSEWNFDIADLKAQAALYPDENEAEDFLRFLFELDIVDETTQLKDIRAESHSINNDGTENQIQQVRCLHPKVSTCNDVDEYLEKTAFQKGRFKVIHDYSKVFVFYYILLYHDIFDYQ

SEQ ID NO: 58222 - protein, 89 aa, Zea mays
  Coding DNA Sequence Number=SeqID_16443
  Homolog annotation: Hit_ID=Q60EX6; Match level="QueryCoverage=49%, HitCoverage=4%, E-value=2e-09, Identity=97%"; Hit description =Serine/threonine protein phosphatase BSL1 homolog
  Subcellular localization annotation: CTP_CleavageSite=56; ConfidenceScore=5.55e-01
MSCGAKPGGGQLRVYDLTTMLVVSPGPGLSTSSTSPPTIWSTSSRLHPAGEPPSPRAAHAATAVGTMVVFQLRFTKWRHRVELDQQGTP

SEQ ID NO: 58223 - protein, 77 aa, Zea mays
  Coding DNA Sequence Number=SeqID_16444
MESSMHGQARAGAMGRHGVWTPSRTWGLPEEWGRGRWSEIAGGARVTEAGGVRRGGATGSTEDGGVQGGWIRGCRRR

SEQ ID NO: 58224 - protein, 61 aa, Zea mays
  Coding DNA Sequence Number=SeqID_16445
MASPPWRRSSGIRKAVCLAFLQPLATSSQLNQIVQQYVANPTDTTIPSSTLRIDSTQQITN

SEQ ID NO: 58225 - protein, 664 aa, Zea mays
  Coding DNA Sequence Number=SeqID_16446
  Gene Ontology: Mol. function=L-aspartate oxidase activity; Cellular component=cytoplasm; Biological process=pyridine nucleotide biosynthetic process
  Homolog annotation: Hit_ID=Q6Z836; Match level="QueryCoverage=97%, HitCoverage=99%, E-value=0.0, Identity=85%"; Hit description =Putative L-aspartate oxidase
  Pfam annotation: Domain name=DAO; Domain location=88-459; Score= -22.1; E_value=0.00015; Accession=PF01266.14; Description=FAD dependent oxidoreductase
  Pfam annotation: Domain name=FAD_binding_2; Domain location=88-472; Score=374.0; E_value=2.3e-109; Accession=PF00890.14; Description=FAD binding domain
  Pfam annotation: Domain name=Pyr_redox_2; Domain location=88-461; Score=-35.3; E_value=0.042; Accession=PF07992.4; Description =Pyridine nucleotide-disulphide oxidore
  Pfam annotation: Domain name=Succ_DH_flav_C; Domain location=531-634; Score=-11.0; E_value=7.1e-08; Accession=PF02910.10; Description =Fumarate reductasesuccinate dehydroge
  Pfam module annotation: Pfam domain module=DAO::FAD_binding_2::Pyr _redox_2::Succ_DH_flav_C; Domain location=88-459::88-472::88-461::531- 634
  Subcellular localization annotation: CTP_CleavageSite=72; ConfidenceScore=5.35e-01
MANLTNGFASLHCAGAMHVDKGHMQASGLPFLSFRRCAQLDISRLGSVPRFMGATSATVSQHHVRQRISAIRASTLSCLQDDATKFFDFVVIGSGVAGLRYALEVSKHGSVAIITKAEPHESNTNYAQGGVSAVLCPSDSVESHMKDTIVAGAYLCDEEIVRVVCTEGPERVKELIAMGASFDHGEDGRLHLAREGGHSHNRIVHSADMTGREIERALLQAVHNDDNISLFGHHFAIDLLTCQKNGEIYCYGVDSIDIETQKVVRFISKVTLLASGGAGHIYPTTTNPPVATGDGIAMCHRAQAVISNMEFVQFHPTALSDEGLPIKPKTRRENAFLITEAVRGDGGILYNQSMERFMPMYDDRSELAPRDVVARSIDDQLKKRGEKYVLLDISHRPRDKVLAHFPNIAAECLRYGLDITRQPIPVVPAAHYMCGGVRAGLQGETNVKGLYVAGEVACTGLHGANRLASNSLLEALVFARRAVQPSIDLMVDADGDARPSLVARWARPTLPRSVLGDSVLSDIVGRTRQARMELQSVMWEYVGIVRSTGRLKQAEWRIGDLESEWEEFLFRRGWKPTTVGVEVCEMRNLFCCAKLVVRSALARRESRGLHFTEDFPYLEESRRKPTVIFPAAVQELTWSSKPLQRQLQADDNACSSSGWALGIR

SEQ ID NO: 58226 - protein, 190 aa, Zea mays
  Coding DNA Sequence Number=SeqID_16447
MALQAQQQATPSPTRDRAGSGEWLADTEKLPGAAASPEDVVVASTHHAAAAARYVPPRATSHTAEPNPGRGGGGGWYSWNGGRRARHDPPAPRRQQPAKTPPPAPPLPAAPPPPPAASPAPAPRAPPPHAQVRSADRVVPAILSRKRRAAVMQRAALLARAAAAGLFLAALAVLASDKACFPRLLQLSTP

SEQ ID NO: 58227 - protein, 67 aa, Zea mays
  Coding DNA Sequence Number=SeqID_16448
MATTAVKRRKMRVQQRRRGLGGERMQQLKKWIRTPVRKCRTLAYMTRDLRVGPGTSAFPEWDLDPSK

SEQ ID NO: 58228 - protein, 106 aa, Zea mays
  Coding DNA Sequence Number=SeqID_16449
  Subcellular localization annotation: CTP_CleavageSite=57; ConfidenceScore=5.11e-01
MDAFYSTSSSSLASYGGGWGYDSLKNFRQICRVVQTHLKLRKRYGMLMATTLLEDPSSFLPWNMTQGVNISRIGETLLNVLRRELGEVEKNKDTFLAEFTKGGKAG

SEQ ID NO: 58229 - protein, 99 aa, Zea mays
  Coding DNA Sequence Number=SeqID_16450
  Subcellular localization annotation: CTP_CleavageSite=44; ConfidenceScore=5.12e-01
MAEASSPSSSPLRVPPQRAVALVAALLVLVLLRAPCGGAIRPVREGASNGGAATVARAQDGGHRHRAATRALGSDRAPLAAEPIVKVHGRSAVRVRPGA

SEQ ID NO: 58230 - protein, 105 aa, Zea mays
  Coding DNA Sequence Number=SeqID_16451
MSRSPAKEADGSAHVCADHGVCARGKIEGVTADPAEKATTATNLAGKTRSGQRDGRSSREGRSNVRTGKKVGGGKIRATWWPWKAYVLTAVGGYSRVHGQRRMGG

SEQ ID NO: 58231 - protein, 88 aa, Zea mays
  Coding DNA Sequence Number=SeqID_16452
MEWQPALSVLGAFLFRSPKVIRMDDEAIVEELRLDVMTKTKYDDDRKGTKTIQSLMIRVMLIVGVLGPTAHPGLPLKVFLGVGRCRRL

SEQ ID NO: 58232 - protein, 86 aa, Zea mays
  Coding DNA Sequence Number=SeqID_16453
MRFYHVWGKMIEKEKLTEETKLFEEKKAADPYISGFIGSMAKTNIEKITKEILEGLSEDTVEVLKIYQIFLHQITPEAIMRMGIFV

SEQ ID NO: 58233 - protein, 86 aa, Zea mays
  Coding DNA Sequence Number=SeqID_16454
MGRGLFYPPWTVIGGPDWDGEVRFCERDGDSRQEARASLNAGEKAAQATDPPKALNRVGAREGEEGGGPAGESKKAGDCVGPGKGC

SEQ ID NO: 58234 - protein, 124 aa, Zea mays
  Coding DNA Sequence Number=SeqID_16455
MAAADWAASRAEREDRSPPLVAQELLAPGRADVGVVPGCPDVGITSKRSRPLSAGHGTKFPWMHAPLHVEKIAYVRLGVHILETTDQAKDGGKKSFKVPSARKKVKEAEEPKARCEEDDLQLKD

SEQ ID NO: 58235 - protein, 80 aa, Zea mays
  Coding DNA Sequence Number=SeqID_16456
MGKPVPSLLMLLLSRVTALVPTITGMGDHVSGRVRGKVCGQVHSEILKDFLEKPVYTEDPGFSLNHFFDLYPCATIPLSQ

SEQ ID NO: 58236 - protein, 354 aa, Zea mays
  Coding DNA Sequence Number=SeqID_16457
  Gene Ontology: Mol. function=transferase activity; Cellular component= mitochondrion; Biological process=isoprenoid biosynthetic process
  Homolog annotation: Hit_ID=O04882; Match level="QueryCoverage=91%, HitCoverage=87%, E-value=1e-163, Identity=87%"; Hit description =Farnesyl pyrophosphate synthase
  Pfam annotation: Domain name=polyprenyl_synt; Domain location=30-317; Score=339.1; E_value=7.4e-99; Accession=PF00348.8; Description =Polyprenyl synthetase
MEVSACREGNQQKLESYIMDPIVSVDVFHLVSSMLDYNVLGGKCNRGLSVVDSYKILKGVDVLSKEETFLACTLGWCIEWLQAYFLVLDDIMDNSQTRRGQPCWFRVPQVGLIAVNDGIILRNHISRILQRHFKGKPYYVDIIDLFNEVEFKTASGQMLDLITTHEGEKDLTKYNLTVHRRIVQYKTAYYSFYLPVACALLLAGENLENFVDVKNILVEMGTYFQVQDDYLDCFGDPEFIGKIGTDIEDYKCSWLVVQALERAAENQKSILFVSTIKLANLFHNINDKENYGKSDPACVAKVKDLYKELKLEEVFHEYERESYNKLIADIEAQPSKAVQTVLKSFLHKIYKRDK

SEQ ID NO: 58237 - protein, 352 aa, Zea mays
  Coding DNA Sequence Number=SeqID_16458
  Gene Ontology: Mol. function=protein binding; Cellular component =clathrin vesicle coat; Biological process=intracellular protein transport
  Homolog annotation: Hit_ID=Q9BXS5; Match level="QueryCoverage=98%, HitCoverage=99%, E-value=1e-115, Identity=50%"; Hit description=AP-1 complex subunit mu-1
  Pfam annotation: Domain name=Adap_comp_sub; Domain location=160-351; Score=279.3; E_value=7.4e-81; Accession=PF00928.11; Description =Adaptor complexes medium subunit family
MAGAVSALFLLDIKGRVLVWRDYRGDVSALQAERFFTKLLDKEGDSEVHSPVVYDDAGVTYMFIQHNNVFLLTAARQNCNAASILLFLHRVVDVFKHYFEELEEESLRDNFVVVYELLDEMMDFGYPQYTEAKILSEFIKTDAYRMEVTQRPPMAVTNAVSWRSEGIRYKKNEVFLDVVESVNILVNSNGQIVRSDVVGALKMRTYLRCVRLARFENDRTISFIPPDGSFDLMTYRLSTQVKPLIWVEAQIEKHSRSRIELMVKARSQFKERSTATNVEIEVPVPSDATNPNIRTSMGSAAYAPERDAMVWKVKSFPGGKVRYLKIIEKSGYQALPWVRYITMAGEYELRLI

SEQ ID NO: 58238 - protein, 105 aa, Zea mays
  Coding DNA Sequence Number=SeqID_16459
MAGVATICWALWLSRMTCFWILLVYNIFAGCAGHNPRLTMFFFATTIRMQLVRIRAEYWINAMHMQFAVPHYIQDRHGLPGDYDEASLLRRLRSVPSRSRRADRP

SEQ ID NO: 58239 - protein, 183 aa, Zea mays
  Coding DNA Sequence Number=SeqID_16460
  Subcellular localization annotation: CTP_CleavageSite=52; ConfidenceScore=5.61e-01
MDEAASASAAAVRLRASTPRSKKRTSCSKSRGRSQDRRRSPNPNPSSRRERAADHGSAAPSRKSDRKPNRSFPDSATLATAMASVAAASAPSRSSGARSMRSRCSRALTPSRIALASRRAFKDLWAWAAAVGRGSSGGGGGCDGRLGDGRVVGGFSLGRGMVERAVDLESSGGICDERWWRMD

SEQ ID NO: 58240 - protein, 135 aa, Zea mays
  Coding DNA Sequence Number=SeqID_16461
  Gene Ontology: Mol. function=oxidoreductase activity, acting on the CH-OH group of donors, NAD or NADP as acceptor; Cellular component =mitochondrion; Biological process=tricarboxylic acid cycle
  Homolog annotation: Hit_ID=Q1RVD4; Match level="QueryCoverage=56%, HitCoverage=20%, E-value=9e-33, Identity=89%"; Hit description =Isocitrate dehydrogenase, NAD-dependent
MSVVSHESGTADAVSKVITKFSSERIAKYAFDYAYLNNRKNVTAVHKANIMKLADGLFLESYREVAKKYPGIKYNVIIVDNCCMRLVAKPEQIKPNKHKSSFNHKFNPKLDLANHTNSKKTQTKLRKNESSKQTE

SEQ ID NO: 58241 - protein, 495 aa, Zea mays
  Coding DNA Sequence Number=SeqID_16462
  Homolog annotation: Hit_ID=Q69XZ5; Match level="QueryCoverage=49%, HitCoverage=34%, E-value=3e-33, Identity=40%"; Hit description =Putative transcriptional regulator
  Subcellular localization annotation: CTP_CleavageSite=68; ConfidenceScore=5.04e-01
MPNKPQEKFDVGVPETSHSYSAAVPAGTSSKRHAARKWKRSLSDPFCSRPHSAPELVSGCKGSPPVTVAPEDRDACITIQQRSLSMFEDGLQNFLQLLQVFKSKVEEQCSKIEYLRNNMFQGEIFDKYFMSFLPLFVMQTYMKGIVSQSSDNQYWDIWNRQKLSPEFEVKRQNSLRANQENNMSFVIQDLTNQLVELERHFNNLEMNRSGNLVKIVIPRSNPNDAHVAGVGKEQISDGTPVIGAGAGTSISAKFKEAGGVDLIVLYNSGRFRMAGRGSLAGLLPFGDANDIVLQMASEVLPVVKGVPVLAGFLMFPRELQLSGESVKLMKLGEGVAMFKVPDWFLDRNDYKDNMFSQTTLRVWDILFNEGDNVLFCVALTIFKMREDDLLRTQHISDVIDIFCKQPHIIYMTLMNCRRTVTGASQCPTLARGSQRARGHSSLAVEEREFTVALSGLGMRLMEAQATWITREQVAQYNFLSIFTVLIYFVQKMRNK

SEQ ID NO: 58242 - protein, 55 aa, Zea mays
  Coding DNA Sequence Number=SeqID_16463
MAVMGSTSDKMYLCQVPNFGVLNDKAETGRIPSWVLIELDRRYFSDMKTWSLLYT

SEQ ID NO: 58243 - protein, 154 aa, Zea mays
  Coding DNA Sequence Number=SeqID_16464
MPPKKNTRASSIDEDDAMRVALTAKKGKVAIADEIPPPSNDPKTTTELEGEGHVTKQKWIPSPKLEVHTSSLDYQSDPSPNPKKPSLPSHNMARSNKIHVIDSPGYEASANRQPHMVGTSIIYDDEDLQDDIDLDINTEEQLLLISLCMRNNNL

SEQ ID NO: 58244 - protein, 91 aa, Zea mays
  Coding DNA Sequence Number=SeqID_16465
MTTKLKKGKAEEATKEGVDSEENVSDGEDDVVVEEEVHRRLGYIEDEDLIHFAGEETVLEPKEDEIVVFKSFFWVGLRLPMHIMIGKVLKT

SEQ ID NO: 58245 - protein, 142 aa, Zea mays
  Coding DNA Sequence Number=SeqID_16466
  Subcellular localization annotation: CTP_CleavageSite=79; ConfidenceScore=5.10e-01
MAEKEQRGQASRSKTRVFQCKLEQARSDASGNQQSHNNTSHQRSHFNNPRGTNSSEGSVITIPQQSSAPPNLVELVPWRANAGAKANTPPSLEDSHINVPQIEGPIGSSRKPGPRTTPMQRLKRSLRFDEPRRRPSKASGPG

SEQ ID NO: 58246 - protein, 148 aa, Zea mays
  Coding DNA Sequence Number=SeqID_16467
  Gene Ontology: Mol. function=RNA-directed DNA polymerase activity; Cellular component=chromatin; Biological process=RNA-dependent DNA replication
  Homolog annotation: Hit_ID=UPI00004C1732; Match level="QueryCoverage =70%, HitCoverage=6%, E-value=1e-51, Identity=89%"; Hit description =UPI00004C1732 related cluster
MVGLQVVMRMMVFDYAHGNGKEEGVEADLQEFQDIDEFEDVIIPGKRVQPLGQLDLPVCFGTPSNFRKGTLMFEVVGFRGTYHTVLGRPCYAKFMAVPNYTYLKLKMPGPNGVITVGSTYRHAYECDMECVEYAEAVTESKALIADEC

SEQ ID NO: 58247 - protein, 65 aa, Zea mays
  Coding DNA Sequence Number=SeqID_16468
MESPVPYYGGYKCGHCTTATGDNWSIVRQGRSLENMVAGVTWPTTLPPGWIVEWDPTSVGEEHEE

SEQ ID NO: 58248 - protein, 72 aa, Zea mays
  Coding DNA Sequence Number=SeqID_16469
  Gene Ontology: Mol. function=nucleic acid binding
  Homolog annotation: Hit_ID=Q8H642; Match level="QueryCoverage=65%, HitCoverage=16%, E-value=8e-15, Identity=72%"; Hit description =Putative RNA-binding protein
MDDSYLSTFLQPGGDPHVLCFVDFDNPAQATIALEALQGYKFDEHERDSAHLRLQFSRFPGPRSAGGPRGRR

SEQ ID NO: 58249 - protein, 127 aa, Zea mays
  Coding DNA Sequence Number=SeqID_16470
  Gene Ontology: Mol. function=aminoacyl-tRNA ligase activity; Cellular component=cytoplasm; Biological process=tRNA aminoacylation for protein translation
  Homolog annotation: Hit_ID=Q2QS12; Match level="QueryCoverage=69%, HitCoverage=18%, E-value=3e-36, Identity=82%"; Hit description =Bifunctional aminoacyl-tRNA synthetase, putative, expressed
MSTNKGSAAKGGGGKKKEVKKETKLGMAYKKDDNFGEWYSEVVVNSEMIEYYDISGCYILRPWAMEIWELLKEFFDAEIKKLKLKPYYFPLFVTENVLQKEKDHIEGFAPEICTVRISIQFFQSAQL

SEQ ID NO: 58250 - protein, 110 aa, Zea mays
  Coding DNA Sequence Number=SeqID_16471
  Gene Ontology: Mol. function=aminoacyl-tRNA ligase activity; Cellular component=cytoplasm; Biological process=tRNA aminoacylation for protein translation
  Homolog annotation: Hit_ID=Q2QS12; Match level="QueryCoverage=82%, HitCoverage=14%, E-value=2e-25, Identity=63%"; Hit description =Bifunctional aminoacyl-tRNA synthetase, putative, expressed
  Pfam annotation: Domain name=HGTP_anticodon; Domain location=21-106; Score=38.2; E_value=2.8e-08; Accession=PF03129.10; Description =Anticodon binding domain
MVMTHGDDKGLVLPPKVAPIQVIVIPVPYKDADTTAIKGACESTVYTLDQSGIRADQDTRENYSPGWKYSHWEMKGVPLRIEIGPKDLANKQRGGEAENPNVTDSDTLME

SEQ ID NO: 58251 - protein, 170 aa, Zea mays
  Coding DNA Sequence Number=SeqID_16472
  Gene Ontology: Mol. function=aminoacyl-tRNA ligase activity; Cellular component=cytoplasm; Biological process=tRNA aminoacylation for protein translation
  Homolog annotation: Hit_ID=Q2QS12; Match level="QueryCoverage=74%, HitCoverage=26%, E-value=1e-57, Identity=80%"; Hit description =Bifunctional aminoacyl-tRNA synthetase, putative, expressed
  Pfam annotation: Domain name=ProRS-C_1; Domain location=97-170; Score= 117.2; E_value=4.7e-32; Accession=PF09180.1; Description=Prolyl-tRNA synthetase, C-terminal
MAVACVGPPIGHECETVLFPSILMLLPKFCCPVNNPIKQWIPNLMVRVVRRDNGAKVDIPVTNLVEEVKVLLDEIQKNLFKTAQEKRDACVHVVNTWDEFTTALNNKKLILAPWCDEEEIEKNVKTRTKGELGAAKTLCTPFEQPELPEGTLCFASGKPAKKWSFWGRSY

SEQ ID NO: 58252 - protein, 340 aa, Zea mays
  Coding DNA Sequence Number=SeqID_16473
  Subcellular localization annotation: CTP_CleavageSite=43; ConfidenceScore=5.26e-01
MTTAVLSPYGSKETSARSQQHRQLCFYRAQALLRRPRYRGLVSATRNGTQKCVHARKTSEAALPSLREERCLPGPERVARDPADGHGNNGALGGAQGEAEHVLATDGPGKLTRSKSASSLKEAWCGPVATNVRISYSVSSEQRISMSACAWWSGLAALQGLPEPAGVGYGLRRVQSGVARLFTHDDGTCGNDEGQLWKGFRGGKGSGKMMTCGGRGVGARTQPRRRTTDSASPDPRARTQPRPRTTDSASPDPRARTQPRPQTKISASPDPRAQTQPRPRTTDSASPDPRARTQPRPRTTISASPDPRARTQPRPRRSLRLARPRARTDHVTRGASLSYP

SEQ ID NO: 58253 - protein, 85 aa, Zea mays
  Coding DNA Sequence Number=SeqID_16474
MAKCCEKQTDDYWCPVQHHRSSAPPRPPLVGGYWIQRHCRRNQTEPSTCLFWEICEQASCPRTVGSSQWVFHASPIPATDLGKAQ

SEQ ID NO: 58254 - protein, 265 aa, Zea mays
  Coding DNA Sequence Number=SeqID_16475
  Gene Ontology: Mol. function=nucleic acid binding; Cellular component= intracellular; Biological process=chromatin modification
  Homolog annotation: Hit_ID=Q9C9H1; Match level="QueryCoverage=74%, HitCoverage=70%, E-value=1e-19, Identity=38%"; Hit description =Putative zinc finger protein; 21453-22187
MASPRLKLFGFHVSKEEHELCPETTTEAETTEPEEAPACGNNGGGSDSSSSSTTTTTTATAAGGDGRRYECQYCCREFANSQALGGHQNAHKKERQQLKRAQLQAAAAAAGRVAGGAAAALYPRANPMVSAFVPPPHLLGGGGDASPTSWVYFSPRAAAVAGGPQGQQFHVSHNCVFPSRATPAAAVTAASPAVFSYTPAPSAASAPYVTDDHHSGRRVVHVSPAAALGRYPGMAAGPGMAEPVVTGPEDALGLDLQLSLAPAGL

SEQ ID NO: 58255 - protein, 286 aa, Zea mays
  Coding DNA Sequence Number=SeqID_16476
MARRPRTGVLGPQQHSAPARASPGHDATSRGRDIDRYDADARPSAARMPSRVPSARHGSAGLRRRLGRKCGARALGVADLDATDSGGSSAWEPGKGARHGARRGRLGAAGSRCERDPASRRGRCSAPARKPKPAMGAAGNRCERDPASRRGRCSAPARKPKPAMGAVGLSLDPDRGRRVLGAGGSPQGRASSRTSPKAAAGTGEIGGRAQWRRRLPARAARVRKTLTAPIYNGRVGLLVGRLGRPAWLDRRAGHQAASWPVKQAPGPPSWDQIGPKMANFFLNSEF

SEQ ID NO: 58256 - protein, 195 aa, Zea mays
  Coding DNA Sequence Number=SeqID_16477
  Homolog annotation: Hit_ID=Q6ZFT8; Match level="QueryCoverage=27%, HitCoverage=10%, E-value=5e-21, Identity=90%"; Hit description=DNA -binding protein-like
MPEEIANFSFSWWQVHVQSDPAGRLVIIGDPEQPDNPWGITPFKKVVVNLPSRINPHQTSAVVTLHGPHPHHFPFCLTQHNREDAPEANGYHHNPHCLDQSQVVDADKHINHHSTDDNAPSNASGHIHGGISYHASTPSVDDRSIKSGDDSDGVESTNGRSNNTEISFLENDTVWIPPQAADKEDEAQSGYMMSS

SEQ ID NO: 58257 - protein, 535 aa, Zea mays
  Coding DNA Sequence Number=SeqID_16478
  Gene Ontology: Mol. function=ligase activity; Cellular component =nucleus; Biological process=regulation of transcription
  Homolog annotation: Hit_ID=Q9SCP4; Match level="QueryCoverage=77%, HitCoverage=92%, E-value=1e-140, Identity=57%"; Hit description =Nodulin / glutamate-ammonia ligase-like protein
  Pfam annotation: Domain name=PPR; Domain location=126-160; Score =14.0; E_value=0.16; Accession=PF01535.11; Description=PPR repeat
  Pfam annotation: Domain name=PPR; Domain location=161-195; Score =11.6; E_value=0.31; Accession=PF01535.11; Description=PPR repeat
  Pfam annotation: Domain name=PPR; Domain location=197-231; Score =23.8; E_value=0.0006; Accession=PF01535.11; Description=PPR repeat
  Pfam annotation: Domain name=PPR; Domain location=232-266; Score =21.6; E_value=0.0028; Accession=PF01535.11; Description=PPR repeat
  Pfam annotation: Domain name=PPR; Domain location=268-302; Score =28.9; E_value=1.7e-05; Accession=PF01535.11; Description=PPR repeat
  Pfam annotation: Domain name=PPR; Domain location=303-337; Score =35.1; E_value=2.4e-07; Accession=PF01535.11; Description=PPR repeat
  Pfam annotation: Domain name=PPR; Domain location=338-372; Score =39.7; E_value=9.7e-09; Accession=PF01535.11; Description=PPR repeat
  Pfam annotation: Domain name=PPR; Domain location=373-407; Score =22.4; E_value=0.0016; Accession=PF01535.11; Description=PPR repeat
  Pfam annotation: Domain name=PPR; Domain location=408-442; Score =36.7; E_value=8.1e-08; Accession=PF01535.11; Description=PPR repeat
  Pfam annotation: Domain name=PPR; Domain location=443-477; Score=4.3; E_value=2.3; Accession=PF01535.11; Description=PPR repeat
  Pfam module annotation: Pfam domain module=PPR::PPR::PPR::PPR::PPR::PP R::PPR::PPR::PPR::PPR; Domain location=126-160::161-195::197-231::232- 266::268-302::303-337::338-372::373-407::408-442::443-477
  Subcellular localization annotation: CTP_CleavageSite=26; ConfidenceScore=5.75e-01
MNLPTPLPPTSSPAAAPRASRAPVVPAARRGTGRRRRRQKPSSSPSTRETEAEYEQPDALARILRTEAAISGVSRKAAAARQQSTNLWPRAVLEALDSAVAACRWESALEIFELLRKQHWYEPRSQTYARLLMMLGKCRQPGPAAGLFREMLSERLRPTADVYTALIGAYGYSGLLEHALAAVEQMKGAADCKPDGYTFSVLVDCCAKSRRFDLIPAVLDEMSYLGIECNSVIHNAIIDGYGKAAMFEEMEGALSTMLESGSNVPDIYTMNSVVGAYGNHGRTDEMEKSYSEFQLMGVEPDTKTFNIMIRSYGKAGMYVKMMSIFRYMKKRFFSPTAVTFNTVIECFGRAGDIEKMEYYFRLMKIQGVKPNPITYCSLVNGYSKAGLLDKVAGVIRQTENTNVVLDTPFFNCVISAYAKSGDIKIMEEMLQLMKEKRCKPDRITYATMIQAYTAHGMDEAAMLLEIEAERFDKRLLQPPSETGRLGIESMKQAAWMTLSAHEQIAGGGTRRSWDLRCRLGPSETNYIDLQWPQKW

SEQ ID NO: 58258 - protein, 143 aa, Zea mays
  Coding DNA Sequence Number=SeqID_16479
  Subcellular localization annotation: CTP_CleavageSite=21; ConfidenceScore=5.30e-01
MASLSSSSSCVDWRARGAHCPQRARWNSVNSPTGLQLGRTKGKGILARWNSSLLAGAASAFGGGTQELYFSVRIPTRWHGYRRRKRGEDEMDESVPARARCSIKVTFRYNGSVLLTTFKDTDVATSTTIRVGSGLSGEAPRKS

SEQ ID NO: 58259 - protein, 159 aa, Zea mays
  Coding DNA Sequence Number=SeqID_16480
MAMAMGPLPLPDSSWHGDAIAARQAIISSVLVQQELSAGRVLMTVASHASLNEDHATAWGSIASPPIPSTPLRSLALGGKPIRTNCTSPIQKGLRCTEVPHRPQPPDPMSRCPPPQGKAAMGNGVSLNTGKTEASAAHSSAAIKAGRQAGHDMNGGGGM

SEQ ID NO: 58260 - protein, 261 aa, Zea mays
  Coding DNA Sequence Number=SeqID_16481
  Homolog annotation: Hit_ID=Q9AWU6; Match level="QueryCoverage=30%, HitCoverage=13%, E-value=5e-36, Identity=86%"; Hit description =Putative WD40-repeat protein
  Pfam annotation: Domain name=WD40; Domain location=110-147; Score =22.6; E_value=0.0014; Accession=PF00400.22; Description=WD domain, G- beta repeat
  Pfam annotation: Domain name=WD40; Domain location=66-104; Score =30.2; E_value=7.1e-06; Accession=PF00400.22; Description=WD domain, G-beta repeat
  Pfam module annotation: Pfam domain module=WD40::WD40; Domain location=110-147::66-104
  Subcellular localization annotation: CTP_CleavageSite=89; ConfidenceScore=5.06e-01
MGRTARISKNSLRIFPPSRTGNGRVEGGNYFPLKAIGNQVLSKSLRGSSPWTPSIFLVTKLALSLMVKLKNMLYHTARINSLAWSPDSRLVATGSLDTCAIVYEIDKPVASRVTIKGAHLGGVHGLTFLDNDILVTAGEDACIRVWKEDSFVSGSGIPASDFVRSCENIGILLLLFLPQATERKKRTDSRERNEQRDGGRQWPLLRLIYVSFFSGGRVATDGDLLAMALVLSRREMAAHRRVLARRAARAPSGVAPSWLGA

SEQ ID NO: 58261 - protein, 334 aa, Zea mays
  Coding DNA Sequence Number=SeqID_16482
  Gene Ontology: Mol. function=DNA binding; Cellular component=nucleus; Biological process=RNA-dependent DNA replication
  Homolog annotation: Hit_ID=Q9LGH0; Match level="QueryCoverage=70%, HitCoverage=74%, E-value=6e-36, Identity=36%"; Hit description=NAM -like protein-like
MPPRRADLEPGRRIEEIEDCVVGSMENCSQFDGLQPYTSVLDSAYYTDLLVNVVEESQDPTPPIDARSHHGRATAKSTQGRSKNFRDKEDILLVSAWLNVGMDPIQGVDQSHGTLWTRIHEYFNDNKTFESNRSEGSLMNRWIEARNHSGWLVDDKIANACAMFKAEDPKERKFSYLHCWKILKDKPKWMDRRKEIGNAKKTSCKKQKTLATSPTPFAAPDGPVAVINQDGEQAARPEGKKKEKQKLRQRSTIEAVDYLMEKKKEADHDKELKKEEKSNWKCLGSSSQESAESGSTGLSGGAPDSVRWCIGQCPVRQAGSSELAALGNSSATYD

SEQ ID NO: 58262 - protein, 154 aa, Zea mays
  Coding DNA Sequence Number=SeqID_16483
  Gene Ontology: Mol. function=inositol-3-phosphate synthase activity; Biological process=phospholipid biosynthetic process
  Homolog annotation: Hit_ID=O65195; Match level="QueryCoverage=52%, HitCoverage=16%, E-value=6e-37, Identity=91%"; Hit description =Inositol-3-phosphate synthase
  Pfam annotation: Domain name=NAD_binding_5; Domain location=1-154; Score=-71.4; E_value=0.00042; Accession=PF07994.3; Description=Myo -inositol-1-phosphate synthase
MTMRMVSRRGVVQLVLVSAIAWSCLDLSLSPSTSGHASPPLPSSQVNTDDLVFGGWDISIMNLADAMTRAKVLDIDLQKQLRPYMESMVPLPGVYDPDFNAANQGSRANNVIKGTKKEQVEQIIKDIMYSALMLTCLCAIKEVSSVQPNMPLCN

SEQ ID NO: 58263 - protein, 66 aa, Zea mays
  Coding DNA Sequence Number=SeqID_16484
  Subcellular localization annotation: CTP_CleavageSite=55; ConfidenceScore=5.13e-01
MINSDSKHFVKHKGGSAGAVEGVAGAPRRLHRRGAVGASAAPGVVLGVQVARWARAERGKRRVGGG

SEQ ID NO: 58264 - protein, 66 aa, Zea mays
  Coding DNA Sequence Number=SeqID_16485
MQRKKANLPCSVRSVSQEHLIGASQLVCCPPGTVPAATGRRMGGRNKVKKSIWQLLCGCSSPQTKD

SEQ ID NO: 58265 - protein, 192 aa, Zea mays
  Coding DNA Sequence Number=SeqID_16486
  Gene Ontology: Biological process=response to stress
  Homolog annotation: Hit_ID=Q6ZHE6; Match level="QueryCoverage=97%, HitCoverage=97%, E-value=7e-76, Identity=76%"; Hit description =Universal stress protein / early nodulin ENOD18-like
  Pfam annotation: Domain name=Usp; Domain location=5-185; Score=61.5; E_value=2.7e-15; Accession=PF00582.16; Description=Universal stress protein family
MAAEKRTIGMGMDYSPSSKAAARWAVDNLIKAGDRLVLVHVLPKGVDSSHKELWKTTGSPLIPLSEFMEMNLQARYGLNPDKETLEILRAVSKSKQGSWPARNKKMDRTLPNYCIKQPEELVRVEVLAKVYWGDAREKLCEAVDDLKVDSFVLGCRGLGPLKRALLGSVSNYVVNNATCPVTVVRGPTGLSA

SEQ ID NO: 58266 - protein, 260 aa, Zea mays
  Coding DNA Sequence Number=SeqID_16487
  Subcellular localization annotation: CTP_CleavageSite=59; ConfidenceScore=5.54e-01
MLALRAMLDPTAACSRHGRSTTISVVPSTLALRRRTGIRGRHLRSPRRRATTGTDEWVVCDVAKVFGGQYCAVSVFGASAADDWLREGRHAPLCGLREAGELGNVSSQQIRKYIKNQWSTSAYPYYSLSTQRGRLCDTVPTRHAELPQTAPPPSAIPSPTLRTQCPLRFPPPPLPQLPTPRTELPQFSRMAEPSSRNPLHRLPQTAPPAAPPSTMPSPTCAIGSPSDSLPLRFPNCNALDTLAATATATANYNFGSSSLQ

SEQ ID NO: 58267 - protein, 252 aa, Zea mays
  Coding DNA Sequence Number=SeqID_16488
  Gene Ontology: Mol. function=ion channel activity; Cellular component= integral to membrane; Biological process=ion transport
  Homolog annotation: Hit_ID=Q6ZHE3; Match level="QueryCoverage=98%, HitCoverage=31%, E-value=1e-103, Identity=73%"; Hit description =Putative cyclic nucleotide-binding transporter 1
  Pfam annotation: Domain name=cNMP_binding; Domain location=110-197; Score=6.8; E_value=0.073; Accession=PF00027.19; Description=Cyclic nucleotide-binding domain
RLEMQLRRRDVEKWMSHRRLPEDLRRRVRRAERFTWAATQGVNEEELLSNLPEDIQRDIRRHFFRFLNKEKILNVSFCDNIYIYRCTMDVRLFTLMDWPILDAICDKLRQNLYISGSDILYQGGTVEKMVFIVRGKLESISADGSKAPLHDGDVCGEELLTWYLEHSSANRDGGKIKFQAFVLRASDLEEVTSQFARFLRNPRVQGAIRYESPYWRTIAATRIQVAWRYRKRRLKRAEKSRLSEETYASLGS

SEQ ID NO: 58268 - protein, 98 aa, Zea mays
  Coding DNA Sequence Number=SeqID_16489
MRRRMLGSFICFDETHGDPIEIDTVAGSGIGTGTCSTSPVESVPDLDAGDSNLNSKKRSKYWNDFDELTKIMNGKKVKNVARCKHLRYIISDNLNHVL

SEQ ID NO: 58269 - protein, 61 aa, Zea mays
  Coding DNA Sequence Number=SeqID_16490
  Gene Ontology: Mol. function=transcription corepressor activity; Cellular component=signalosome complex; Biological process=red or far red light signaling pathway
  Homolog annotation: Hit_ID=Q8W207; Match level="QueryCoverage=87%, HitCoverage=12%, E-value=9e-20, Identity=83%"; Hit description=COP9 signalosome complex subunit 2
MEDYGFEYSDEEPEEQDVDIENQYYNSKGLVETDPEGALAGFDQVVSMEPEKAECMNAKVY

SEQ ID NO: 58270 - protein, 175 aa, Zea mays
  Coding DNA Sequence Number=SeqID_16491
MRPQRQPLSPRKATPTVENTTNRSETGNNQLPRTEDPSTQEGPQGVITVYGDQQTTRNIERDFVPWRHNVRCLLAEGEGPSRPRPTKTEAIKAPIQSNEEAKKVTLDPSVLNQTVLISEDLSQKNGKWRMCISIRAHHTSQPRPTSTLLLYVATSHGTVSADGISLEHLEDNSRF

SEQ ID NO: 58271 - protein, 102 aa, Zea mays
  Coding DNA Sequence Number=SeqID_16492
MTLGKEEYKKQMTCKEKHCICYNYHEKGYLVKVCQKGSPIHPPLGTLTFFSDFDQNHKGFGKINDNGVDAKRFEEHGYVFVSKTLGGREHSHHESLFVTKLL

SEQ ID NO: 58272 - protein, 115 aa, Zea mays
  Coding DNA Sequence Number=SeqID_16493
MGWWWMSMAPRGRRVHIWWRWTQFRQDFAHGIGSSIFGAITFTARKNSDVLRKRARSNHRNRISNSGADPSQQKESQQRYRSERITQQLHRPPKKAWEQSFSCQRGGSGRGQHIL

SEQ ID NO: 58273 - protein, 110 aa, Zea mays
  Coding DNA Sequence Number=SeqID_16494
MRQHEEYDQDHGAPAHSGATRNESASASAKSPALGRPWGSWLSTSFSMIPHSLASYRLKEARFDYGCNAIMAKFMAIPHYPYMILNLDLTASSPSELTSRELWNAFRGAI

SEQ ID NO: 58274 - protein, 223 aa, Zea mays
  Coding DNA Sequence Number=SeqID_16495
MTGDKQRQKLKQKPTSKISNTYINKMDKKPATPYLIKKKKNGKVIAIKANKQANKGKVAKRIWVPNEIITRQHRILKDQQVLGKGQDVKEEKLGCSQQEKTKYDSTLSPPWSSRLVCTKIDAHDASKIRLGWALYGWKLRSFDYVLPVLACVLDCACKDKPSWKELSIGEKVKSGFEDEAFVRRLSQESKATFLRNRSRWAFDWQGADLPRLTKGEGHNSAHH

SEQ ID NO: 58275 - protein, 156 aa, Zea mays
  Coding DNA Sequence Number=SeqID_16496
MAPKDDIGLPVNVQEGTTTTPTLLMWLFLFAHLFLPEDNGEVRCHDVLCCLGGPDGSRVDSQPVAWTTVVSTLETLRDPPQYGGLVLGDSMSSTLPWMKRMSEEKELGAMLRVSAISFEGRVERDLKQKISKGDRDVEYDSHGIIVDQCRTPYLAC

SEQ ID NO: 58276 - protein, 104 aa, Zea mays
  Coding DNA Sequence Number=SeqID_16497
MKVVLSKVGNGTNTKFWKDKWLHGQRIADLAPRLLAAIHKWIGNIRTMSDALIIGSELLTLKGLSQLGWWSTAMVKIMQVYGNGPREAKDMHCALIEELNKPGD

SEQ ID NO: 58277 - protein, 143 aa, Zea mays
  Coding DNA Sequence Number=SeqID_16498
MASRDRARGGGGGGGAYKRQRCRGQREAGNSGRDGDGGGMLRLSVRPSGSAGEKPTAVVAHPYPPPPDVYPPPPRGHGHPPPPHGVYPPPPQGPYPPPQQPPPGYQGYFNDQQRPYYPPPHGEHQHNHHQGNQGSSSGFLKGW

SEQ ID NO: 58278 - protein, 129 aa, Zea mays
  Coding DNA Sequence Number=SeqID_16499
MGKLSLGRTRTARTHWEWGDGGSNVCPPRTLLATVASATGECITTATVEPFTLWRGTFASHRGSTSRSDAFRFFRADSWWSFSITIVTTAPMFLPCAHLKSYALGDDPAEKVIGLRICRTTTRDNGGDE

SEQ ID NO: 58279 - protein, 190 aa, Zea mays
  Coding DNA Sequence Number=SeqID_16500
  Gene Ontology: Mol. function=voltage-gated ion-selective channel activity; Cellular component=mitochondrial outer membrane; Biological process=anion transport
  Homolog annotation: Hit_ID=Q5NBN7; Match level="QueryCoverage=69%, HitCoverage=42%, E-value=3e-51, Identity=66%"; Hit description =Mitochondrial import receptor subunit tom40-like
  Subcellular localization annotation: CTP_CleavageSite=27; ConfidenceScore=5.04e-01
MGSSVSQASAPPPPPPTYASTPPSFVHAAADVAAPPPKPHEEEATEEKVDYLNLPCPVPYEEIQREAFMTLKPDLFEGMRFDFTKMITPYFALTHSVAMGSIDIPAQKSGVIKIPTSNYEFGANFINQKTMLMGRVAHDGRENIRVKHDITDNLSLKINAQLTSEPHYSKGMLYFDYKGLPKCPFSLYVR

SEQ ID NO: 58280 - protein, 482 aa, Zea mays
  Coding DNA Sequence Number=SeqID_16501
  Gene Ontology: Mol. function=oxidoreductase activity, acting on the CH-OH group of donors, NAD or NADP as acceptor; Cellular component =mitochondrion; Biological process=tricarboxylic acid cycle
  Homolog annotation: Hit_ID=Q9SDG5; Match level="QueryCoverage=99%, HitCoverage=100%, E-value=1e-173, Identity=92%"; Hit description =Putative isocitrate dehydrogenase
  Pfam annotation: Domain name=Iso_dh; Domain location=161-478; Score =448.4; E_value=9.6e-132; Accession=PF00180.10; Description =Isocitrateisopropylmalate dehydrogenase
MALRRLLQGSVLPRVTGRVSAPAVAPFSTESGETIRATLFPGDGIGPEIAESVKQFIFEGFFMEIDLTLAYNSLGDHVRMLLSKVVLIAGGALETVFFQMDVTYFVIYTLTNSLSEMHYIKYTFSRSVTTVIWAVYCCVHCTNSIGSNAGPIRYESPGPQVALEGQGIESICVFNVAGVPIEWEEHYVGTEVDPRTESFLTWESLESVRRNKVGLKGPMATPIGKGHRSLNLTLRKELGLYANVRPCNSLPGYKTRYDDVNLVTIRENTEGEYSGLEHQVVRGVVESLKIITRQASLRVAEYAFHYAKANGRERVSAIHKANIMRKTDGLFLKCCREVAETYPEIQYEEVIIDNCCMTLVKNPGLFDVLVMPNLYGDIISDLCAGLIGGLGLTPSCNIGEGGICLAEAVHGSAPDIAGKNLANPTALMLSAVMMLRHLQFNDKADRIHNAILQTIAGGKYRTADLGGKASTSEFTNAVCDHI

SEQ ID NO: 58281 - protein, 146 aa, Zea mays
  Coding DNA Sequence Number=SeqID_16502
  Gene Ontology: Mol. function=oxidoreductase activity, acting on the CH-OH group of donors, NAD or NADP as acceptor; Cellular component =mitochondrion; Biological process=tricarboxylic acid cycle
  Homolog annotation: Hit_ID=Q9SDG5; Match level="QueryCoverage=99%, HitCoverage=41%, E-value=1e-65, Identity=83%"; Hit description =Putative isocitrate dehydrogenase
  Pfam annotation: Domain name=Iso_dh; Domain location=2-142; Score= -59.2; E_value=1.3e-09; Accession=PF00180.10; Description =Isocitrateisopropylmalate dehydrogenase
CCREVAETYLKFNTRRSSLTIVLVKNPGLFDVLVMPNLYGDIISDLCAGLIGGLGLTPSCNIGEGGICLAEAVHGSAPDIAGKNLANPTALMLSAVMMLRHLQFNDKADRIHNAILQTIAGGKYRTADLGGKASTSEFTNAVCDHI

SEQ ID NO: 58282 - protein, 187 aa, Zea mays
  Coding DNA Sequence Number=SeqID_16503
  Gene Ontology: Mol. function=nucleic acid binding; Cellular component= intracellular; Biological process=DNA integration
  Homolog annotation: Hit_ID=O24587; Match level="QueryCoverage=35%, HitCoverage=6%, E-value=5e-21, Identity=75%"; Hit description=Pol
MTTEEILGKFVSGRMMIKEARYVDEALNGPMPIYEPQTVALKATSSREALPSKGDERHGKREKKKAYKKAKGEAHLGKEWDSDCSSSDSDDEGLAASAFNKSSLFLNERHTCLMAKEKKVYASGGSSWIIDSGCTNHMTGEKKMFTSYVKSKDSQNSIIFGDGNQGKVPKVHNKPIKRPNMGSNKES

SEQ ID NO: 58283 - protein, 87 aa, Zea mays
  Coding DNA Sequence Number=SeqID_16504
MSGEHAKREMVTKEKPGTLGKKNEERTPSKEADDKHKEHKEESIGSIESHKEDDKKKNKMKVVYYVTNFSSPSTSGAESTFFEAPRA

SEQ ID NO: 58284 - protein, 878 aa, Zea mays
  Coding DNA Sequence Number=SeqID_16505
  Gene Ontology: Mol. function=protein serine/threonine kinase activity; Cellular component=integral to membrane; Biological process=protein amino acid phosphorylation
  Homolog annotation: Hit_ID=Q10LZ2; Match level="QueryCoverage=85%, HitCoverage=81%, E-value=0.0, Identity=55%"; Hit description=Protein kinase domain containing protein, expressed
  Pfam annotation: Domain name=LRR_1; Domain location=100-122; Score =7.8; E_value=9.9; Accession=PF00560.23; Description=Leucine Rich Repeat
  Pfam annotation: Domain name=LRR_1; Domain location=124-147; Score =10.3; E_value=3.4; Accession=PF00560.23; Description=Leucine Rich Repeat
  Pfam annotation: Domain name=LRR_1; Domain location=154-176; Score =3.8; E_value=55; Accession=PF00560.23; Description=Leucine Rich Repeat
  Pfam annotation: Domain name=LRR_1; Domain location=178-200; Score =11.3; E_value=2.2; Accession=PF00560.23; Description=Leucine Rich Repeat
  Pfam annotation: Domain name=LRR_1; Domain location=202-224; Score =14.1; E_value=0.52; Accession=PF00560.23; Description=Leucine Rich Repeat
  Pfam annotation: Domain name=LRR_1; Domain location=226-247; Score =8.2; E_value=8.2; Accession=PF00560.23; Description=Leucine Rich Repeat
  Pfam annotation: Domain name=LRR_1; Domain location=249-272; Score =8.3; E_value=7.9; Accession=PF00560.23; Description=Leucine Rich Repeat
  Pfam annotation: Domain name=LRR_1; Domain location=51-74; Score=0.4; E_value=2.4e+02; Accession=PF00560.23; Description=Leucine Rich Repeat
  Pfam annotation: Domain name=LRR_1; Domain location=76-98; Score =14.5; E_value=0.38; Accession=PF00560.23; Description=Leucine Rich Repeat
  Pfam annotation: Domain name=Pkinase; Domain location=549-818; Score =147.9; E_value=2.8e-41; Accession=PF00069.15; Description=Protein kinase domain
  Pfam annotation: Domain name=Pkinase_Tyr; Domain location=549-818; Score=135.2; E_value=1.8e-37; Accession=PF07714.7; Description =Protein tyrosine kinase
  Pfam module annotation: Pfam domain module=LRR_1::LRR_1::LRR_1::LRR _1::LRR_1::LRR_1::LRR_1::LRR_1::LRR_1::Pkinase::Pkinase_Tyr; Domain
  Subcellular localization annotation: CTP_CleavageSite=56; ConfidenceScore=5.28e-01
MAVGLNSLHGALLKFITVPARPSFNPLPNSHTYNLRSRGDRISQQPPDFKLSSDVDLSSNSGLSGPLPTSIGNLRQLTTLILAGCSFTGGIPEELGNLVQLSFLAMNSNRFTGRIPASIGLLNNLFWLDLSENQLSGPVPISSATSPGLDLLTHTKHFHFSGNQLTGNLNGLFSPSMRLEHILFDNNQLTGPIPAELGSITTLQILRLDNNKFTGAVPTNISNLVDLNVLNFAGNQLRGTMPDLSTLTKLNVVDLSNNSFDPSAIPTWMLTLKTLASVETISRYKILTCRAIASGGLYDSILSNNAFNGTLNMTGNITQQLQRVILLNNRIVAAKITQSYNGILVDQSLDPANCGCAYPYMGRVFFRSPLFADLRNNEHFQLLEASLSTELGLQPGSVFLSDIHFTSDDYLQVQVRLFPSTGTSFNLSEITRIGFDLSNQTYKPPQGFGPYYFVADPYVHFAGADDGGKSQVSTGAVAGIAVACGLILIAVTSGAIFALLQKRRSRELSGQTNPFASWGIAKKDSGGAPQLKGARFFSFDELKNCTNNFAENNEIGSGGYGKVYKAILVGGTNVAIKRAEYGSKQGAVEFKNEIELLSRVHHKNLVSLIGFCYEQGEQMLVYEYVSNGTLRHNLQARGIYLDWKKRLRIALGSARGLAYLHELADPPIIHRDVKSTNILLDGNFKPKVADFGLSKLVADTEKGHISTQVKGTLGYLDPEYYMTQQLSEKSDVYSFGVVMLEILSGRLPISKGRYIVREFRMAINPNDHNYYGLQGIVDPAIHDAAHTAGFRRFVQLAMECVDESASRRPTMNSVVKEIEAMLHSEGLSSGSSSTVEFEHVGTASTSHLYSGQVATARSNSSSSTAEEPPRPELKHSEP

SEQ ID NO: 58285 - protein, 97 aa, Zea mays
  Coding DNA Sequence Number=SeqID_16506
  Subcellular localization annotation: CTP_CleavageSite=21; ConfidenceScore=5.69e-01
MANTVASASVGTSSAITHSPPSATSWSSPAVVRRQCVFDGMYPNLAGALLLAYEEMRFWSLARAQGLSPSLPWSRLPSHMFEVFEGKNIDNDVKHGV

SEQ ID NO: 58286 - protein, 118 aa, Zea mays
  Coding DNA Sequence Number=SeqID_16507
MVILGEVYAMRCYSFTNTNGSGRPGFGCTCSTGSFVGKLAVQINFLCMMFQKMQIKDGFHTEGLVSACSAKGRRSYGLEYSGLNKKDLAFSRADWIWHHEFMTRIDVYVKCYLNSVDP

SEQ ID NO: 58287 - protein, 919 aa, Zea mays
  Coding DNA Sequence Number=SeqID_16508
  Gene Ontology: Mol. function=protein serine/threonine kinase activity; Cellular component=integral to membrane; Biological process=protein amino acid phosphorylation
  Homolog annotation: Hit_ID=Q5N8C4; Match level="QueryCoverage=92%, HitCoverage=91%, E-value=0.0, Identity=69%"; Hit description =Putative receptor-like protein kinase 2
  Pfam annotation: Domain name=LRR_1; Domain location=116-138; Score =10.3; E_value=3.4; Accession=PF00560.23; Description=Leucine Rich Repeat
  Pfam annotation: Domain name=LRR_1; Domain location=140-161; Score =10.2; E_value=3.5; Accession=PF00560.23; Description=Leucine Rich Repeat
  Pfam annotation: Domain name=LRR_1; Domain location=166-189; Score =3.1; E_value=76; Accession=PF00560.23; Description=Leucine Rich Repeat
  Pfam annotation: Domain name=LRR_1; Domain location=191-213; Score =10.1; E_value=3.6; Accession=PF00560.23; Description=Leucine Rich Repeat
  Pfam annotation: Domain name=LRR_1; Domain location=215-236; Score =7.7; E_value=10; Accession=PF00560.23; Description=Leucine Rich Repeat
  Pfam annotation: Domain name=LRR_1; Domain location=251-272; Score =8.7; E_value=6.6; Accession=PF00560.23; Description=Leucine Rich Repeat
  Pfam annotation: Domain name=LRR_1; Domain location=274-297; Score =0.7; E_value=2.1e+02; Accession=PF00560.23; Description=Leucine Rich Repeat
  Pfam annotation: Domain name=LRR_1; Domain location=298-319; Score =3.4; E_value=65; Accession=PF00560.23; Description=Leucine Rich Repeat
  Pfam annotation: Domain name=LRR_1; Domain location=322-344; Score =2.0; E_value=1.2e+02; Accession=PF00560.23; Description=Leucine Rich Repeat
  Pfam annotation: Domain name=LRR_1; Domain location=92-114; Score =9.6; E_value=4.6; Accession=PF00560.23; Description=Leucine Rich Repeat
  Pfam annotation: Domain name=Pkinase; Domain location=589-859; Score =136.0; E_value=1e-37; Accession=PF00069.15; Description=Protein kinase domain
  Pfam annotation: Domain name=Pkinase_Tyr; Domain location=589-859; Score=142.6; E_value=1.1e-39; Accession=PF07714.7; Description =Protein tyrosine kinase
  Pfam module annotation: Pfam domain module=LRR_1::LRR_1::LRR_1::LRR _1::LRR_1::LRR_1::LRR_1::LRR_1::LRR_1::LRR_1::Pkinase::Pkinase_Ty ; Domain
  Pfam module annotation: Domain location=298-319::322-344::92-114::589- 859::589-859
MVLEGGSVFSSVGQHVAASDPLRPEVRVARHEDQKPFPGVQPPGIGAESPRLQDTWQTRTPPLGFQSADYRDLSNNQNLGGPLTPNIGNLKQLTVLILLGCTFTGNIPKEIGNLSQLTFLALNSNKFTGGIPPTLGLLSNLFWLDMSANQLSGQIPVSPGLDQLVNTRHFHFSENQLTGPMSESLFSDKMNLIHVIFNNNNFTGPIPASLGQVKSLQIIRLDHNIVTIVASRLDHNQFSGPVPNSITTLSNLMEVSIANNLLNGTVPDLTNLTQLDYVFMDHGELNGTIPSAMFSLPNLQQVSLARNSFSGKLNMTGNISSQLQVVNLTSNQIIEANVTGYSNTLILTENPVCLDNTSLCKLKQKQQASYATNLGPCAAIPCPFDQSASPVTSQNCACTSPIQGLMIFQAPAFSDVISPTMFQIVESTLMQNLSLAPRSVAISNVQFSQGNPLTFIVSIFPASGTSFNRSEVIRIISPLVNQTYKAPPNFGPYSFIANTYFTVPSNKKPSMGKAAIIGISIGGVVLILGLVAVATYALRQKRIAKEAVERTTNPFASWGAGGTDNGDAPQLKGARYFPFEELKKCTNNFSETQEIGSGGYGKVYKGRLANGQIAAIKRAQQGSMQGAAEFKNEIELLSRVHHKNLVSLVGFCYEQGEQMLVYEYIPYGTLRENLMGKRGVNLDWKNRLRIAIGSAKGLAYLHELADPPIIHRDIKSTNILLDESLNAKVADFGLSKLVSDTQKGHVSTQVKGTLGYLDPEYYMTQQLSEKSDVYSFGVVLLELVTASQPIEKGRYIVREIRTAIDQYDQEYYGLKGLIDPKIRDSAKLIGFRRFIQLAMECVEESAVDRPTMNDVVKELEIIIQNEGAQLLNSASLSVEQFGNEKRRDPYAEHLPMNDESSSSTFDYNSGYSYSAVQPK

SEQ ID NO: 58288 - protein, 96 aa, Zea mays
  Coding DNA Sequence Number=SeqID_16509
  Subcellular localization annotation: CTP_CleavageSite=23; ConfidenceScore=5.18e-01
MQGVFAAVAQQPGCAPGMQFLCSRRLVGSGARLCTCKLSLSAWLHRNELKEKETPVILQPPESVGWGPPSYGSAGTAASLLGQQRIDRYIKFVINF

SEQ ID NO: 58289 - protein, 69 aa, Zea mays
  Coding DNA Sequence Number=SeqID_16510
MAVMVTTKVDMEDMEMEAGITTGIEEVAVAEDEATGDMVVNSGKLMRLRGPLRHLPLCLACQLEMVWLI

SEQ ID NO: 58290 - protein, 121 aa, Zea mays
  Coding DNA Sequence Number=SeqID_16511
  Gene Ontology: Mol. function=hydrolase activity, acting on glycosyl bonds; Biological process=carbohydrate metabolic process
  Homolog annotation: Hit_ID=Q9FFX7; Match level="QueryCoverage=92%, HitCoverage=9%, E-value=4e-22, Identity=58%"; Hit description=Alpha -mannosidase
MEVFSFGLLIYMRFALLPLLSLVPGEAGEDKDLSSLASIDLKRVFPEKKIGKVIETSLSANQERAAMEKKRLKWKAQGSAADEKVVRGGPVDPSKLVVELGPMEIRTFIVSFDHISDKQQL

SEQ ID NO: 58291 - protein, 108 aa, Zea mays
  Coding DNA Sequence Number=SeqID_16512
MAAGRWMVAENSYQLPMDHRRGDYPVVIARVEWGSRRTPYVEGALGVRPLFVGCDIKSMKQKEDVHGSSQDGLGLTWTKGHILNSLGAEGEGESYPRMWSCGVQVKDL

SEQ ID NO: 58292 - protein, 77 aa, Zea mays
  Coding DNA Sequence Number=SeqID_16513
MGVDGDGALAAADDEQKADVEHRGARELGARDEHGVAENRIHGLGVRFYREEKKGGVPGGEKWPVVPLMPSMASVVT

SEQ ID NO: 58293 - protein, 492 aa, Zea mays
  Coding DNA Sequence Number=SeqID_16514
  Gene Ontology: Mol. function=transcription regulator activity; Cellular component=nucleus; Biological process=regulation of transcription
  Homolog annotation: Hit_ID=Q2R3F6; Match level="QueryCoverage=93%, HitCoverage=89%, E-value=1e-116, Identity=52%"; Hit description =Helix-loop-helix DNA-binding domain containing protein, expressed
  Pfam annotation: Domain name=HLH; Domain location=295-342; Score =36.8; E_value=7.6e-08; Accession=PF00010.16; Description=Helix-loop -helix DNA-binding domain
MELLTVPAQGHEEQNLLALASAAAVAGAGCVFSSPAMLDDDWYFDPVAAAAATGAQGHLLLAPPGPVPGPGAGSQMFSLFNVGGAATFDVHGFDIGLGTLGGGSGGDLVPLAGAGNTSNSASFSMSLNAGLLASSFGGFGTAPAQMPDFGGLGGFDMFNNGAGSSSAAPPPASASLTVPFSGRGKPAVLRPLETFPPVGAQPTLFQKRALRRNGGGEDYDKKRKAEATAAAAGASSACGGDDAEDDDGGSIDASGLNYDSEDACRGVEDSGKKDGKGSNANSAGDGKGKRKRLPAKNLMAERRRRKKLNDRLYMLRSVVPKISKMDRASILGDAIEYLKELLRKIEELQNEVESSASPASTASLPPTPTSFRPLTPTLPALPSRVKEELCPSALPSPTSKQPRVEVRTTREGREVNIHMLCARRPGLLLATMRAIEGLGLDVQQAVASCFNGFSLDIFKAELCKDGPALLLLPEEEIKSVLLQSAGLHGVAP

SEQ ID NO: 58294 - protein, 316 aa, Zea mays
  Coding DNA Sequence Number=SeqID_16515
  Gene Ontology: Mol. function=hydrolase activity, acting on glycosyl bonds; Cellular component=lysosome; Biological process=carbohydrate metabolic process
  Homolog annotation: Hit_ID=Q9FFX7; Match level="QueryCoverage=80%, HitCoverage=24%, E-value=1e-116, Identity=78%"; Hit description =Alpha-mannosidase
  Pfam annotation: Domain name=Glyco_hydro_38; Domain location=38-316; Score=315.5; E_value=9.5e-92; Accession=PF01074.12; Description =Glycosyl hydrolases family 38
MGPVRLALLLSVAAVLAAAGAVYIPYNTSAGVVPGKLNVHVVPHTHDDVGWLKTVDQYYVGSNNSIQGACVQNVLDSLIPALLKDENRKFIYVEQAFFQRWWRNQNDMIKDTVKGLISSGRLELINGGMCMHDEAAVHYIDMIDQTTLGHKYIKEEFGQIPRIGWQIDPFGHSAVQAYLLGAEVGFDAFYFFRIDYQDRDTRKGTKELEVVWRGSKTLGSSADIFAGIFPKNYEPPPGDFYFEVDDNSPVVQDDPLLFDYNVEERVNDFVAAAVAQGFRGFFDLHENVFFLSKIPRGYLIFFSRTRRRSAYHSINR

SEQ ID NO: 58295 - protein, 219 aa, Zea mays
  Coding DNA Sequence Number=SeqID_16516
  Homolog annotation: Hit_ID=Q94KM3; Match level="QueryCoverage=68%, HitCoverage=74%, E-value=1e-45, Identity=59%"; Hit description=MURB -like protein hMURB17
  Pfam annotation: Domain name=Zea_mays_MuDR; Domain location=1-219; Score=331.7; E_value=1.3e-96; Accession=PF05928.2; Description=Zea mays MURB-like protein (MuDR)
MDRVPPVEAVADAYNAARAAAVAAVEAHSAAIIAEEAIAAVKYAAIAREKFEGAVDSVKNSTFVYANATVEALDNVDLKYHVSIKNSLRYAIQEMRRQSTLLHTINSICSSIPEVEGGKIGKVVGHLDHVCKMLEKTSIVCEQDLDNKCPSWDLFDPPSDVEDHPDVDELLEGYNSEDPELWEMAFEDRKWEENKVAVSLAEHCRIMGYNYEEIYDRTV

SEQ ID NO: 58296 - protein, 355 aa, Zea mays
  Coding DNA Sequence Number=SeqID_16517
MSEDWVLECHIRNMHAPPSPLVENYLREVGFWHVATGTQSPGLPNLAIERRCATSFWALFWKKWMEARFRFPFLRPRVSHPYTFPLVTRWNHPASFRGLPSELEDIRLLLDQRSEAEFQWTPYEDPDPWQAVFTYARGEATAITSRKGKARASKSNRRRFRRQALNEAQTVTRRIISGHAIIGPNESTDAAIQQMIPTQPPFPMMPDMFPSPYMYPNPYMYPFLNTMASWSQMSGSAPFPVMPSGPSISRPAAQEGSTMPSESYPFYQSPATYGFQTPSSFMMQTPPHTPFFEGGSSSQVRQPDAEPEEPQPPPEEGPQSPPEEEQPLPEARGRRNPARNRRRPPCGTESPGHRH

SEQ ID NO: 58297 - protein, 553 aa, Zea mays
  Coding DNA Sequence Number=SeqID_16518
  Gene Ontology: Mol. function=protein serine/threonine kinase activity; Cellular component=membrane; Biological process=protein amino acid phosphorylation
  Homolog annotation: Hit_ID=Q8GT75; Match level="QueryCoverage=33%, HitCoverage=77%, E-value=3e-69, Identity=72%"; Hit description=RING -H2 finger protein ATL4M
  Pfam annotation: Domain name=Pkinase; Domain location=239-451; Score=- 8.3; E_value=4.5e-08; Accession=PF00069.15; Description=Protein kinase domain
  Pfam annotation: Domain name=Pkinase_Tyr; Domain location=239-451; Score=-40.4; E_value=5.5e-10; Accession=PF07714.7; Description =Protein tyrosine kinase
  Pfam annotation: Domain name=Rick_17kDa_Anti; Domain location=50-89; Score=8.7; E_value=0.024; Accession=PF05433.5; Description =Rickettsia 17 kDa surface antigen
  Pfam module annotation: Pfam domain module=Pkinase::Pkinase_Tyr::Rick_ 17kDa_Anti; Domain location=239-451::239-451::50-89
MEFHEYQSRFSRPPPSFFGDFLEKLKDFCNFAFSAIIGNIFYAILTFFFALVGTLLGAMTGALIGQETESGFVRGAAVGAISGAVLSIEVFESSLVLWQSDESGIGCLLYLIDVIASLLSGRLVRERIGPAMLSAVQSQMGASETAFEEVQNIFDTGGVKGLAGDLVEKIPKIIITKNNNVDASGEKVSCTVCLQDFQLGETMLVKSQTQPKLQGSLKAEESRLRRFQLEEVAKATKNFSAECLLGSGAFGNVYKGTFELHEVRLLSTVNHPNLVGLVGYCEESGIAYLHDGIKPSIIHRDIKPSNILIGDGMEAKVSDFGLVKLGPVGDQSHVSSQIKGTPGYLDPAYCTTFHLTPFSDVYSFGVILLQLVSARPAVDSTTRCQPNYHIIDWARPSIEKSSIEEILDISLLSPAQTCNMEMMLKMGELGLSCVEKMPKNRPTMARVWQELEDTLHLVDNSTHKQPWRSSVRATSKLAPPTERVHHRTLDKDFSQSFVSIDGVGFQKFRIEMDIVSLQSSSSLRCFEFNTNDGVEVDKKNLTPVTEETSNQCF

SEQ ID NO: 58298 - protein, 372 aa, Zea mays
  Coding DNA Sequence Number=SeqID_16519
  Gene Ontology: Mol. function=protein phosphatase type 2C activity; Cellular component=protein serine/threonine phosphatase complex; Biological process=protein amino acid dephosphorylation
  Homolog annotation: Hit_ID=Q9ZSQ7; Match level="QueryCoverage=99%, HitCoverage=97%, E-value=1e-176, Identity=83%"; Hit description =Protein phosphatase 2C homolog
  Pfam annotation: Domain name=PP2C; Domain location=33-311; Score =95.2; E_value=2e-25; Accession=PF00481.12; Description=Protein phosphatase 2C
MRDVIKVGQLSEGLLVAILGPLCAQRFGCIRLARWAPMANNLLEDQSQIESGSLSTLESGPYGTFVGIYDGHGGPETSRYINDHLFQHLKRFTTEQQSMSVDVIKKAYQATEDGFFSLVTKQWPMNPQIAAVGSCCLVGVVCNGTLYIANVGDSRAVLGRLVKATGEVLAIQLSSEHNVAIESVRQEMHSLHPDDSHIVVLKHNVWRVKGLIQISRSIGDVYLKKAEFNREPLYQKFRLRQPFRMPILSSEPSVSMHELQPHDQFLIFASDGLWEHLSNQGAVDIVQNHPRNGSARRLVKVALQEAAKKREMRYSDLKKIDRGVRRHFHDDITVIVVFLDSNLVSRASSAKGPSLSLRGGGIKLPAKTKAPC

SEQ ID NO: 58299 - protein, 57 aa, Zea mays
  Coding DNA Sequence Number=SeqID_16520
MSQNPSPSLSGVARHEQKMTGGASGMVDVTVGGADGTSGGVREPKACNWVEGLVVFG

SEQ ID NO: 58300 - protein, 528 aa, Zea mays
  Coding DNA Sequence Number=SeqID_16521
  Gene Ontology: Mol. function=RNA binding; Cellular component =ribonucleoprotein complex; Biological process=RNA processing
  Homolog annotation: Hit_ID=Q1T402; Match level="QueryCoverage=85%, HitCoverage=90%, E-value=6e-78, Identity=39%"; Hit description=RNA -binding protein Lupus La
  Pfam annotation: Domain name=La; Domain location=374-431; Score =102.9; E_value=9.7e-28; Accession=PF05383.7; Description=La domain
MSENDTKGKGITISIPWNRDTSNNIEDWRPPFSAVNHSPSCPDQSHPATRPISASWSQIVLGESEPLAGVPLSPSSSSSSSTAVIEPPVPTAVEGEGVDNVSAGPNSNAGKRLAWNKPSDGATEFAPVIEADAWPALSKSARVSLKPSSDSSRALPDGSPFVPFSQKEAKKVEKLNLNSTPNHAMPARQRSMKRNSNNSASSSGLLQPPPQGALVEAPVNGPSSRDHIQRSGFVSQAGNDHPRNSFRHRNAGPRPRGDGSHHQNYGGRRNPSLGNQDWNGRNFNSRDAHMQPRVVPRLMRHQPPAPPPNAAPFIAPPPVRPFGTPVGYPELASQFYFIPAPPPESLRGVPFVAPMPPVLFPAPEPPDRQLHANIVNQIDYYFSDENLIKDTYLRQNMDDQGWVPIKLIAGFRKVSLLTDNIQLIRDALRSSTVVEVEGEKVRKRIDWMKWILPPSVKFPAMSGQDMLVARVQDISLDQRTADVSGSRNQEDACAGLSDRSSSGEFNNRSQVFSSEGTAVSAQSVAASN

SEQ ID NO: 58301 - protein, 1059 aa, Zea mays
  Coding DNA Sequence Number=SeqID_16522
  Gene Ontology: Cellular component=membrane
  Homolog annotation: Hit_ID=Q10S28; Match level="QueryCoverage=72%, HitCoverage=96%, E-value=0.0, Identity=60%"; Hit description =Expressed protein
  Pfam annotation: Domain name=Asp; Domain location=811-1053; Score= -194.8; E_value=0.042; Accession=PF00026.14; Description=Eukaryotic aspartyl protease
  Pfam annotation: Domain name=DUF221; Domain location=315-835; Score= -71.4; E_value=6.1e-06; Accession=PF02714.6; Description=Domain of unknown function DUF221
  Pfam module annotation: Pfam domain module=Asp::DUF221; Domain location=811-1053::315-835
MSETLPPPPSPSSDEDFANDGAWYGNIQYLLNISTIGLLCCVLIFVFLKLRSDHRLIPGPSALFAKLLAVWHATGREIARHCGADAAQFLLIEGGSFAILLSVAFVAVSVLLPVNLYGGTALLDDQFSKTTVSHISKGSGLLWVHFLFVVFVVAIFHYGMSAVEERLRITRFRDGNGNLSDPNSNSTAIFTIMVQGLPKNLGVDKGVVLEYFQYKYPGKVYRVVMPMDLCSLDDLATELVKVRDEITWLIAKIDSRLLPEESEDVNGNEGFLGWIRWLGRKIQRVFDQISGTFGFTDEEKLRKLQELRAELETELAAYKEGHAPGAGVAFVMFKDVYTANKAVQDFRNEKKRRFGKFFSVMELKLQRNQWKVERAPLATDIYWNHLGSTKLSLKLRRVFVNSCLLLMLLFFSSPLAVITAVQSAARIINAEAIDNAQSWLAWVQSSSWLASLVFQFLPNVIIFVSMYIVVPSALSYLSKFERHLTVSSEQRAALLKMVCFFLVNLILLRALVESSLESAILRMGRCYLDGEDCKRIEQYMSASFLSRSCLSSLAFLITSTFLGISYDLLAPVPWIKNKLQKFRKNDMLQLVPENTEEYPLENQNLNNLRRPLMPESLFDSPRMGDIDIPGQDLSVYPISSRTSPIPKQKFDFAQYYAFNLTIFALTLIYSSFAPLVVPVGAVYFGYRYVVDKYNFLFVYRVRGFPAGNDGRLMDTVLSIMRFCLDLFLISMLLFFSVKGDSTKLQAIFTLGLLVIYKLLPSDSDSFQPGLLEGMQNIDSIIDGPIDYERKADERTMQHLPVKSNLLDSGQGIPSHIGLEVPLNKCASQAQTSTSGVLLEDVLHLTTEDGHAELVEAYVTFGCGQVQSGSFLDVAAPNGLFGLGMEKIAVPSILSQEGLTANSFSMCFGHDGIGRISFGDKGSPDQEETPFNLNPPHPTYNITITQIRVGTAIIVGDITALFDSGTSFTYLVDPTYSKLAENAQDRRRPPDSRIPFEYCYDMSPDANATLIPSMSLKMKGGSDFPVYDPIIVISTQVGSFSWTSFISYIGSEDHVKHIDL

SEQ ID NO: 58302 - protein, 113 aa, Zea mays
  Coding DNA Sequence Number=SeqID_16523
  Homolog annotation: Hit_ID=Q1SCB3; Match level="QueryCoverage=46%, HitCoverage=21%, E-value=3e-14, Identity=80%"; Hit description=40S ribosomal S4 protein
  Pfam annotation: Domain name=RS4NT; Domain location=16-61; Score =15.8; E_value=0.026; Accession=PF08071.2; Description=RS4NT (NUC023) domain
MDEIWVPCLRLNGRARGLKKYLKRLSALRHWMLDKLGDAKAIVWTPQVEGMFATYSHSTKQTEFLYYYISDRIGANSLENSLWKKVCGMQTSLENLLCFRTWIQLTLQQKWRI

SEQ ID NO: 58303 - protein, 189 aa, Zea mays
  Coding DNA Sequence Number=SeqID_16524
  Gene Ontology: Mol. function=transporter activity; Cellular component= integral to membrane; Biological process=transport
  Homolog annotation: Hit_ID=Q8W506; Match level="QueryCoverage=70%, HitCoverage=60%, E-value=2e-54, Identity=65%"; Hit description =Aquaporin
  Pfam annotation: Domain name=MIP; Domain location=1-133; Score=62.2; E_value=1.7e-15; Accession=PF00230.10; Description=Major intrinsic protein
GVGPLGIAWAVGGMIFVLVYCTAGISGLAKSVMKHYYNTLGGGTNVVVAGNSKGAALGAEIIGTFVLVYTVFSATDPKRNARDSHVPVLAPLPIGFAVFVVHLATIPITGTGINPARSLGAAVIYNNGQVWDDQSESAHNCKKEQNIQIIRATTRENQVIFLRNNSAYHVDQGALLQGTLELVLEELRL

SEQ ID NO: 58304 - protein, 195 aa, Zea mays
  Coding DNA Sequence Number=SeqID_16525
MELVDGEDMGTMVTFYCRIGSVNIESIQFAKLANVELVEDFTQLSEEYGVQDPCTKVLIASVNRRSSVRWFDIDLNAPPASENLNLGPHLQIYLVLIETDTDGEDEYDNNGCFDHEVEDYSDPDLDDVLNDIDDECANDDGNVYASLVGNPSRDIVIRNDPGNHMSNVNLDMAHASEFPKYLDILPAHLLATALK

SEQ ID NO: 58305 - protein, 90 aa, Zea mays
  Coding DNA Sequence Number=SeqID_16526
MALTCGPNTPVAFFESDSALGCCDPSSEIAGSRPTDLARRKRIPRGKSSEAPKVLATYGRKEELWEGYRREGVQEKEKKVDEDGISIEFR

SEQ ID NO: 58306 - protein, 186 aa, Zea mays
  Coding DNA Sequence Number=SeqID_16527
EHGKTKEKDLTAITDAGFRGHGEARSNDRDSNHSPQPGDSAERTPATLQQAGESSESEAGVPRDSGSGLVPGCGWDAGDLVPRDSLWHAEIICSFEKTHNHGIRWKGFSPEGTLDEVDLSVPSEERPRALHQEVNYMLAHSHHRHYESDECIRTHGHSLRPRDHQTSVLSNRPSSGKSQRGIPFLD

SEQ ID NO: 58307 - protein, 72 aa, Zea mays
  Coding DNA Sequence Number=SeqID_16528
MCMVRRGGEFGSGRRGGDKERGRGAEDGGRRTMRTRGGRRGIREADRMGKGGDGMTEAPRMRSTARHGDGWR

SEQ ID NO: 58308 - protein, 383 aa, Zea mays
  Coding DNA Sequence Number=SeqID_16529
  Gene Ontology: Mol. function=kinase activity; Cellular component =cytosol; Biological process=carbohydrate metabolic process
  Homolog annotation: Hit_ID=Q8GRU7; Match level="QueryCoverage=100%, HitCoverage=75%, E-value=0.0, Identity=77%"; Hit description =Putative xylulose kinase
  Pfam annotation: Domain name=FGGY_N; Domain location=12-250; Score= -47.3; E_value=5.2e-07; Accession=PF00370.11; Description=FGGY family of carbohydrate kinases, N-te
MAGRDSLPEGSLFLGLDSSTQSLKATVLNNELTIVASEIVNFDSELPHYKTEGGVYRDPADDRHIFSPTIMWVEALDVLLEKLKPKINFGKVVAVSGSGQQHGSVYWKKGSHAVLSSLDASKSLLSQLKDAFSTMNSPLWMDSSTTKQCREIENAVGGALELAKLTGSRAYERFTGPQIRKIYQTEPDVYEDTERISLATAPGLEAKLGNLAPAYSAAGRIAPYFVERFQFDKNCLVIQWSGDNPNSLAGLTLNTPGDLAISLGTSDTVFGITTEAKPSLEGHVFPNPVEPNGYMVMLCYKNGSLTREDVRNRCADKSWDVFNSYLEKTPPLNGGKIGFYYKDHEILPPLPVGFHRYTVENLNDVSSDALLEREVEELDPPSE

SEQ ID NO: 58309 - protein, 336 aa, Zea mays
  Coding DNA Sequence Number=SeqID_16530
  Gene Ontology: Mol. function=oxidoreductase activity; Cellular component=membrane; Biological process=response to oxidative stress
  Homolog annotation: Hit_ID=Q8GVG0; Match level="QueryCoverage=81%, HitCoverage=92%, E-value=1e-102, Identity=62%"; Hit description =Putative peroxidase
  Pfam annotation: Domain name=peroxidase; Domain location=76-300; Score=321.5; E_value=1.4e-93; Accession=PF00141.13; Description =Peroxidase
  Subcellular localization annotation: CTP_CleavageSite=90; ConfidenceScore=5.20e-01
MARLGVLVLVALLAADTTAQLAQAQGSSSSYGSAPPPPPPTSPPSASPPAQTPPPAPTPPTPKLRYNFYKRSCPYAEDIIKQAGCDGSVLLDATPANPRPEKLGPPNFPSLRGYEVVDAAKAALEKACPGVVSCADVVQFAARDAVFFLSGSKVLYSLPGGRFDGRVSFENETLRFLPPPSFNLSQLVQSFKVKGMSVDDLVVLSGSHTIGRSHCSSFSDRISTPPSDMNPALATVLKRQCPANPNFTNDPTVVQDIVTPDKLDNQYYWNVLRHNVLFKSDAALLTSTETARMVLENAGIRGRFERKFASAMLKMSLIEVKTAATGEIRKNCHVVN

SEQ ID NO: 58310 - protein, 82 aa, Zea mays
  Coding DNA Sequence Number=SeqID_16531
  Homolog annotation: Hit_ID=Q654A2; Match level="QueryCoverage=44%, HitCoverage=7%, E-value=9e-09, Identity=78%"; Hit description =Pseudouridylate synthase-like
MEEPQSFDVAKVDEILQPLAGKTLSYKMFARDTQASRSVLQQPHHRQQLSEPIGFATYLPFCLPLPNHFDPKICIRCSGYRG

SEQ ID NO: 58311 - protein, 359 aa, Zea mays
  Coding DNA Sequence Number=SeqID_16532
  Gene Ontology: Mol. function=integrase activity; Biological process =DNA integration
  Homolog annotation: Hit_ID=Q1SL72; Match level="QueryCoverage=69%, HitCoverage=21%, E-value=1e-45, Identity=43%"; Hit description =Ubiquitin
MRSHTLSFQAGLVEPFSGTICLYNRDRREKLSEDFYFHILPIDMQDGSLDRRGVFSLDTHSPSVCLLIQLEKAATEEGGVTPSVYSHKEPCCAAYIDCVFSYYSCTHAFMTELPRDNEHKIVNINKVGHMLTQLTMADTSDVPIEDPLSILNSRTDDNHALELRDKELLVSELQNTLDQKSKQLGETEIKLSAMMDEVNSLKKELEQTRGLLDESQMNCAHLENCLHEAIEEARTNKCSADRRAVEYDALRSSALRIHGLFERLNNCITAPGVTGFAESLHSLAASLASSVKKDEADTTVQFQQCIKILADKVYLLTRQSAELLERYLAMQAVHGGITKELDEKKELIKNLYNKLQQEK

SEQ ID NO: 58312 - protein, 85 aa, Zea mays
  Coding DNA Sequence Number=SeqID_16533
MGDSDFCARCARNKCIAAGEFLRPLFLGAPDTVQCTPDSPVNYSASASEIPEGGEFELESSANKDHDVYELRYFNIAENEGEEED

SEQ ID NO: 58313 - protein, 77 aa, Zea mays
  Coding DNA Sequence Number=SeqID_16534
MGIGAPLLCPFGLWFGALKLDVPDGTVGVPANIRPRCGWWKCADGIPQASYSSACNLLRDLAGANGNPRCPGCAFGA

SEQ ID NO: 58314 - protein, 292 aa, Zea mays
  Coding DNA Sequence Number=SeqID_16535
  Gene Ontology: Mol. function=transcription factor activity; Cellular component=nucleus; Biological process=regulation of transcription, DNA-dependent
  Homolog annotation: Hit_ID=Q10EQ4; Match level="QueryCoverage=82%, HitCoverage=90%, E-value=2e-64, Identity=56%"; Hit description=CCAAT- binding transcription factor subunit B family protein, expressed
  Pfam annotation: Domain name=CBFB_NFYA; Domain location=211-267; Score=135.2; E_value=1.8e-37; Accession=PF02045.6; Description=CCAAT- binding transcription factor (CBF-BNF-YA) subunit B
  Subcellular localization annotation: CTP_CleavageSite=38; ConfidenceScore=5.17e-01
MEHRTPPKGKKSATATPNAKWRNDGHGLSGAASKAASMSSMESRPGRTNLVEPIGHGAALPSGGQAVQPWWTSSGAVLGAVSPAVVAVAPGSGTGISLSSSPAGGSGGGGAAKGAASDESSEDSRRSGEPKDGSASQEKNHATSQIPALAPEYLAPYSQLELNQSIASAAYQYPDPYYAGMVAPYGSHAVAHFQLPGLTQSRMPLPLEVSEEPVYVNAKQYHGILRRRQSRAKAELEKKVVKARKPYLHESRHQHAMRRARGNGGRFLNTKKSDSGAPNGKAEPEKASTIVA

SEQ ID NO: 58315 - protein, 286 aa, Zea mays
  Coding DNA Sequence Number=SeqID_16536
  Gene Ontology: Mol. function=signal transducer activity; Biological process=response to light stimulus
  Homolog annotation: Hit_ID=Q5VRW4; Match level="QueryCoverage=73%, HitCoverage=72%, E-value=1e-37, Identity=56%"; Hit description=Non -phototropic hypocotyl 3-like
  Pfam annotation: Domain name=NPH3; Domain location=39-285; Score= -26.8; E_value=9.1e-09; Accession=PF03000.5; Description=NPH3 family
MGVIVKENSEKNRLLVKRILPPLPHPARQPNLCSRTPAKPPLPERPHASNPRSHTPVRVDDLAPATASRTPRRPPLPKRRISREIRPGRGASHIVVRVGALPAAGEPHGHVAEEAAPPKSLVVALPPDPPAGGSGCCAAAVADDGITCDFLLKLLRAGSMVGADTAPLRDLEARAARRLDQATLGAVVIPAFGHGGEHAPALLWTCPSCCASCAGSSRRGGGGSKAARVARLVDVYLAETALEAGLRPAEFEELARAVPAHARPADDALYRAVDTYLKVRPRSALS

SEQ ID NO: 58316 - protein, 254 aa, Zea mays
  Coding DNA Sequence Number=SeqID_16537
MGRARRVERSDLANLVGAGREPGGWRSWTEEDGGRGIGWTQQQEGELVGPKQGDVDHGGLGIGDAQHGRSQGWRLRKRDAGEGISRLAKGTIGSSARPRARTRAQPRKTANSAPPDPGLGLGLSPGRRRTPLRPTQGSDSGSAPEDGELRSARPRARTRAQPRKTANFAPPDPGLGLGLRPRKTANSASPDPGARTRAKTWKTTNSASPDPRARTPPWPLPTTSASPDPGARTRPRPWKTDSTSASEEPPRRPT

SEQ ID NO: 58317 - protein, 233 aa, Zea mays
  Coding DNA Sequence Number=SeqID_16538
MASPPALGARHGPSLEWKLPQHHKIDGLMIGFSIDDLTSIKGFSILSGTIIRGTLKTPNSQLGARPCQRHHRKLRPTQGSDSGSAPEDGELRSARPRARTRAQPRKTANSAPPDLGLGLGLSPGRRRTPLRPTQGSDSGSAPEDGELRSARPRARTRAKTRKTANSASPDLGARTRAKTWKTTNSASPDPRARTPPWPLPTTSASPDPGARTRPRPWKTDSTSASEEPPRRPT

SEQ ID NO: 58318 - protein, 250 aa, Zea mays
  Coding DNA Sequence Number=SeqID_16539
  Gene Ontology: Mol. function=protein binding; Cellular component =signalosome complex; Biological process=red or far red light signaling pathway
  Homolog annotation: Hit_ID=Q676Z8; Match level="QueryCoverage=78%, HitCoverage=96%, E-value=3e-55, Identity=53%"; Hit description =Multisubunit regulator protein COP9
MDLSAVQAALSDKSYTAVASLCDELLLQVPFLPLSQSHPTSAQGLALRLTRLISQAASKGTNTDEWPYSVHLLAHLYINDLYAIRRPCPRFFPILLMPWCCCDLGVSRNSARFFWKSLPQEVKDTRPELAAVWRIGQCLWNRDYAGVNTAAQGFEWGPDLTEFITAFLESYRQRIFKLLTSAYSTISVADVAHFMGMSEEDATNYAVQIGWSLGAATKMLTVKKPKAQINQKLDASKLQRLTECVFHLEH

SEQ ID NO: 58319 - protein, 137 aa, Zea mays
  Coding DNA Sequence Number=SeqID_16540
MSSLVDLYLNLVINELNSIGMNKLGDADIMRKIISLLPQQRYVSIITILHNLEDLSQMTPTIVIGKIAAFEMSQKIGQQEQPTSSKPYAFASDEHKKMKGKKKAPSSSEEEEEEEDYDDDEEDDQPSTSSSEDKEIV

SEQ ID NO: 58320 - protein, 86 aa, Zea mays
  Coding DNA Sequence Number=SeqID_16541
  Subcellular localization annotation: CTP_CleavageSite=24; ConfidenceScore=5.29e-01
MAIVAFTVGWSSSMGGSLSTGGVRSSSMGGALERLIVSHPFSLMDMLIFKAVEEQVKKRVENKAMIFEQNATDSQRQDKPIALYEF

SEQ ID NO: 58321 - protein, 53 aa, Zea mays
  Coding DNA Sequence Number=SeqID_16542
  Subcellular localization annotation: CTP_CleavageSite=16; ConfidenceScore=5.10e-01
MVAALLLCFLFLAVAVASAKVRPCSTSVAPSACRSPGRAPDGAAVKPWLAQRI

SEQ ID NO: 58322 - protein, 463 aa, Zea mays
  Coding DNA Sequence Number=SeqID_16543
  Gene Ontology: Mol. function=carbon-sulfur lyase activity; Cellular component=vacuole
  Homolog annotation: Hit_ID=Q942G1; Match level="QueryCoverage=93%, HitCoverage=94%, E-value=1e-159, Identity=63%"; Hit description =Alliin lyase-like
  Pfam annotation: Domain name=Alliinase_C; Domain location=94-449; Score=733.9; E_value=1.1e-217; Accession=PF04864.4; Description =Allinase, C-terminal domain
  Pfam annotation: Domain name=Aminotran_1_2; Domain location=95-445; Score=-85.7; E_value=0.0044; Accession=PF00155.11; Description =Aminotransferase class I and II
  Pfam annotation: Domain name=EGF_alliinase; Domain location=57-104; Score=55.5; E_value=1.8e-13; Accession=PF04863.4; Description =Alliinase EGF-like domain
  Pfam module annotation: Pfam domain module=Alliinase_C::Aminotran_1 _2::EGF_alliinase; Domain location=94-449::95-445::57-104
MEAAGGEQHETRRRAGAGLALLGVVYSSLLLNAIFVAHHFLSPSRLLLRDDGCGCGLTWSLQAAREAEAVAAVECSGHGQVFVDGVAGEDGRPGGNPLFLEPYWRRHAAASAVVFSGWHRMSYTTTGGFQSVELERQIRRLHGAVGNAVADDKHLVFASGSLQLINALVHALSPDATAASPPSRVVAAAPYYPAYRQQTSMFDGREYRWAGTTALWANSSRANSTDGTFIEFVTSPNNPDALLREPVLRGSAAAIVDHAYYWPHFTHIPAPADEDIMMFTVSKPSGHAGSRFGWALIRDDEVAKRALEYLRDSNMGASRDTQLRMLGIFKFMLANLRGKDDIFAFGHDVMRSRWLRLSAAVSRTRRITLQKIAPQYCTYFGRVREPSPAYAWVKCEMEEDEDCYEALLKANIITRSGVQYEASSRYTRISLLKSDDDFDVLMERLEDLVDADKYDDSNGSSSM

SEQ ID NO: 58323 - protein, 48 aa, Zea mays
  Coding DNA Sequence Number=SeqID_16544
MTRPPPNAPANLATSGLEKRGPGICHRSAVFTTGAPTIVAERQQSGNR

SEQ ID NO: 58324 - protein, 40 aa, Zea mays
  Coding DNA Sequence Number=SeqID_16545
MKGRQEDDETADKRGHTASGSERARERAADGWGRFASAGK

SEQ ID NO: 58325 - protein, 73 aa, Zea mays
  Coding DNA Sequence Number=SeqID_16546
MEAFQVAKVSRKGAWNVVAGGWVRARGAGASLGCPASAGEEAGGVVGASGCVDLLLGAGRAEEGAVVRALVAV

SEQ ID NO: 58326 - protein, 232 aa, Zea mays
  Coding DNA Sequence Number=SeqID_16547
  Subcellular localization annotation: CTP_CleavageSite=61; ConfidenceScore=5.38e-01
RHNLPPRGGRPRTAPGAELALTSPYPRCGARPRPCFPAAARGSSLPSRGSAARPPPCSLPRAALPPPAAVPGPGAARPPPCSLPRGGLAPGTVVRPPTQRSALARVPAPARGPGPGAVYPTPGAAFPAPCAPRPLRASRPPGVARVASTWPRAPPFTPNAVPACATPRARLHSDALLGHLGSGQWGVALSGQKGNHGLWVAMRLMVLGFDSGNGEDEAMEGDFQEFQDYDEF

SEQ ID NO: 58327 - protein, 147 aa, Zea mays
  Coding DNA Sequence Number=SeqID_16548
MPQEIGSPTVTRPSTITFQKPPRDHFERGQRLHHVTLVFSTSRLSRTGPSEGKCWDEGEHATLHSSISSSPCAGEGWIHRTCQDRPRALTGRWPVRPPSLTRDKTKARRSLWVLPLPDHHVRPMCDSTQVLDGLNVFDRDKRPLDYL

SEQ ID NO: 58328 - protein, 346 aa, Zea mays
  Coding DNA Sequence Number=SeqID_16549
  Gene Ontology: Mol. function=structural constituent of cell wall
  Homolog annotation: Hit_ID=Q8S9Z9; Match level="QueryCoverage=85%, HitCoverage=87%, E-value=1e-122, Identity=68%"; Hit description =Putative root cap protein 1
  Pfam annotation: Domain name=Root_cap; Domain location=275-331; Score= 137.3; E_value=4.2e-38; Accession=PF06830.2; Description=Root cap
MAAVRGAIATLLVVVVALALGTASALDFSVRKTKPQPPRMSTPGDPKKAPGNGKFTTVINKYHKKNYEITCTTDWGASCYVKCPARCPNKCLAYCAYCLTFCMCDLMPGTSCGDPRFTGADGNTFYFHGKKDESFCVVSDDRLHINARFMGNHNADSGRDFTWVQALGVTFGGAHSHRLYVGARRAAEWDEDEDHVVIALDGEPVDVEAAKDARWVSTAVPGLSVTRSHAVNAVVVELNGEFSISANAVPITDEDSRVHGYGKTGKDSLVHLDVSYKFHGLTKDVDGVLGQTYRPDYVNKLDISAKMPVMGGADKYRSSGLFATDCAVSRFHRVGGGADAGFSSFA

SEQ ID NO: 58329 - protein, 47 aa, Zea mays
  Coding DNA Sequence Number=SeqID_16550
MAEGIARWSYTAVTSDMRDIGRSTGRVSLTRSIENIEMVGMYKICLR

SEQ ID NO: 58330 - protein, 65 aa, Zea mays
  Coding DNA Sequence Number=SeqID_16551
MANEIIKKNEKETHDAREEAKRAEEAAERARRIEALDVMSAANTIVDKVIDRLLNEAAEKILKEG

SEQ ID NO: 58331 - protein, 168 aa, Zea mays
  Coding DNA Sequence Number=SeqID_16552
  Subcellular localization annotation: CTP_CleavageSite=50; ConfidenceScore=5.54e-01
MAPRPLAVAPRLPPATPPLPVRALGGGPAVSRCRAPRQPCPPLRSRRPPVAVAFPAVAHSPDVSRPAPWPRAPCGSRPLVVVPSPAAPRPPAVMPSPVALRPRRLAPPSGRAPPAAPPRPSPRPLVAPHASLAGPAPPQWPLRVPGGPRALGGPRVPPARAVLPRVRP

SEQ ID NO: 58332 - protein, 292 aa, Zea mays
  Coding DNA Sequence Number=SeqID_16553
  Gene Ontology: Mol. function=RNA-directed DNA polymerase activity; Cellular component=chromatin; Biological process=RNA-dependent DNA replication
  Homolog annotation: Hit_ID=UPI00004C1730; Match level="QueryCoverage =55%, HitCoverage=27%, E-value=5e-77, Identity=86%"; Hit description =UPI00004C1730 related cluster
MVLQYAQAFNDLCQYAGYHANSNEKKRDRFQRGLGTKLHECLNTVRANSYNELVNLTISQEGCILAHRAEKKRKAPMAGSSPQPKRFRIVSSNQSRGFQQEAGSASHSFISPKFSFLGLVEYYRRFIPDFSRIVKPMIELLKKGVKFEWGQKCEEDFHILRQHLTTAPVLAQPNNGKPFEVYCDASGTGLGCVLMQDNRVIAYASQALRPHEQNYPTHDLELAVVVHALKILRHYLMGTRCNIYTDHKSLKYIFTQADLNMRQRRWLELIKDYDLEVHYHPRKANVVADALS

SEQ ID NO: 58333 - protein, 35 aa, Zea mays
  Coding DNA Sequence Number=SeqID_16554
MKVAEGDEVSRGAAEPAFEYENQRADENRSPADNR

SEQ ID NO: 58334 - protein, 203 aa, Zea mays
  Coding DNA Sequence Number=SeqID_16555
  Homolog annotation: Hit_ID=Q2R0D3; Match level="QueryCoverage=75%, HitCoverage=81%, E-value=2e-20, Identity=43%"; Hit description =Expressed protein
  Pfam annotation: Domain name=DUF588; Domain location=13-161; Score =28.8; E_value=1.9e-05; Accession=PF04535.3; Description=Domain of unknown function (DUF588)
  Subcellular localization annotation: CTP_CleavageSite=40; ConfidenceScore=5.65e-01
MAAAGDGGGKSDGSSSNAACLALRIATVALSVASAVMMASASQRSCTGCSPATASQQPVSYRDYSSLSYSLVANVVSAALQALAAWLTASGKADKGKVFKSLSELVDTAAQVLLYSSSALSFSVDDFGTCGRRVAGVCKAAGEFCQRARASGAVSIAAAVALAASNYLKDVPVSTWFRAGDDGPKGKPAGCGRGGCHCRHHHH

SEQ ID NO: 58335 - protein, 209 aa, Zea mays
  Coding DNA Sequence Number=SeqID_16556
  Homolog annotation: Hit_ID=Q2R0D2; Match level="QueryCoverage=99%, HitCoverage=100%, E-value=7e-12, Identity=27%"; Hit description =Plant integral membrane protein TIGR01569 containing protein, expressed
  Pfam annotation: Domain name=DUF588; Domain location=13-171; Score =1.1; E_value=0.0034; Accession=PF04535.3; Description=Domain of unknown function (DUF588)
MCEEKKSGGGSANKWRHPVSLVFRIAGIAMAVAAAAVMAAASQCTVYADYDYGARPSTVTYSDFPAFVYLVAATSIAAPLEAVALFLSVSKKGKKGLLRVLMPLLGAAAPALLYSSAGAAFAAGWDVYYYSESEPSAGGGRRFSVCRSSAGARFCGQVHVSMWLALGAAVAVSVAECLTTLLWSASSDSDSADSDSDDSVCGHGCHCKH

SEQ ID NO: 58336 - protein, 280 aa, Zea mays
  Coding DNA Sequence Number=SeqID_16557
  Gene Ontology: Mol. function=oxidoreductase activity; Cellular component=mitochondrion; Biological process=metabolic process
  Homolog annotation: Hit_ID=Q2R092; Match level="QueryCoverage=98%, HitCoverage=98%, E-value=9e-82, Identity=59%"; Hit description =Tropinone reductase, putative
  Pfam annotation: Domain name=KR; Domain location=16-191; Score=-33.3; E_value=2e-05; Accession=PF08659.1; Description=KR domain
  Pfam annotation: Domain name=NAD_binding_4; Domain location=20-227; Score=-83.2; E_value=0.003; Accession=PF07993.2; Description=Male sterility protein
  Pfam annotation: Domain name=adh_short; Domain location=16-204; Score= 90.8; E_value=4.1e-24; Accession=PF00106.15; Description=short chain dehydrogenase
  Pfam module annotation: Pfam domain module=KR::NAD_binding_4::adh _short; Domain location=16-191::20-227::16-204
MAAAERDRERWILPGATALVTGGSKGIGHAIVEELAALGARVHTCSRNAAELEECRRRWAEKGGGLLQQVTVSVCDVAVRADREALMATVRDVFGGKLDILVNNAAQVVFKPAVECTGEEYTRIMATNLESCFHLSQLAHPLLRDASLAGGGSVVHISSTAGLLGFRGAVLYSTAKGFICTHFFVPLLAGGVNQLTRSLAAEWACDKIRVNSVAPGIVMTDMVKNAASSEAVEQETSRIPLRRAGEPAEVASVVSFLCMPAAAYVTGQVIYVDGGRTIRA

SEQ ID NO: 58337 - protein, 37 aa, Zea mays
  Coding DNA Sequence Number=SeqID_16558
  Homolog annotation: Hit_ID=Q942W0; Match level="QueryCoverage=84%, HitCoverage=11%, E-value=3e-08, Identity=87%"; Hit description =Putative tropinone reductase homolog
MARVPMGRIGEPEEVASMVAFLCMPAASYMTGQEWLT

SEQ ID NO: 58338 - protein, 902 aa, Zea mays
  Coding DNA Sequence Number=SeqID_16559
  Gene Ontology: Mol. function=DNA binding; Cellular component=nucleus; Biological process=regulation of transcription, DNA-dependent
  Homolog annotation: Hit_ID=Q287W4; Match level="QueryCoverage=97%, HitCoverage=97%, E-value=0.0, Identity=48%"; Hit description =Transducin/WD-40 repeat family protein
  Pfam annotation: Domain name=WD40; Domain location=100-138; Score =27.8; E_value=3.9e-05; Accession=PF00400.22; Description=WD domain, G-beta repeat
  Pfam annotation: Domain name=WD40; Domain location=149-187; Score =2.0; E_value=22; Accession=PF00400.22; Description=WD domain, G-beta repeat
  Pfam annotation: Domain name=WD40; Domain location=191-230; Score =46.6; E_value=8.6e-11; Accession=PF00400.22; Description=WD domain, G-beta repeat
  Pfam annotation: Domain name=WD40; Domain location=58-96; Score=13.4; E_value=0.8; Accession=PF00400.22; Description=WD domain, G-beta repeat
  Pfam annotation: Domain name=WD40; Domain location=6-44; Score=3.8; E_ value=13; Accession=PF00400.22; Description=WD domain, G-beta repeat
  Pfam module annotation: Pfam domain module=WD40::WD40::WD40::WD40::WD4 0; Domain location=100-138::149-187::191-230::58-96::6-44
MKGRVVKLREAHKAGSPALCSASWGPSGQHVVTASAADTAVLIHDAATVLAGGRGSEGQFQSNVARFTLPIRSLAFNKKGTLLAAAGEDDGIKLISTIDNTISKVLKGHKGSVTGLDFDPRNDYLASVDSFGTVIYWDLCIGAEARTLTRIAPTFRSDNSVRNVLCWSPDGQTLAVPGLRNNVVLYDRDTGEEVCTLYGDHEQPVSSLCWSPNGRYLASAGLDRQVLIWDVKSRQDIERQKFDERICSLAWKPNGNALLLIDVMGRVGIWESVVPSTMKSPNEGIPDLNSNMVPLFDDNDDEPDTSVGLEDDVDDTFSDSITFNHKRPRRKSTFDGDSENEDLIHQLEYTKRMKDKQNKNEDAGKARGDSATPVTLVTSTMQAAFQPGSTPPQPGMRNFLAYNMLGSITTIQNEGYSHVEVDFHDTGRGPRVPSMTDYFGFTMAAMNGSGSVFANPCKGDKNMSTLMYRPFGSWAGNSEWSMRFEGEEVKALALGAGWVAAVTSLNFLRIFTEGGLQMHILSVSGPVVTAAGYEDQLAIVSHASDCLPSGDQVLDVKVFNISEGTQSMSGRLVLTPLSRLSWFGFSENGQLSSYDSKHRKSLFNFSSVKARKSEDESHWVVGLDANNIFCILCKTPQSYPQVMPKPVLSILELSFPLASSDLGANSLENEFLMRKLQLSQIQNKMEEMAALGLDTTSYDDESFNMEAGLDRCILRLISSCCSGDKLVRASELARLLKLEKSMKGALSLVTRLKLPMLQEKFSSIIEERVLNDKIIAGAGGFCSNATIMTNTPVLTTQATLPSMFMQDGNRSLESSLPKLNIVNQQCNSTEPKKPAGERGIEIKDRTQKDSSASVPFAKFSVDLDECNMVIEKINISKYDITRLIEDLTRSCIMFVPCIHRQS

SEQ ID NO: 58339 - protein, 77 aa, Zea mays
  Coding DNA Sequence Number=SeqID_16560
MHGRLIPRVHLSAHASGEDWAARVAFGLGRIVGLRPCPQRDINEEQLACRPEQSFRPRVDPGGYLPPTVSAIQPIRS

SEQ ID NO: 58340 - protein, 180 aa, Zea mays
  Coding DNA Sequence Number=SeqID_16561
MELRKNRKHPASVDGAATTHLPRRHYVEHPAHSGKEQGKGLFGEGDRGAVLGRGARPPWGRRFPALVVWGEREEARLVFHGGVGARWRGAGAKALRRAAAGRGAGGGRARGGVCASRFPGRKVEGTEQLEEGARGHERSFSVPRKKGQRARREVEAPWEGDEQSCWLTVRRPWRKVPAPW

SEQ ID NO: 58341 - protein, 103 aa, Zea mays
  Coding DNA Sequence Number=SeqID_16562
MAMGRVRIGYGPSNSLARSIYCLAVPKSVIAFWMLLSAARDAALLMLAIVGSCRFPFDVADASHQHQQPGEVKTRLPAVEYDQLLAEHEQQSGDHDGLLICYC

SEQ ID NO: 58342 - protein, 111 aa, Zea mays
  Coding DNA Sequence Number=SeqID_16563
MEVLAIVALDGELRTVHSTEDGDKRTAAGLNGGDVAVKEVEEAERVTTMVKDVRQVGRRGWVHEVEETNTESGHDGGEANVCRSRTSRALWKAVTDSSSLCWNKNPSDLRL

SEQ ID NO: 58343 - protein, 115 aa, Zea mays
  Coding DNA Sequence Number=SeqID_16564
  Homolog annotation: Hit_ID=P08196; Match level="QueryCoverage=42%, HitCoverage=13%, E-value=8e-10, Identity=61%"; Hit description =Phytoene synthase 1, chloroplast precursor
MAGETHNASRFQNPILDEIEANDYDNFTRRAYVPKTKKLMALPKAYLRSLVPVWEKLSKFSGHAAGGSSIESLMKMSEPAVLSHFKPADYVSILAQIHKELECRPPDDKASLYLL

SEQ ID NO: 58344 - protein, 253 aa, Zea mays
  Coding DNA Sequence Number=SeqID_16565
MAHTTVGVQIRTSPSLVPLESTQIIAIQGPKITPNSQGNAGNQTPAPATGNRGVSCVGWYLGGSGAAVADPRTGTVSGGHTTVVSPERAWWSPRSSELRWATRPAAAESAEEEGSALAPEDRHEERGAHDAWVVRHGRRWKGTVGEDFGVAQRRRRCKEDARRFGSDIIVGRAWLGRRRPGRARRGGGGRGFRRGTVEDFGAGEPGAAARIGGGEGRSGATVSRRGERVSGRDLGAGPVCGIGERDSNVGSDD

SEQ ID NO: 58345 - protein, 181 aa, Zea mays
  Coding DNA Sequence Number=SeqID_16566
MGQRIDYSEMTVNQFLAIAEINIEDQLIVSMTGFKRYVATFAEFVTANGLDYSVIFDGVDLYTEEQFEDYVQYYEPARLGIPRRFGETPGLRHHPAVINKIVRYSTLNIRFNVVDDQLDGMHSQFVDLCSHIQYIVHDPIMSRMNNTQQIFQDNMGTLYSLFETLSTSDSIHTLDERQQQL

SEQ ID NO: 58346 - protein, 313 aa, Zea mays
  Coding DNA Sequence Number=SeqID_16567
  Homolog annotation: Hit_ID=Q6QP54; Match level="QueryCoverage=22%, HitCoverage=25%, E-value=2e-15, Identity=66%"; Hit description =Putative kinase
  Subcellular localization annotation: CTP_CleavageSite=46; ConfidenceScore=5.27e-01
MPNSQLVTPISIKLQRPDGVKSDRQSGLAKGATANSAPPDPRARTRAKTRKTANSAPPDPRARTRAKTRKTANSAPPDPRARTRAKTRKTANSAPPDPRARTRAKTRKTANSAPPDPRARTRAKTRKTANSAPPDPRARTRAKTRKTANSAPPDPRARTRAKTRKTANSAPPDPRARTQAKTRKTANSAPPDPRARTRAKTRKTANSAPPDPRARTRAKTRKTTKLRLARPQGSDSALASAERLPPRPTPRLGLGHGNRRQTQPRLRRNPHVALLGAQAATSTGGAIIIPPRIDSGHGEQDRRLIRPAPLEGQ

SEQ ID NO: 58347 - protein, 778 aa, Zea mays
  Coding DNA Sequence Number=SeqID_16568
  Gene Ontology: Mol. function=structural constituent of ribosome; Cellular component=intracellular; Biological process=translation
  Homolog annotation: Hit_ID=Q2QT41; Match level="QueryCoverage=86%, HitCoverage=95%, E-value=4e-80, Identity=32%"; Hit description =Expressed protein
  Pfam annotation: Domain name=DUF594; Domain location=630-689; Score =46.4; E_value=9.9e-11; Accession=PF04578.4; Description=Protein of unknown function, DUF594
MSTSSAGTLITAAEVSLACKIIGFFNDWALRLATLASLACTLVLMLLADTRRHNKYPLLVLLVWAAYQVQPQVGGYALTHLTISSATTTTTTTTSSAREQQLVAFWAPLLLLHLAGPDNIVAFTLEDGKLSWRKLLDAIWKIIQALYVMLKYIYLCDSGVLRSASSIMVTLGVARYSESVVALLRGNMDNLWGSASAGDDERKPPQSTGEYGAAAAADKNEKELTTLLYSHTQFLACGRRAMADSSVDTDSPNYAIARNIFSQQDPDGVRKVAGMESSLMYDVLYTKVTVVHTWGGYLLRLVSPVGTATASSLFWLYPKDSEETPDVVITYILLAAAFFLDVVWLVRALGSTWAYSFLNARANMWLHHKLLCSGCWLRLRRILVGLDLLWLLGIRKDPSSRRMWSGRVGRYDLLAECTRRPSMVERLCTWLASNLRLEDIWKEYQHSRAQKVLFERIQQRLSGSADRRYSMEDITTLWGQEAVKRRRKRDKLKGIKLGIFGREFQEDVLLWHIGTTIFLARSDRQLLKDKANKYLGAVEALSDYLMFLLAVRPSMLPGLELRKLFEVTCKALKDSGSGVRRKAGEKCVPCHAARKAKLAELVQKEMSGHNQASVDANRRLIFVACQLATELLKVKKDQMEELLDLMFDVWVDKILYAATRCSKDSHAKQLARGGELTTILWIVAEHAGPFQIGETSISDPPPFDGDNNNNNNNNNNNNNNNNNNNNNNNNNNHDDDDDCPCEKLGKEKKKKNCNEDPDVCLDICCVKDYCCTNEYYYC

SEQ ID NO: 58348 - protein, 146 aa, Zea mays
  Coding DNA Sequence Number=SeqID_16569
MKVVTHRSKPYFLERTSALPASEKTKTVESFEATFSALEVVLVAAVETNTTQLEKSEPDSSRTEQQQKLQSPPATVGLPNIATVPAATPRKGRRMASVLDAVLKPTKIATHAPTKVSKDKAEELEEAVAASTTPCCAEGTPACTQA

SEQ ID NO: 58349 - protein, 142 aa, Zea mays
  Coding DNA Sequence Number=SeqID_16570
  Gene Ontology: Mol. function=serine-type peptidase activity; Cellular component=integral to membrane; Biological process=proteolysis
  Homolog annotation: Hit_ID=Q1SB50; Match level="QueryCoverage=84%, HitCoverage=75%, E-value=2e-24, Identity=44%"; Hit description =Peptidase S26A, signal peptidase I
  Pfam annotation: Domain name=Peptidase_S24; Domain location=34-108; Score=32.3; E_value=1.7e-06; Accession=PF00717.13; Description =Peptidase family S24
MARILAAVWPIVKGCITGGVFGITIADWSASYVTLHGASMHPTFDPQQAERALVDKRCLHRYHFSRGDVVVFRSPRDHRELVVKRLIALPGDWIQIPEKQEIQQIPQGRCWVEGDNAATSFDSRSYGPDKLLVNCKMEVLTV

SEQ ID NO: 58350 - protein, 91 aa, Zea mays
  Coding DNA Sequence Number=SeqID_16571
  Subcellular localization annotation: CTP_CleavageSite=76; ConfidenceScore=5.41e-01
MTRMTAVATTAVEVAAAVAATTAARAVVKVTVATVAARAMVATTAAKAAVGDGNNSGKGGNKASGIVPLCFRGNCRVMPEDFAFPSGNLAL

SEQ ID NO: 58351 - protein, 85 aa, Zea mays
  Coding DNA Sequence Number=SeqID_16572
  Subcellular localization annotation: CTP_CleavageSite=18; ConfidenceScore=5.06e-01
MAKKGIARSGSGREGASRVMTRWVATRVTTRHNYFVLVRTRHDMTVIVLRPTRGPLWVVLRLGDNPTKRHKHNQFTADPFSTLSG

SEQ ID NO: 58352 - protein, 118 aa, Zea mays
  Coding DNA Sequence Number=SeqID_16573
MGSASCGPAGGSLVRRGRQCLFDSPRGGAWPTVCTLPYWTQPNEASGDGPRCGLAWWPGYPLEDVAGEGESQSSGVFPQQIKQLANSQLSVKLPKRGYEVNISAKTLVMSYLPCLYNC

SEQ ID NO: 58353 - protein, 121 aa, Zea mays
  Coding DNA Sequence Number=SeqID_16574
MEQSEHGVCTHQGSTLLPSENTIWRTGNQDVEAFALPLRPLLRTPSPREPRGPLCDSALSLCSIQRTHRVMAVHPRECGEPWAVGVGDPTAIFTTGLTVLVRSSPGLREIGEMNLENEFPI

SEQ ID NO: 58354 - protein, 127 aa, Zea mays
  Coding DNA Sequence Number=SeqID_16575
  Subcellular localization annotation: CTP_CleavageSite=45; ConfidenceScore=5.01e-01
MSLRDQICINSPSSRQVLRPSRTVLRDRLRFLYATKLCGMILFVSRMDLPAPARSTQCHAAGYPWASFVPADACHTSELCPGRHLRANEVRRKPRMQAFAMASGGWARLPSAGRVNGLACGERKPDL

SEQ ID NO: 58355 - protein, 110 aa, Zea mays
  Coding DNA Sequence Number=SeqID_16576
MVVPAREVQILPQVILPGTVLKVSPRSPEDPRRPRRLGKNQQEDKGQRGRRRGYRIKAAAKSGAATVGSEEVAAAQSAAAANRGGEGHRWLNHGGERQPRATGRRIIWAG

SEQ ID NO: 58356 - protein, 143 aa, Zea mays
  Coding DNA Sequence Number=SeqID_16577
  Homolog annotation: Hit_ID=Q67X81; Match level="QueryCoverage=42%, HitCoverage=31%, E-value=3e-08, Identity=54%"; Hit description =Putative poly(A) binding protein II
MEDEEHEVYGQEIPVDGEDVDMSAGDDATKELDEMKRRLKEMEEEAAALREMQAKVAKDMQDNTWIITGHLVLVPPLSKESKTPTGTLVISKREEANPSISEMDGNGGAATSSSTQPVADLAKETGKTFYCLCLYQFLGSSIL

SEQ ID NO: 58357 - protein, 189 aa, Zea mays
  Coding DNA Sequence Number=SeqID_16578
  Gene Ontology: Mol. function=nucleotide binding; Cellular component =intracellular; Biological process=small GTPase mediated signal transduction
  Homolog annotation: Hit_ID=Q9LWT5; Match level="QueryCoverage=99%, HitCoverage=100%, E-value=5e-79, Identity=77%"; Hit description =Putative ADP-ribosylation factor
  Pfam annotation: Domain name=Arf; Domain location=4-177; Score=289.9; E_value=4.7e-84; Accession=PF00025.11; Description=ADP-ribosylation factor family
  Pfam annotation: Domain name=MMR_HSR1; Domain location=18-129; Score=- 3.5; E_value=0.0021; Accession=PF01926.13; Description=GTPase of unknown function
  Pfam annotation: Domain name=Miro; Domain location=19-129; Score= -2.1; E_value=0.0088; Accession=PF08477.3; Description=Miro-like protein
  Pfam annotation: Domain name=Ras; Domain location=19-179; Score= -51.9; E_value=2.2e-05; Accession=PF00071.12; Description=Ras family
  Pfam module annotation: Pfam domain module=Arf::MMR_HSR1::Miro::Ras; Domain location=4-177::18-129::19-129::19-179
MGQSLMKLFFDDSCQKEVKVVMLGLDAAGKTTALYRLHVGEALSTVPTIGFNVEKVEYKNVAFTVWDVGGQDKLRPLWRQYLSNSDALIYVVDSVDRDRIGVAREEFQAIVKDPLMLSSVVLVLANKQDMKGAMSPSEVGQRLGLYDLKNRTSRAVGACALTGEGLHEGLGWLAATLKDARAWGTSVRF

SEQ ID NO: 58358 - protein, 422 aa, Zea mays
  Coding DNA Sequence Number=SeqID_16579
  Gene Ontology: Mol. function=phosphatase activator activity; Cellular component=protein phosphatase type 2A complex; Biological process =negative regulation of protein amino acid dephosphorylation
  Homolog annotation: Hit_ID=Q67X79; Match level="QueryCoverage=89%, HitCoverage=94%, E-value=1e-156, Identity=74%"; Hit description =Putative phosphotyrosyl phosphatase activator
  Pfam annotation: Domain name=PTPA; Domain location=86-390; Score =529.9; E_value=2.7e-156; Accession=PF03095.5; Description =Phosphotyrosyl phosphate activator (PTPA) protein
MSNPGSLPASAHHEHEHTPLCRSCGAPTTSPTPAPWSGTTDSPPPAYRPIRLPAINAPTNTAAIVLSPVPQPLPVPPAAPPHAFLVPAKRITSPDDIARFHASVHGLHFLGFVAALSASVHGRKLSDPLPSPPSPAIAALLDLVSALAALVASTPPLPHSSRYGNPAFRLWHEKLTDSASELISRITATASSPADLAGADVELAPYLLDSFGNATRIDYGTGHETNFAAFLYCLARLGLITEPDYPAVVLRVFTAYLDLMRTLQDTYQLEPAGSHGVWGLDDYHFLPFIFGSAQLIDHKYMKPKSIHNPDILENFSKEYMYLACVAYVKKVKKGPFMEHSPMLDDISGVANWKKVNSGLLKMYKAEVLEKVPIMQHFLFGSLIKWPSNNLRRLARLGVQAVANVLSHHTALRTMVTGYNKSC

SEQ ID NO: 58359 - protein, 71 aa, Zea mays
  Coding DNA Sequence Number=SeqID_16580
  Subcellular localization annotation: CTP_CleavageSite=36; ConfidenceScore=5.16e-01
MANIWALFSSLAEWGNLSSVGSHLHSSQVRQGGHIVAATRDPFSCVVVTTTPWSQVNVGKLIFQIGTYGSF

SEQ ID NO: 58360 - protein, 281 aa, Zea mays
  Coding DNA Sequence Number=SeqID_16581
  Homolog annotation: Hit_ID=Q6QP51; Match level="QueryCoverage=64%, HitCoverage=87%, E-value=2e-15, Identity=37%"; Hit description =Putative growth-regulating factor 1
MRKVMKKIFVGTSKMILKDRRHLWQAKQATLRFRHNDRVKKGTRKGDIPKGILLREGNGPRAPLLIRGSKAGPSEEFNSHLRALGLRAHYWSEVRRSAPRKGSTAASDHSGSAPITDQGFVGWPPKGSTAASDAERGMTLASAPEDDELHLTRPKARTRPRPRKTTNSASPDPRARTRPRLRNTTNSASPDPRARTQPWPQMMVSTPPNPGLGLDLDLGRQTRPRLGGASASPDPGLEPTTSQGGIIILPLASSGYGEQDRRPIWLAPGPPGVETPTLVHA

SEQ ID NO: 58361 - protein, 55 aa, Zea mays
  Coding DNA Sequence Number=SeqID_16582
MQTELEEKSRFGRCPYCRAMIYQDLSATIFYCSRCRTPIRGKNPQPTDETEYALN

SEQ ID NO: 58362 - protein, 561 aa, Zea mays
  Coding DNA Sequence Number=SeqID_16583
  Gene Ontology: Mol. function=microtubule motor activity; Cellular component=microtubule associated complex; Biological process =microtubule-based movement
  Homolog annotation: Hit_ID=Q9FME7; Match level="QueryCoverage=61%, HitCoverage=27%, E-value=2e-94, Identity=53%"; Hit description =Kinesin-like protein
MGKAEMKQFAKSDIFVLKQHYEKKLDDLEQENKALQKEIENLHHALTNVCSSMDENAQKLKENYLQKLNALESQVHELKKQKSDEAAKRLQEDIQHIKSQKDQLQQKAKQESEKFMSWKAAPEKEVIQLKKEGRRNEYDMHKLLALNQRQKMVLQRKTEEAAAATKRFMELLEAKNSSLETYGSGNASGMQALMRAVDDELEVTIRAHELRSYYQRQMQERAAISKEIAKLEEEPKHKMSDCPQAMSPSARSFRISALENMSSSSSAMVSMASQLSEAEERERVFNGKGRWYHVRSLPEAENIMNHLFQLASSSRCKEKEHTIMELKEKVVVLNSEIRQLETQATDLRSTNKRTYPVQSLILVQACNQTIQSIQSRSNGFIWKGLKLFNGLNNSKKSARSNGTGFAPRQICLTIPRTCIVFDLPSVLVIARTTSIGWTIWTFQTTRYSRPGKAETHQSRACSHSNPNLDRQNTHRRCKAREALRRKSAVCPKLFHRTAVPAQKPHHARPRSASAEAQVHNAVQAVVVKKWRNSAVQPVLGSLLPSEPETPKLPLGTAPTFP

SEQ ID NO: 58363 - protein, 665 aa, Zea mays
  Coding DNA Sequence Number=SeqID_16584
  Gene Ontology: Mol. function=hydrolase activity, hydrolyzing O -glycosyl compounds; Cellular component=beta-galactosidase complex; Biological process=carbohydrate metabolic process
  Homolog annotation: Hit_ID=Q5JKZ9; Match level="QueryCoverage=94%, HitCoverage=59%, E-value=0.0, Identity=77%"; Hit description =Putative beta-galactosidase
  Pfam annotation: Domain name=Bgal_small_N; Domain location=374-638; Score=142.9; E_value=8.6e-40; Accession=PF02929.7; Description=Beta galactosidase small chain, N terminal domain
  Pfam annotation: Domain name=Glyco_hydro_2_C; Domain location=1-285; Score=464.4; E_value=1.5e-136; Accession=PF02836.7; Description =Glycosyl hydrolases family 2, TIM barrel domain
  Pfam module annotation: Pfam domain module=Bgal_small_N::Glyco_hydro _2_C; Domain location=374-638::1-285
MAHKQMLVNGCPVVLRGVNRHEHHPRLGKTNLEACMIKDLILMRQNNINAVRNSHYPQHPRWYELCDIFGLYVIDEANIETHGFDESNTFKHPTLEPIWANAMLDRVVSMVERDKNHACIIVWSLGNESSYGPNHASMSGWIRERDPTRLLHYEGGGSRTSSTDIVCPMYMRVWDVVKIAKDPSETRPLILCEYSHAMGNSNGNIDAYWMAIDNTFGLQGGFIWDWADQGLLKEDSDGSKFWAYGGDFGDTPNDSNFCLNGIVWPDRTIHPALHEVKYLHQPIKISSADNMLKIENGHFFETTEALDFSWVLHGDGCVLGSGPLNIPTLAPQTSQLINMESSPWFALWSACAAKEVIALSSSPLVCERIGDNVTICKNNAWKIKVNSQLGTIDSWKVNDVELMSKGILPCFWRAPTDNDKGGFFTKPYDSRWREAFLDNVSFHSSQFSVKELPDNTVEFSTLYYGVPGHLPKPDDEASESILFRVKMVCRIHGSGDVVLDYEVNPRSDLPPLPRVGVVFSAGRSLSHVTWYGRGPFECYPDRKAAAHVGVYESSVEELHVPYIAPVECGGRADVRWVALRDAGGLGLYASAHGGSPPMQMSASYYGAAELDRATHVHRLVKGDDIEVGKLFVFAFELLAGIGRAAAKWSGRSDGSRLRVCFAGAS

SEQ ID NO: 58364 - protein, 106 aa, Zea mays
  Coding DNA Sequence Number=SeqID_16585
MALFSQSQLCLGAPDCPVVHRTVSGEGNPRLNNIVNLIVVLNTELDHTLDELSRDCAESAELWTERTERRHQEYGSPAPTGTQHPYCSPPWGPTLMARLTAKPKYI

SEQ ID NO: 58365 - protein, 282 aa, Zea mays
  Coding DNA Sequence Number=SeqID_16586
  Gene Ontology: Mol. function=transporter activity; Cellular component= integral to membrane; Biological process=transport
  Homolog annotation: Hit_ID=Q9ATN0; Match level="QueryCoverage=99%, HitCoverage=100%, E-value=1e-156, Identity=94%"; Hit description =Plasma membrane integral protein ZmPIP1-6
  Pfam annotation: Domain name=MIP; Domain location=52-267; Score =375.4; E_value=8.7e-110; Accession=PF00230.10; Description=Major intrinsic protein
MAGGTLQDRSEAEDVRVGVDRFPERQPIGTAADDLGRDYSEPPAAPLFEASELSSWSFYRAGIAEFVATFLFLYVTVLTVMGGIAWAFGGMIFALVYCTAGVSGGHINPAVTFGLLLARKLSLTRAVYYVVMQCLGAVCGAGVVKAFGSALYESAGGGANAVSPGYTKGDGLGAEVVGTFVLVYTVFSATDAKRTARDSHVPALAPLPIGFAVFLVHLATIPITGTGINPARSLGAAIIYDNPHGWHGHWILWVGPFAGAALAAVYHQVVLRAIPFKSSALY

SEQ ID NO: 58366 - protein, 43 aa, Zea mays
  Coding DNA Sequence Number=SeqID_16587
MPQWGLHAPPPPPPPQNPNPLHDFVNEFFASGGSGHNSNDPDM

SEQ ID NO: 58367 - protein, 224 aa, Zea mays
  Coding DNA Sequence Number=SeqID_16588
  Gene Ontology: Mol. function=hydrolase activity; Biological process =metabolic process
  Homolog annotation: Hit_ID=Q69Y17; Match level="QueryCoverage=67%, HitCoverage=54%, E-value=5e-43, Identity=67%"; Hit description =Putative PrMC3
  Pfam annotation: Domain name=Abhydrolase_3; Domain location=59-199; Score=-66.5; E_value=0.0022; Accession=PF07859.3; Description =alphabeta hydrolase fold
  Subcellular localization annotation: CTP_CleavageSite=76; ConfidenceScore=5.28e-01
MWRTLCVRYTSAAGESRADAEVSLSIRMATISPAPSDRSRQASSSARRRGRARTATSTTSSPARAPSACPSTTASRAEHKLPAAYDDAWAGLRWAVTLGKDPWLLEHADLSRVFLPSCSAGANIAHDTVVRASAAGVAIRGLASVPPYFTGREAVGGETAFSPEIRLSMDRTWRDGVRGRRGAQGLRACCGRAGNGYPLDSGYPTGTGMDTDLYPRTSMGTDIG

SEQ ID NO: 58368 - protein, 80 aa, Zea mays
  Coding DNA Sequence Number=SeqID_16589
MEKARKVGAAGCQCEQLRGGQQDDKRLHRQRWRRKVEVSVAEGKEAPMAREAATRVAGMRTGDGGSRPVAAFWVTAVARI

SEQ ID NO: 58369 - protein, 208 aa, Zea mays
  Coding DNA Sequence Number=SeqID_16590
  Gene Ontology: Mol. function=hydro-lyase activity; Cellular component= cytoplasm; Biological process=fatty acid biosynthetic process
  Homolog annotation: Hit_ID=Q6I5L0; Match level="QueryCoverage=72%, HitCoverage=70%, E-value=4e-76, Identity=90%"; Hit description =Putative beta-hydroxyacyl-ACP dehydratase
  Pfam annotation: Domain name=FabA; Domain location=74-200; Score =194.0; E_value=3.5e-55; Accession=PF07977.3; Description=FabA-like domain
  Subcellular localization annotation: CTP_CleavageSite=37; ConfidenceScore=5.22e-01
MEVAAVPRSAAACRAAPLLPAVRAAACHLALPRRAFSASVAAAPAPRRLAARRAADGFPPFPSVMDINQIREILPHRFPFLLVDRVIEYKAGEYAVGIKNVTINDNFFPGHFPERPIMPGVLMVEAMAQVGGLVMLQPEVGGSRDNFFFAGIDKVRFRKPVIAGDTLIMRMTLTKYQKRFGLAKMEGKAYVGGDLVCEGEFLLVSATE

SEQ ID NO: 58370 - protein, 71 aa, Zea mays
  Coding DNA Sequence Number=SeqID_16591
MGNCEQKEVSEIYKDEAVKRHVVYFKDHHCTCRRWKRKTRKIGVKPGKKKPKDQEQKKEPEEEEEEQDTEQ

SEQ ID NO: 58371 - protein, 204 aa, Zea mays
  Coding DNA Sequence Number=SeqID_16592
MTCGAENMWVFIGAAKDKMDPHVIVNITTARYFARSGWRRGPGYSRIETHGYTVRQSGKGTRASSASHTLTPNSISNAALGSRVGNIMMDLMGWGCRSFCLHGDVNDKKSPLTGIGDGKAFPSRLCGDKTKWTTDQAKDGSKKRFEVLSAREKVKEAEEPKAKGVIPKEDKLDCLVPRLALGEQAALGKQLGRCGYKLLDYPVC

SEQ ID NO: 58372 - protein, 638 aa, Zea mays
  Coding DNA Sequence Number=SeqID_16593
  Gene Ontology: Mol. function=nucleotidyltransferase activity; Cellular component=integral to membrane; Biological process=aromatic amino acid family biosynthetic process
  Homolog annotation: Hit_ID=Q6R3K6; Match level="QueryCoverage=95%, HitCoverage=94%, E-value=0.0, Identity=70%"; Hit description=Metal -nicotianamine transporter YSL6
  Pfam annotation: Domain name=OPT; Domain location=30-620; Score =453.5; E_value=2.7e-133; Accession=PF03169.6; Description=OPT oligopeptide transporter protein
MGSEGEITGPLLASGAGAPAPEAVPPWREQVTARGLAVSAVLGVLFCLITHKLNLTVGIIPSLNVAAGLLGYFLVRTWTAALERFGVVSKPFTKQENTVIQTCVVACYGLAFSGGFGSYMLAMDQRTYELIGPDYPGNRAVDVKTPSLGWMIGFMFVVSFLGLFSLVALRKVMVIDYKLTYPSGTATAMLINSFHTTTGAELADKQVRCLGKYLSISFIWNCFKWFFSGVGDSCGFDNFPSLGLAAFKNTPTYIGCGLICPHIVNCSTLLGAIISWGILWPYISTKAGDWYPADLGSNDFKGLYGYKVFISVSVILGDGLYNLIKIIYATIKEIMNARAKQGRLPLAQVQDGDEGSNLSAEEKHLNETFIKDSIPPWLAGSGYIGLAAISIATVPMIFPQIKWYLVLSAYVVAPLLAFCNSYGTGLTDWNLASTYGKDRPLHFCIMADLMQDFKTGYLTLSSPRSMFVSQLIGTALGCVIAPLTFWLYWSAFDIGNPDGAFKAPYAVIFREMSILGVEGFSALPQHCLAICSFFFIASLVINLLRDVTPKNVSRFIPIPMAMAIPFYIGAYFAIDMFVGTVILFVWERVNRKECDDFAGAVASGLICGDGIWTVPSAILSILRIDPPICMYFKPSLSS

SEQ ID NO: 58373 - protein, 306 aa, Zea mays
  Coding DNA Sequence Number=SeqID_16594
  Gene Ontology: Mol. function=RNA-directed DNA polymerase activity; Cellular component=intracellular; Biological process=RNA-dependent DNA replication
  Homolog annotation: Hit_ID=UPI00004C1732; Match level="QueryCoverage =99%, HitCoverage=23%, E-value=1e-142, Identity=76%"; Hit description= UPI00004C1732 related cluster
MPGIPRDVAEHSLDIRAGARPVKQPPRRFDEEKRRAIGEEIHKLMAAGFIKEECGCDVPKVHEPRGEHIGRTVEAYVDDIVVKTRKASDLLSDLETTFRCLKAKGVKLNPEKCVFGVPRGMLLGFIVSERGIEANPEKIAAITNTGPIKDLKGIQRVMECLAALSRFISRLGERGLPLYRLLRKAECFTWTPEAEEALGNLKALLTNAPILVPPAVGEALLIYVAATTQVVSAVIVVERREEGHALLVQRPVYFISEVLSETKIRYLQIQKLLYAVILTRRKLRHYFESHPVTVVSSFPLGEIIQC

SEQ ID NO: 58374 - protein, 70 aa, Zea mays
  Coding DNA Sequence Number=SeqID_16595
MASREWSSSGRWPPGLASRRLHRTQGRRGGWRGDRDQGPTTQHAEGENVEGREGRLACAMTNNRRCVIWI

SEQ ID NO: 58375 - protein, 176 aa, Zea mays
  Coding DNA Sequence Number=SeqID_16596
  Gene Ontology: Cellular component=exocyst; Biological process =exocytosis
  Homolog annotation: Hit_ID=Q69P90; Match level="QueryCoverage=98%, HitCoverage=29%, E-value=5e-41, Identity=57%"; Hit description =Putative leucine zipper-containing protein
MDGSAAELEAAKRVVMQWDSSLACGGADEPMLFDGGGNRAKADRFLRAVDDLHRLAPPSPAAVGSLRRLSSSSTARSGAMLLEDEFRHVLSSRAVDHEIEALTYLSLLSINADRSNSASSADLPAADEDDSVFSSIGHRSTAYRSLRSIREIDLLPNDVIADLRAIASCLAAAGTT

SEQ ID NO: 58376 - protein, 103 aa, Zea mays
  Coding DNA Sequence Number=SeqID_16597
MERGIDQDLDTTQGLSEAGHRTGWPPGHRTHRGELPGAHAQGVRERGGLGRECHGWPGVELVGALASRRLHRAAGHEPRWLSRVREKRRVARGPRPGAYDAAR

SEQ ID NO: 58377 - protein, 170 aa, Zea mays
  Coding DNA Sequence Number=SeqID_16598
  Pfam annotation: Domain name=zf-CCHC; Domain location=102-119; Score =11.9; E_value=0.011; Accession=PF00098.13; Description=Zinc knuckle
MMNPNEDKVDEVNNKIPTSTVVKRKDDSHRYLLNGMKNNKRTRKLFGYKIKPPQPQAEAPKLVNTQTGESNQAQLFNMQATDQLSSAGNQAKLTRREVKVRGDCFYYKEEGHFICQCPKKCLDQLAKKAFKQNSTSDNAEEIVFTRSKYKVIQTTDEGGRLLNIRVEPRE

SEQ ID NO: 58378 - protein, 489 aa, Zea mays
  Coding DNA Sequence Number=SeqID_16599
  Gene Ontology: Mol. function=transmembrane receptor activity; Cellular component=exocyst; Biological process=exocytosis
  Homolog annotation: Hit_ID=Q6Z0R1; Match level="QueryCoverage=52%, HitCoverage=40%, E-value=1e-107, Identity=79%"; Hit description =Putative leucine zipper-containing protein
  Pfam annotation: Domain name=Exo70; Domain location=1-314; Score= -218.7; E_value=0.0067; Accession=PF03081.6; Description=Exo70 exocyst complex subunit
SPSPPPRCPATLDTPFAEAVKGAALQLLGFAEAINIGHRSPKYLFKDHRPPRCTLGPPTDVSDIFAASKVAECIYVQAAEIQTRLADAVRGIFSEFENTVLRDPPKTAVPGGTVHPLTRYVMNYSSLICDYKATLSELIVSRPSASARLAAEGNELASSLADLELPELENQLPLASHIVWIIVILEHNLEGKAALYKDPALSHLFMMNNVHYIVHKVKDSSDLWGMIADDYLKRLTGKFTMAATNYQHASWLKILNCLRDEGLHEEITWVKNLYIRVRLTAANSGLRRHRKLRFARPQGSDSGSAPEDNELRFARPQGSDSGSAPEDDELRFARPQGSDSGSAPEDDELRFARPQGSDSGSAPEDDELRFARPQGSDLGSAPEDDELRFARPQGSDSGSAPEDDELRFARPQGSDSALASADGLRLVRPRGSDSTSALEDRLDLDLGGASTSPNPGLGPTTSQEAPSLPYPKLTQATGNKTGVPSGLLR

SEQ ID NO: 58379 - protein, 366 aa, Zea mays
  Coding DNA Sequence Number=SeqID_16600
  Gene Ontology: Mol. function=hydrolase activity, hydrolyzing O -glycosyl compounds; Cellular component=cellulose and pectin -containing cell wall; Biological process=polysaccharide catabolic process
  Homolog annotation: Hit_ID=Q69NF5; Match level="QueryCoverage=99%, HitCoverage=70%, E-value=1e-174, Identity=81%"; Hit description =Endoglucanase 23 precursor
  Pfam annotation: Domain name=Glyco_hydro_9; Domain location=1-354; Score=349.9; E_value=4.1e-102; Accession=PF00759.9; Description =Glycosyl hydrolase family 9
MHCRWAIRGRITTAGRGRRTWTRTARCTTSARGAPGSDIAGETAAALAAASMVFRDDDPEYAETLLTSARKAFEFADTYKGAYSDDPDLRAGGCPFYCDFNGYQDELLWGAAWLRRASKDDTFLQYIQNNGKTLGAEDSSNEFGWDNKHAGLNVLVSKEFIEGAALPLQSYKEFADSFVCTLIPESSSSPHITYTPGGMIYKPGGSNMQHVTSISFLLLTYAKYLSKSSHTVDCGDVSVGPETLQLQAKRQVDYLLGDNPMKMSYMIGYGDRYPQRIHHRASSLPSIRDHPQPMACKEGTPYFNSSGANPNPLVGAVVGGPGEDDAYEDDRADFRKSEPTTYINAPLVGVLAYFVGNPNPGHNTRH

SEQ ID NO: 58380 - protein, 127 aa, Zea mays
  Coding DNA Sequence Number=SeqID_16601
MGWPLVYWTGETCNSVDVRPTTTKKPDKPTSLRKRANKPEVWGAGSSTHTPHGEPQSTMATDHATPASLLCAHTDRRTDSFRRDVTHESRLAPRLSPPLARAVRRARFAATKPTNAPVIRRWRLCRL

SEQ ID NO: 58381 - protein, 139 aa, Zea mays
  Coding DNA Sequence Number=SeqID_16602
  Gene Ontology: Mol. function=protein dimerization activity; Cellular component=nucleus; Biological process=regulation of transcription, DNA-dependent
  Homolog annotation: Hit_ID=Q652A1; Match level="QueryCoverage=99%, HitCoverage=100%, E-value=7e-59, Identity=79%"; Hit description =Auxin-responsive protein IAA26
  Pfam annotation: Domain name=AUX_IAA; Domain location=8-139; Score =109.5; E_value=9.9e-30; Accession=PF02309.7; Description=AUXIAA family
  Subcellular localization annotation: CTP_CleavageSite=48; ConfidenceScore=5.12e-01
MAGYGDDGVDLTELTLGPPGVNARKARRARKNGQQPSSSAMTMQAFVKVSMDGTPYLRKVDVAAYDDYGELVEALNELFCCCSIGLMDGYGEWEHAVVYEDGDGDWMLVGDVPWEMFVSSCKRMRVMRSCEARGLSSNA

SEQ ID NO: 58382 - protein, 107 aa, Zea mays
  Coding DNA Sequence Number=SeqID_16603
MRQLNDLKMDKNQNLAYAPYIMALIRVKTRFEGKCEMMSRKLMFMRKLSRCLHLLHLSMANTVSFVILFVGHLFSNAVYQEQDNIIVSYYGPSSSEVLSPHGHNASY

SEQ ID NO: 58383 - protein, 66 aa, Zea mays
  Coding DNA Sequence Number=SeqID_16604
MSSWAEDCQVGFVQLKGQIRIARCGIGVSQVRALIIAYSAQYKFTGGLRRFIGNSGKMIKSWDQFY

SEQ ID NO: 58384 - protein, 71 aa, Zea mays
  Coding DNA Sequence Number=SeqID_16605
MVSMLKRMNKFEMMSKLKMTTYIKGDDVEEEDQEKEDNQEIQATKVPHPRVHQAIYRDHPVDLILDGLKIL

SEQ ID NO: 58385 - protein, 102 aa, Zea mays
  Coding DNA Sequence Number=SeqID_16606
MRLRKGFDDSTTLVRSTMSQPNKTPRRQPTHGLENGGWQARALRWDEVEKGRTHDQAKFAGNHGRLKESGELQPWKRGSGSRTSAKGTKTRSQFDGDNLGFG

SEQ ID NO: 58386 - protein, 163 aa, Zea mays
  Coding DNA Sequence Number=SeqID_16607
MARTTLTTTDRHPTIDEFARTPPISVTTSPELDRRILPDLGRTPEIQQPIAGHGCGGAARPHGEVSLETRWTATAGLQGLRERVRHVQSDMENLTVGTTPAQGHQRTRDMARRANSDADQLQQGIAQAQGQSMAAGFGYARSAPVSVDQAKQRGKGRTERCPK

SEQ ID NO: 58387 - protein, 241 aa, Zea mays
  Coding DNA Sequence Number=SeqID_16608
  Subcellular localization annotation: CTP_CleavageSite=45; ConfidenceScore=5.10e-01
MTNSTLAPYPGSHSNHAPGGAERPRDNRQTLPGGHQRRVGWWSAVAVVVVAVSFDGILGELMEIYRSLAGKISAQGRCQSSRWLQLRRGDQEVGDTGRMTDESSSAHFYSPQDAKTDSYDARPRRDPRRARLLWVRQARALEKSRHGGPPVIGLRQAQHGPTRQPAIKKEKTRGANGLAKAILAQSQKEEGQGRDGLDCIRPRSLCFHTADVEVKVFLHWRILSLRNNFFLYYRFFLVFYT

SEQ ID NO: 58388 - protein, 227 aa, Zea mays
  Coding DNA Sequence Number=SeqID_16609
  Subcellular localization annotation: CTP_CleavageSite=92; ConfidenceScore=5.37e-01
MNTYSLTIRYDGISRSHNPSHPRTGPARRARARAAVPRLLEPRWSSEGTASYAVAALGRAVSTQATLRTRGARPLCTLEENRPGRPRLGRVRARRAATQAGHAGPNRATPGPSCTRRAPWAEGTSRGMPGTPWAGRAADAASQRVGSGRGGLPRRAATPGFPRWSRMPAPCPHRGRARDEASPTPGSVRARGEVGRGEWRAPCDVGTRGKREVNPRKERVTPEFGGY

SEQ ID NO: 58389 - protein, 165 aa, Zea mays
  Coding DNA Sequence Number=SeqID_16610
  Homolog annotation: Hit_ID=Q6Z1L9; Match level="QueryCoverage=20%, HitCoverage=15%, E-value=2e-07, Identity=82%"; Hit description =Putative syntaxin of plants 52
MELAVPLPPTPSSRESSPRPLLLHPCIDSTEIAADQAAEMHAPSPASLHRRRQDCSSPDSRDARPLPTTMPPFIDGAPLPQNIATTELAPWEDLLGHSKKEDDMSRVAGLDNQGIVGLERQIMKDIGLLCCKEAEDDYESGLTVKPELQLTDSREDAACLMIAVN

SEQ ID NO: 58390 - protein, 190 aa, Zea mays
  Coding DNA Sequence Number=SeqID_16611
MTISKDQICRHITHHQSSGDGASGDCPSQASESDAVGGNPNILKHDGVSSKRKQVRKRRSRAKPKGDLVPSSLERQDCMEAHDAVVAPIHHVPPCILGWIHPMMRAEDDLQNAIMVTVTIISDWALYQRDANGKARNLVKSREIGSKKFGSGDSNLHGVQAGAPDEQAALGKNSSLCGYNSPNCPGLSDP

SEQ ID NO: 58391 - protein, 122 aa, Zea mays
  Coding DNA Sequence Number=SeqID_16612
MALEAGSSGCGGRGWGGGFQSLMRRKQDSGGRLQKHVLLKRDNGDVETFNRYLKLRLQILNDATIDHSCNLEEMLQYANMVLKRKPEKIENDILFNVVRRDTLLGSTSGIESQGYPGEPDRC

SEQ ID NO: 58392 - protein, 127 aa, Zea mays
  Coding DNA Sequence Number=SeqID_16613
MGMNLAYEHTERTDRIHGGTLALRSQLGRFEHRTLQIKGTGGTSETRAARCSQELPSDQLNLEWVITRVVHAVSSSCSDQTKTVKTKRTPGQGKDQRGWILELAARIAMNTRCSRGSHRKIHAGVAG

SEQ ID NO: 58393 - protein, 103 aa, Zea mays
  Coding DNA Sequence Number=SeqID_16614
MAQPPTKDEEHVPQDDCMDQGRRMNKKTRKKKKKYHMHLQLQLAPPYKETIQWTKSLTACSVHDTWVVQLLTRYHIEGNDSPLLPHYQEKGYYLSMLHGLPPS

SEQ ID NO: 58394 - protein, 381 aa, Zea mays
  Coding DNA Sequence Number=SeqID_16615
  Gene Ontology: Mol. function=DNA binding; Cellular component=nucleus; Biological process=regulation of transcription
  Homolog annotation: Hit_ID=Q6Z538; Match level="QueryCoverage=98%, HitCoverage=99%, E-value=1e-139, Identity=65%"; Hit description =Putative NAC domain protein
  Pfam annotation: Domain name=NAM; Domain location=17-145; Score =292.9; E_value=6e-85; Accession=PF02365.6; Description=No apical meristem (NAM) protein
MEGERNDINVQRSDEILMPGFRFHPTDEELVSFYLRRKIQQKPISIELIRQLDIYKYDPWDLPKLASTGEKEWYFYCPRDRKYRNSVRPNRVTAAGFWKATGTDRPIYSSEGTKCVGLKKSLVFYRGRAARGMKTDWMMHEFRLPSLTDPKRPVDKTIPLNDSWTICRIFKKTSSMAQRALSHTWGPPLPGATAEADMFAALQSVQASELALERSLSLQAAPPAPAAGQFTSTHGLHSQHHHQQQKGVNNPSLDGASCRLINFTSSPSEEPENFPITFPFEVQAPHRAAAPVFFGAHPDNRLGGFVVDSSADVSGCIGGRSQDSSTGKPSSGFSANSSDWETAGRINFPFDLGADSSEEWRCSIPWESFLSPAAVQAELPR

SEQ ID NO: 58395 - protein, 113 aa, Zea mays
  Coding DNA Sequence Number=SeqID_16616
  Homolog annotation: Hit_ID=Q7G6W1; Match level="QueryCoverage=46%, HitCoverage=6%, E-value=3e-11, Identity=60%"; Hit description =Putative receptor-like protein kinase
MYLTTLVLDDRDVNVSVQVLSKPEDSAHAGARVPPCRWAPAILVREAEADDQGLLRRGGGAACIGQACCRENDSSSEQQLVVKNLWPAIRRHGRRHHALQIEMGFALPKQQGN

SEQ ID NO: 58396 - protein, 173 aa, Zea mays
  Coding DNA Sequence Number=SeqID_16617
MVSNDDHLCLRTPTSNSCHPMHHPVLDGKGLDPSDPAHAPITNWPLITGASKLHVRRHPSFSIPSSTQSLTPSVLSLLRIKVDTEIGMAERPKQPPQPSFIPRGLQRIRAQHNRILFTACAICGGDRVDQYDPRGGVSTTAHGCQMSDRPCGPTCQYPTLAPAIWAERVLGGT

SEQ ID NO: 58397 - protein, 135 aa, Zea mays
  Coding DNA Sequence Number=SeqID_16618
MTYFLRPGVGPAHACPTSPVDRLKRSCSHVDPGLHPADLLELWVMPTLRAQPRRRRPPSARSRDAPGARSLRAQRAAAPLAPAASHAPPAPSRSAARSLLQRRLLTAPSRAPAAAPAPLTPPAPSSAARSARSLP

SEQ ID NO: 58398 - protein, 276 aa, Zea mays
  Coding DNA Sequence Number=SeqID_16619
MASSPELAWRTGHYPVHHRTLSVHHQTVRQHAIGRQIIGVDEHVVDTTWIDDEEQDSWDLTSWAEQRANPTLHRRQRDSSETLCLYRSTAWTSRHDTKGRGDCSSVVRRLELDAGSPDRRARLRMGSTVGRSHEGDRREQEENTRRERAAQGRGLRWASSTGAPESELEGEHHGNHGSSALQNSSRGQGGWARRSTNGADKSEGERSKEGAEGGRLFTASRGRARHIEEEERSALLPGAGSEIRSQSLGEIQRPTSKQEQEPTSYGGLGEEACARR

SEQ ID NO: 58399 - protein, 54 aa, Zea mays
  Coding DNA Sequence Number=SeqID_16620
MAPKYPRHTLAKFDMILLDFGLGFQLGDRPNFTSSYLANPRSNPLEHCMGNKGY

SEQ ID NO: 58400 - protein, 245 aa, Zea mays
  Coding DNA Sequence Number=SeqID_16621
MTQRETTATPRQLHGRGADAGRCDCSSVTRILELDANGPDRRAWLRAGSTVGRSHEGDRHEQEENAGRERAAQGRGLGWASSTGAPESELEGEHHGKQGSSALQNSSRGQGGWARRSTSGADKSEGEREKQGGSRGRSRSRNGAPGVENDGGELGCLQRAEEGRDTLKKRSGRRCCQEPEARSVAKALGRFSVQQASRSWNQQATVVWGRSLRAEIRQWGGKYRREERPGVGLGKKNRNRGTEPK

SEQ ID NO: 58401 - protein, 211 aa, Zea mays
  Coding DNA Sequence Number=SeqID_16622
  Gene Ontology: Mol. function=calcium ion binding; Cellular component =endoplasmic reticulum; Biological process=protein folding
  Homolog annotation: Hit_ID=Q41798; Match level="QueryCoverage=67%, HitCoverage=33%, E-value=2e-78, Identity=94%"; Hit description =Calnexin
  Pfam annotation: Domain name=Calreticulin; Domain location=1-204; Score=88.5; E_value=2e-23; Accession=PF00262.8; Description =Calreticulin family
MVVAKQPQPEDLLAAIAMSQRYTVLFEVRLQNGLECTCAYIKYIRPHDAGWDVKEFDNETPYTIMFGLDKCGSTNKVHFILKHKNPKTGKYVEHHLKFPPFVPYDKLSHVYTAILKPDNEVRILVDGEEKKKANFLSADDFEPPLIPSKTIPDPDDKKLEDWDERAKIPDPDAVKPDDWDERAKIPEHHFVTIQTNTNLSYFMKYKFWLSQ

SEQ ID NO: 58402 - protein, 310 aa, Zea mays
  Coding DNA Sequence Number=SeqID_16623
  Gene Ontology: Mol. function=hydrolase activity, acting on ester bonds; Cellular component=cellular_component; Biological process =lipid metabolic process
  Homolog annotation: Hit_ID=Q2R3H2; Match level="QueryCoverage=99%, HitCoverage=77%, E-value=1e-118, Identity=70%"; Hit description=GDSL- like Lipase/Acylhydrolase family protein, expressed
  Pfam annotation: Domain name=Lipase_GDSL; Domain location=1-292; Score=72.6; E_value=1.3e-18; Accession=PF00657.12; Description=GDSL -like LipaseAcylhydrolase
MALNLSLVSPYLDKGADFASGANFAVAGATALDRAVLLQSGIMAPPASVPLSSQLDWFKAHLNATACPSLQGAAVLLIDMELLADCAKKLAGALFLVGEIGGNDYNYGFLQGFRSIEAMKAYVPQVINAIMDVAKEVIELGATQIVIPGNFPIGCSPSYLSLFAASGDLDDRGCLRSYNAFAQHHNEQLQAAIDGLRKANTDVTVVYADYYGAFMHLLDHASLLELKHSLVPGFEQGALLQACCGAGGAYNFNMNSMCGAPGTTTCADPARNVSWDGIHLTQQAYRAIALSLLMEGFAQPDDAVQEIWSC

SEQ ID NO: 58403 - protein, 440 aa, Zea mays
  Coding DNA Sequence Number=SeqID_16624
  Gene Ontology: Mol. function=transferase activity; Biological process= paclitaxel biosynthetic process
  Homolog annotation: Hit_ID=Q8S7Z5; Match level="QueryCoverage=92%, HitCoverage=94%, E-value=6e-71, Identity=38%"; Hit description =Putative 10-deacetylbaccatin III-10-O-acetyl transferase
  Pfam annotation: Domain name=Transferase; Domain location=3-427; Score=152.5; E_value=1.1e-42; Accession=PF02458.6; Description =Transferase family
MGIVVRKSSPVVVRPSEPVETTSTMPLSSFDEGLERVPATLLLMFEHPIHDPADTVKRALSRALVYYHPFAGRIAAGAGADADGGKLHIRCNGEGATFVSAHASCGVAEVIGLDRSAAARTLLDDLAVYYPDNCCRAGDPLLLVQVTEFSCGGFVLGATVNHAVADAAGLAQFLNAIGELARGMASPSVAPVRWDGSLPSRPPPVVSTRELVTDLGLLDDYACFDITVPSRSINRIKAQYARRFDGARPCTSFEVASAVLWRCRTRAVMSDPETPALFMFGGNVRKYVGAMEGYYGNCATSQLVFATSGVVANGDIVDLVKMIKQSKEKIPDQFEKNQGTNNYPPKPMHHQLLRYNMLVVSSLRNLGFEEVDFGSGTAARLANYAQEKVPFPACLMSPHKGKDGVNMLTTMVKKEHVDSFIAELARFTEYYEYYSTHSKL

SEQ ID NO: 58404 - protein, 85 aa, Zea mays
  Coding DNA Sequence Number=SeqID_16625
MVHRNEFCISPQAAGQFAPCTMCPVADHHMIFPLSGRLINTMMTKVNHTGKVYHMRAKRQMAQSLGQIAKFKRRYEQEAVESKDK

SEQ ID NO: 58405 - protein, 150 aa, Zea mays
  Coding DNA Sequence Number=SeqID_16626
MARFADPAVVYHHREPTIPAAPNVLTARSEPSVYHPVVIHRDPRHVHPMVTWCAAGVLRLVDRLILVVDTIYTPPGRIPGAKGSNLANKKTKKWVQQREQGITEGCPEALRYNSPDCLVHHQTVSGALGESDSELASFGFPLRYNSPDMS

SEQ ID NO: 58406 - protein, 174 aa, Zea mays
  Coding DNA Sequence Number=SeqID_16627
  Homolog annotation: Hit_ID=Q69L90; Match level="QueryCoverage=22%, HitCoverage=13%, E-value=5e-14, Identity=89%"; Hit description=C2H2 -type zinc finger protein-like protein
  Pfam annotation: Domain name=zf-C2H2; Domain location=29-51; Score =21.4; E_value=0.0033; Accession=PF00096.16; Description=Zinc finger, C2H2 type
  Subcellular localization annotation: CTP_CleavageSite=40; ConfidenceScore=5.05e-01
MDERESRKKQQLSSWMSSCGFTAWPPRSYPCSFCRREFRSAQALGGHMNVHRRDRARLTHGSPPPPPPPPPPSRAPPAMIPNLNYPPPSSSSSTNKKLLDAPSSIEMELELELGVGVACSSDCNTAGAATCCTTTSTTPAAAGGGPEDDRALDLELRLGSVSSPSFHHTRAYDP

SEQ ID NO: 58407 - protein, 158 aa, Zea mays
  Coding DNA Sequence Number=SeqID_16628
MGTNGHLDLDMGGPYDFKLATFGFQKSRSAIIHRTVQCATGLSESEQPPEGAPDSEQYLSEFWRCTVEAYLGLDRDCGDLVLPEFLTRAGKHRRLPHAMDGNPRDIRTGKTTPVEFSVSRTTCTSLQVGLGRRIVAGEKSPARLRLERKGSLGASIDF

SEQ ID NO: 58408 - protein, 299 aa, Zea mays
  Coding DNA Sequence Number=SeqID_16629
MVTRAGEGCLKGKDVVVATRKRKVEVMTLPDLRQSSSRMLKVIEVVPMAVARRVPSPSRADEVVGVKGAETGEADEELSVDDYMIEDVGMFDTKMGLRLAKRDGSGKMVAAVFAEQVASWVLVNVATSQLRFKRKRLEDKIERLRMLHTEAVRDKSRPRTRAQAAQKRSTELELEVKNMRAYHERVDAIMRVGVDRLHTLFVDAYQDLGTEMAPFDKSGGEVEDDVLKRSVGALYDRMWGPHGRGVIWERASRALAQAMRVEVIEDLAGLESSMATQDAGMEAGIKEQSSPREGWWYRP

SEQ ID NO: 58409 - protein, 76 aa, Zea mays
  Coding DNA Sequence Number=SeqID_16630
MVALAKFVWVVTSYDRELLVEVFAKNYCLHWQKKVIGGKVAQFGTCTFTPRTGKTSGEVVETTVRCRKRTEDFEST

SEQ ID NO: 58410 - protein, 178 aa, Zea mays
  Coding DNA Sequence Number=SeqID_16631
MAGLMQRPAGYYGPFGGQWAGETGQEARKASRLPGDKSGYGGVWCGIAEKFLKHVKQLMMSKEEFPGNHHTPSTSRWFQSTTELSESSEWAPANDEIKVIVVLKDIAIHCGEDITERGSRCFGRKVDSEDDEEYTRYAGSEAPFTRGEGQWLFTELPIQGAWPSLRVGVQVTQKFLVE

SEQ ID NO: 58411 - protein, 465 aa, Zea mays
  Coding DNA Sequence Number=SeqID_16632
  Gene Ontology: Mol. function=catalytic activity; Cellular component =cytoplasm; Biological process=protein transport
  Homolog annotation: Hit_ID=Q5ZDX5; Match level="QueryCoverage=71%, HitCoverage=66%, E-value=1e-101, Identity=54%"; Hit description =Ubiquitin-activating enzyme E1-like
  Pfam annotation: Domain name=Abhydrolase_3; Domain location=333-464; Score=-41.9; E_value=5.7e-05; Accession=PF07859.3; Description =alphabeta hydrolase fold
  Pfam annotation: Domain name=ThiF; Domain location=183-305; Score =41.5; E_value=1.1e-09; Accession=PF00899.11; Description=ThiF family
  Pfam module annotation: Pfam domain module=Abhydrolase_3::ThiF; Domain location=333-464::183-305
MKEVESIQLEIPMPGHPVSSSKMASVLDDCKHLQTLVAANDAIFLLTDTWESRWLPTLLCSSENKPISYETLPGLTSVASGKAVELFARMLHHPDEIRAPGDTAGTETEHQLGLLPHQLRGSLPKCDLFVELNNSSVNCTACSVAAINYPAYLKDFTGISDSKRPDTCPKIPPNISVNSDKISDVRCLLLGAGTLGCDVARILMDCGVRKITVVDSGHVVVSNLARQSLYTSDDRGAPKATAILRHLVERCPSVDAQGIKMEIPMPGHPVSPGEAAALGYDSYLVMRHGAGPGISCEASSVVTAIDKMSTEDALGRQRLGCYFCNDVIAPVDLVYFHGRGVCLGTIHACCLCVATELPAVVLSADYRLAPKHRLPEAIDDKSAPPDCARVFVSGANVAHHVAMRCGSDRYQPALAPTLHVAGRVLLTPFFGGAERTTTESEPPAGVLPTSSGVRRCRWARATTRR

SEQ ID NO: 58412 - protein, 85 aa, Zea mays
  Coding DNA Sequence Number=SeqID_16633
  Subcellular localization annotation: CTP_CleavageSite=61; ConfidenceScore=5.18e-01
MAVMGSTSEKMYLYQVPNFGIVNDKGTFNWSHASSWVSFVSGRPIPERPTRNGSGEMARVACTLRGKMLDGSVSVLSVGVNPVWS

SEQ ID NO: 58413 - protein, 192 aa, Zea mays
  Coding DNA Sequence Number=SeqID_16634
MKEESAAAGREKSAADLRAVGPRLVPLGICEQLPHASRNPRAAGPCLELGFRVRSNILLASSWSHALLRRTSSAVACFFDGAIALPRVRRTLLCPVASRGGGLTAPRLAPAPRPLRPPWPRRARRPAPCPPLLVPPPRRARPPAALPSPRARAPGEHSPRRGSSLPGLGEPCPRRAPCPPCEPLPGVPHPLP

SEQ ID NO: 58414 - protein, 232 aa, Zea mays
  Coding DNA Sequence Number=SeqID_16635
  Homolog annotation: Hit_ID=Q8SA97; Match level="QueryCoverage=23%, HitCoverage=10%, E-value=2e-08, Identity=62%"; Hit description =Ornithine carbamoyltransferase
MEETAWGMPSLLLLAWRLEAKEGCTLENRHFAAPLTGLTEGERRLRRSDCCAARQSEADRQSDPTSGTIGNSAPPDPGLGLGLSPGRRRTPLRPTQGSDSGPAPEDDELRTARPRARTWAQPRKTTNSAPPDPGLGLGLSPRRRRTPLRPTQGSDSGSAPEDDELRFARPRARTWAQPQKTMNSASPDPRARTQPWPQPTVSASPDPGARTQPRPRKTDSTSTSEEPPHRPT

SEQ ID NO: 58415 - protein, 85 aa, Zea mays
  Coding DNA Sequence Number=SeqID_16636
MAGPFHRWRLGRNLATQLGREQGARAAPELEQASLKETSALEEGVAVRTPASSKSAMDELGQRGQGHDAKRSARQGEGRGSRGAR

SEQ ID NO: 58416 - protein, 82 aa, Zea mays
  Coding DNA Sequence Number=SeqID_16637
MAGPFHRWRLGRNLATQLGREQGARAAPELEQASLKETSALEEGVAGKKKLRCWRPEAAERLGGRSGRSRDRGELREEFGWG

SEQ ID NO: 58417 - protein, 83 aa, Zea mays
  Coding DNA Sequence Number=SeqID_16638
MARVACTLRGKRLDGGVSVLSVGVNPVWLRVTLIVIGVNRRWAPSYKSNLYFLLGVYRPTDTIIDILSKYVVGRGAGSKDQIA

SEQ ID NO: 58418 - protein, 141 aa, Zea mays
  Coding DNA Sequence Number=SeqID_16639
  Gene Ontology: Mol. function=transporter activity; Cellular component= outer membrane-bounded periplasmic space; Biological process=transport
MNLSHRVARIGDFLAGVPGDGWSRCVLSRWLSGVRNTPSRRLSERQEEEQERALGALRVVVFRGSFPPSWIKDFVKVQGMRLKFSTKLHANLVGIFSEMSQCMDKGQVQPKSAMVADVVSLGDSWLRYAISKGLLEPVRNA

SEQ ID NO: 58419 - protein, 447 aa, Zea mays
  Coding DNA Sequence Number=SeqID_16640
  Homolog annotation: Hit_ID=Q1SGM9; Match level="QueryCoverage=35%, HitCoverage=45%, E-value=9e-41, Identity=51%"; Hit description =Protein phosphatase 2C-like
  Pfam annotation: Domain name=PP2C; Domain location=169-382; Score= -62.0; E_value=0.024; Accession=PF00481.12; Description=Protein phosphatase 2C
MRKTSKVDPKRGLLRMDRVDVGLMIEDLLTGHMPHHGRASAHPSCFLHHPSRLLSPFFLLDLLFPSHGAKLQLGRPEAGHLFFVVVELAQVDSTGRHGSVRGGNVLARSITTMEATKAAESSELLLNKSSCLDTKTAYLTPPPFLRVPRLDPIGDGSRGRGMSSSSASSSAAAHHQQHYRRQTGGSGLVPLAALIKEEARTERQSIAGGESRISARDDDAAGVGSSGVGGEAAEAAVESRLERPLLRYGCAAQCKKGEDFFLLRTDCLRPAISVSSSASPHPIFAVFAGGAVSLLTVDHRLEENVEERERVTASGGEVGRLSVVGGAELSNAGGRLIIASDGIWDALSSEAAAKSCRGLPAELAAKQVVKEALRTRGLKDDTTCIVVDIIPPGQTIRPLSPPKKTSKLKSFIFRKKAKDPSQKLTKQHSAVGIVEEIFEEGSAMLSE

SEQ ID NO: 58420 - protein, 145 aa, Zea mays
  Coding DNA Sequence Number=SeqID_16641
MSSSTERVVFVVAEGAKQRITVKRQAEDWEREQGARAAPELEQAILREMSALEEGATVQTLASSKPAMDELGQRGQGRDAERSARQGEGRGSRGACQGDPRERDGRGMQGKKKLRCWRPEAAERLGGRSGRSRGRGERGEEFGWG

SEQ ID NO: 58421 - protein, 85 aa, Zea mays; identical to SEQ ID NO: 58415
  Coding DNA Sequence Number=SeqID_16642

SEQ ID NO: 58422 - protein, 142 aa, Zea mays
  Coding DNA Sequence Number=SeqID_16643
MGKSKKGGGSSHHSGDKRKREPTPPSEDFGDSEYSEEEFSESEGSPAPASPPTSSDDSDDSQGIAVEVWTYIRAVERAGLEGSDESEYSSDEENSSDSDEEGGGGGGGDGDDDGDGGGDSDKGGDGSGGSKGSSKGSNKASG

SEQ ID NO: 58423 - protein, 434 aa, Zea mays
  Coding DNA Sequence Number=SeqID_16644
  Gene Ontology: Mol. function=hydrolase activity; Cellular component =chloroplast thylakoid membrane; Biological process=aromatic compound metabolic process
  Homolog annotation: Hit_ID=UPI000038DD6B; Match level="QueryCoverage =80%, HitCoverage=92%, E-value=8e-28, Identity=28%"; Hit description =COG0596: Predicted hydrolases or acyltransferases (alpha/beta hydrolase superfamily)
  Pfam annotation: Domain name=Abhydrolase_1; Domain location=134-424; Score=11.1; E_value=0.0011; Accession=PF00561.10; Description =alphabeta hydrolase fold
  Subcellular localization annotation: CTP_CleavageSite=35; ConfidenceScore=5.59e-01
MPPSAAATAAAFLFPAVAIPCRVFPQRRARSLAVRAVASPPAFAVKPAPLPSKWKIPYIRLKNVRMIYLDKKTGKWEWKFENKPVNIYYEEHEQEVAENMKNILMIPTISDVSTVEEWRVVAKDIVGRKGELGYRVTIVDWPGLGYSDRPSLNYNADVMESFLVELMNSPNSPVANADDELIIVGGGHAATIAVRAAENAYKDPLDSLNCDCGNCYDRTGGPTTNNWNQDPDQFGPLKRPVKSGYKELLRNRWRGGVHMRGPELFTCREGNREKRAGMRYGLLRGTLRAPALGWMMYNVLVSNEKSIQSQYKSHVYANPDNVTPAIIESRYELTKRKGARFVPAAFLTGLLDPVQSREEFLQLFAKLDGDVPVLVVSTVNAPKRSKAEMEALRGSKGVTKFVEVAGALLPQEEYPLAVAEELYSFLQESFAARR

SEQ ID NO: 58424 - protein, 197 aa, Zea mays
  Coding DNA Sequence Number=SeqID_16645
MTAATRHDVEVARARDGCTAQRTMRYYARQHRRHDETMQWGTYAGAGLSSMTPRKTEMKNREGKELTGDDGLAGEGLAGVDVCGVARLRCSAALARRRCACRGCRDSKGAAQEMRRAGERIREIVASFLASWKHARVHRGRAVPKTRFLGACSYRVGPGGGRGYGLRTRMVVFPYKGETTLRASKGKGNKKTCRIGA

SEQ ID NO: 58425 - protein, 1092 aa, Zea mays
  Coding DNA Sequence Number=SeqID_16646
  Gene Ontology: Mol. function=structural constituent of ribosome; Cellular component=intracellular; Biological process=translation
  Pfam annotation: Domain name=DUF1666; Domain location=824-1092; Score= 336.6; E_value=4.3e-98; Accession=PF07891.2; Description=Protein of unknown function (DUF1666)
  Pfam annotation: Domain name=SPT2; Domain location=608-706; Score= -28.0; E_value=0.1; Accession=PF08243.2; Description=SPT2 chromatin protein
  Pfam module annotation: Pfam domain module=DUF1666::SPT2; Domain location=824-1092::608-706
  Subcellular localization annotation: CTP_CleavageSite=10; ConfidenceScore=5.42e-01
MDAGGRAGVSGPAAANGSFGLVRTVVGYSTSPLFFWLLTVALVAAIHIVSGSSSKPARNNETEERKKARRDRFLPAAEEREASGRGDDRVLEMMRSFSFMQATEEDFMEGMTAYEHNGVGDGTAHGPVAPEPPALTATSLSFRFQHQMPEVPTETALVSREFTAARQETAVVSRELTAARDDDGRQREEEKEPHFPLEPFAPLQTAADMQEHRHDEAEETEFLAEEPAEERSGEVAQEEAAPPKTVAATHNYQFLTERDFRGFVREPEAVTVRVQESFVPSPPPAHQPEERRVVDVSSRSGRFLTARDFRPANEPDVCESVASSGKWTPPPPRPRPKPKPKPASSPSAASMGGGGGFTSEFSGFGDSDSESSASDGYSVKDLVVDSDSDWFLSEKEFPASALGSGNLKTYKAKVLRAIEAMEAASNLEPSYQEDSATTVSPSSVRQRSPDTVPDEKGIITLNDHSGGQAASDAQRSPEAVSARQLAAVPSDQVAGPVKRSPEPPEQEFVGMVDHSLEHSSYDRKQTASESDQSYEIVFDDKRRPQRAETGFLGTSSPSHELVSEVWEEIVTRNDQPPLGPHADEQGLDTAEEEYVGTGDQPHGAVSDEKSGAETPEQEFSLTDHRNVAVPDARNISETREDEEQASADDHSDNAVTGKAKVYDEDGEDREARWKDLTDEEEDELESLWEHQDLVEQLKLELKKVRSSVGLPTILEESDTPKAPVEDLKPWSMDAKFLREDPMDELNKFYKSYRERMRKLDILCYQKMYAIDFLQLRGSQQSNNNNNNSVKSLSPTVASILSHNFRSSRRRSPEDPSERFLRELRYDLETVYVGQMCLSWEFLRWQYEQARDLPESDSYHSHQYNQVAGEFQQFQVVVQRFVEDESFKGPRLSNYINNRCVLRNLLQVPVIKDALTVAMHALPGCCVEDSLKDRMEDQRKGNYVITSEELEDVMEEAMHVLWEFIKADRAETTTTAAAASVLKGLSSSNVELQDPLDHGLMAHIHSALQKKEKRLKDLLRTGNCIAKKFKKPKEDRSNQNLFFSQVDMKLVARVLRMPRITSEQLQWCRAKLDKIVLVDRKIHREASFLLFPC

SEQ ID NO: 58426 - protein, 122 aa, Zea mays
  Coding DNA Sequence Number=SeqID_16647
MRYCARQHRRHDETTQRGTYAGAGLSSMTLRKTEMKNREGKELTGDDGLAGEGLAGVDVCGVARLRCSAALARRRCACRGCRDSKGAAQEMRRAGERIRETDASFLASWKHECIAGGRFLRG

SEQ ID NO: 58427 - protein, 88 aa, Zea mays
  Coding DNA Sequence Number=SeqID_16648
MGRSENQGTSGSASYDGTEHDFAPTSDRNDVRFRHGGDGGRKAMRIRSGEARTEGTVLRFDAVAADTWLKHRNHGLFTRPKESSDIDV

SEQ ID NO: 58428 - protein, 111 aa, Zea mays
  Coding DNA Sequence Number=SeqID_16649
  Subcellular localization annotation: CTP_CleavageSite=57; ConfidenceScore=5.47e-01
MSQARGGGHHTHPRAGSMPPERHLGLSSFLPEPSPPPSSVKDSTNRSTVGTQGSSSLAAKGVADGSGSAPVPTQQLQPDGNDITTPNQGAAPGGITTLDDDDDDDDDDDDR

SEQ ID NO: 58429 - protein, 603 aa, Zea mays
  Coding DNA Sequence Number=SeqID_16650
  Gene Ontology: Mol. function=binding; Cellular component =intracellular; Biological process=metabolic process
  Homolog annotation: Hit_ID=Q9LRV2; Match level="QueryCoverage=95%, HitCoverage=87%, E-value=1e-136, Identity=32%"; Hit description =Selenium-binding protein-like
  Pfam annotation: Domain name=PPR; Domain location=108-142; Score =31.5; E_value=2.9e-06; Accession=PF01535.11; Description=PPR repeat
  Pfam annotation: Domain name=PPR; Domain location=178-212; Score =14.7; E_value=0.13; Accession=PF01535.11; Description=PPR repeat
  Pfam annotation: Domain name=PPR; Domain location=240-274; Score =30.8; E_value=4.9e-06; Accession=PF01535.11; Description=PPR repeat
  Pfam annotation: Domain name=PPR; Domain location=343-376; Score =23.3; E_value=0.00087; Accession=PF01535.11; Description=PPR repeat
  Pfam annotation: Domain name=PPR; Domain location=377-411; Score=3.0; E_value=3.3; Accession=PF01535.11; Description=PPR repeat
  Pfam annotation: Domain name=PPR; Domain location=42-76; Score=2.8; E_ value=3.5; Accession=PF01535.11; Description=PPR repeat
  Pfam annotation: Domain name=PPR; Domain location=443-477; Score =33.8; E_value=5.9e-07; Accession=PF01535.11; Description=PPR repeat
  Pfam annotation: Domain name=PPR; Domain location=514-548; Score=2.3; E_value=4; Accession=PF01535.11; Description=PPR repeat
  Pfam annotation: Domain name=PPR; Domain location=7-41; Score=31.4; E_ value=3.2e-06; Accession=PF01535.11; Description=PPR repeat
  Pfam module annotation: Pfam domain module=PPR::PPR::PPR::PPR::PPR::PP R::PPR::PPR::PPR; Domain location=108-142::178-212::240-274::343 -376::377-411::42-76::443-477::514-548::7-41
MPRRDGGSWNAIISASSRAGHPAEAFSLFADMNSLGIRPKDVTLASVLACCAECLDLRGAQQLHGLIAKRDFQSNVILGTALVDVYGKCLSLTDVRRAFDDILQPNDVSWNIIIRRYRLAGMGDMALHMFFMMVRAGVRPLVYTVAHAMLACRDNCALKEGKCIHSFVLRRGYDHHIHARSSVVDMYAKCGDIDAAQRLFNLAPKKDVVMSTSVVSGLAACGRIADAKMVFDGMEQHNLVSWNAMLTGYVKSMDLTGALDLFQQMRHETKELDVVTLASVLNACTGLLDLGKGEELHALALKCGLFSCPFFRNALVRLYSKCGCLRTAKRLLLFEMGSERDRYAWNSIISGYERHSMSEDALHALREMQSEAKPSQSTFSSALAACANIFLLKHGKQIHAYMIRNRYDIDDILRSALVDMYSKCRLFDYSTRIFELGSSDDVILWNSMIFACAYHSKGDYGLGLLDEMRKQGVRPDSVTFLGALVSCICEGHVGLGRSYFTLMIDEYSIVPRIEHYECMIELLGKHGYMVELEDFVDHMPFEPTTAMWLRIFDCCREYGNRKLGQRAAQRINDSKPLTPVIFVESAPVYECSDCDDAEPMSFC

SEQ ID NO: 58430 - protein, 240 aa, Zea mays
  Coding DNA Sequence Number=SeqID_16651
  Gene Ontology: Mol. function=kinase activity; Cellular component =ornithine carbamoyltransferase complex; Biological process=amino acid metabolic process
  Homolog annotation: Hit_ID=Q6QP54; Match level="QueryCoverage=82%, HitCoverage=37%, E-value=2e-20, Identity=63%"; Hit description =Putative kinase
MVPPVDVVGPCPRLSEVEAPPRSRSSLSSKAEVESEPLGRARRRPSADARAESEPWGRAKRSSSSFGAEPESEPWGRAKRSSSSSGAEPESEPWGRAKRSSSSSGAEPESEPWGRAKQSSLSSGAEPESEPWGRAKRSSSSFGAEPESEPWGQAKRSSSSSGAEPESEPWGRAKQSSLSSGAEPNSRSGAGGAVLLSDWSVERRSDYGHFGSINWRPRVRIKLRADGGYQLRFRSLEGYP

SEQ ID NO: 58431 - protein, 392 aa, Zea mays
  Coding DNA Sequence Number=SeqID_16652
  Gene Ontology: Mol. function=hydrolase activity, hydrolyzing O -glycosyl compounds; Cellular component=cellulose and pectin -containing cell wall; Biological process=carbohydrate metabolic process
  Homolog annotation: Hit_ID=Q5N863; Match level="QueryCoverage=93%, HitCoverage=69%, E-value=1e-154, Identity=73%"; Hit description =Putative latex cyanogenic beta glucosidase
  Pfam annotation: Domain name=Glyco_hydro_1; Domain location=11-391; Score=239.2; E_value=8.8e-69; Accession=PF00232.9; Description =Glycosyl hydrolase family 1
MGSTGREPEVTRADFPDGFVFGVATSAYQLSLEGVELIQLGLDGLRFIIDKFSPYNFSHYSARFGRTKVYRANTGRQVNGDAQLGEHVLDRSNGEIAVDHYHRYKEDIELMASLGFSAYRFSISWARIFPDGLGGNVNDQGVAFYNDLINFMISKGIEPYATLYHWDLPNNLQKTLGGWISDKIVEYFALYAEACFANFGDRVKHWITINEPLQTAINGYGIGIFAPGGCQGETARCYLAAHHQILAHAAAVDVYRRKFKVAQGGEVGLVVDCEWAEPFSENVEDQIAAQRRLDFQLGWYLDPIYFGDYPESMRQRLGSDLPTFSEKDKEFMRNKIDFVGVNHYTSRLIAHLQNPNDVYFYQVQQMERIGMIPEVFKSVSSGVGSEKRRAIW

SEQ ID NO: 58432 - protein, 197 aa, Zea mays
  Coding DNA Sequence Number=SeqID_16653
MPPCDVVGPSRRSGEAEAPPRSSPSSEVEAESEPWGRARRSPSSSVEVEPEPWGRARRRPSSEAEAVSEPWGRARRSPSSSVEVEPEPWGSGEAETVFPRPRLCLSPRVGRGRVRRPASRLSPSPGVGRGGASYGAPRLDLAAVSLTLSSGTAVGATQATLFSCQLCADGGYQLRLGVLGVPLIMVPDSSPKPRREC

SEQ ID NO: 58433 - protein, 34 aa, Zea mays
  Coding DNA Sequence Number=SeqID_16654
QQRRSQSLGMCSGSTIGHRYTSPPHMLSLDATSI

SEQ ID NO: 58434 - protein, 569 aa, Zea mays
  Coding DNA Sequence Number=SeqID_16655
  Gene Ontology: Mol. function=protein serine/threonine kinase activity; Cellular component=mitochondrion; Biological process =protein amino acid phosphorylation
  Homolog annotation: Hit_ID=Q6ZD67; Match level="QueryCoverage=63%, HitCoverage=80%, E-value=6e-30, Identity=23%"; Hit description =Putative PPR protein
  Pfam annotation: Domain name=PPR; Domain location=187-221; Score =15.3; E_value=0.11; Accession=PF01535.11; Description=PPR repeat
  Pfam annotation: Domain name=PPR; Domain location=222-256; Score=8.8; E_value=0.68; Accession=PF01535.11; Description=PPR repeat
  Pfam annotation: Domain name=PPR; Domain location=328-362; Score=9.7; E_value=0.53; Accession=PF01535.11; Description=PPR repeat
  Pfam annotation: Domain name=PPR; Domain location=369-403; Score =24.8; E_value=0.00031; Accession=PF01535.11; Description=PPR repeat
  Pfam annotation: Domain name=PPR; Domain location=404-438; Score =34.2; E_value=4.7e-07; Accession=PF01535.11; Description=PPR repeat
  Pfam annotation: Domain name=PPR; Domain location=439-473; Score =33.6; E_value=6.9e-07; Accession=PF01535.11; Description=PPR repeat
  Pfam annotation: Domain name=PPR; Domain location=474-508; Score =48.9; E_value=1.8e-11; Accession=PF01535.11; Description=PPR repeat
  Pfam module annotation: Pfam domain module=PPR::PPR::PPR::PPR::PPR::PP R::PPR; Domain location=187-221::222-256::328-362::369-403::404 -438::439-473::474-508
  Subcellular localization annotation: CTP_CleavageSite=54; ConfidenceScore=5.53e-01
MMWRSRARALLLLRSTITRPPPPPPQPYPTRTLTRVPPPRFLSSSPDPIPDSSSAAAADPFPEAFSSPTKASQDAAEAGEDNLSSMWEEAGHADDIFASPGSADAVADDEEVARVCAAVESTPEDEIASTLADMTVDFNEPLLAAVLLAAEQCSCKKLISLFNYAAKNNPASKSLSNLEGSRSVSTPLLNEMIAIFWKVEKSKAALEVFSKFDEFGCTPDSDSYYLVIEAARKKSLFRSACEVCEKMIGSACFPNGEKVGRILIYLCEGKKVKMAHSLYLAVKEKKIPVPKLALDFLVGALARNDETIGTALELLEEYQGESLKHAGKSFATVVHALCRLNKMEDANNLLMRMVQLEEYKGESLKNAGKTFATVIHGLCRKKKLEDAKALLMRMVNVGPAPGNAVFNFVITALSKQGEMEDAKGLMRMMESQGISPDIYTYSVLMSGYAKGGMIDEAHDLLREAKKIHPKLNRVAYHILIRGYCKMEDFEKANECLKEMKKDGLQPNVDEYDKLIQSLCLKAMDWRRAEKLLEEMEDSGLCLRGISRSLITAVKELEGEEMQSKASQEA

SEQ ID NO: 58435 - protein, 250 aa, Zea mays
  Coding DNA Sequence Number=SeqID_16656
MVTMVSAHKSLSLLMGTMCGHNGEWDLTNRIHSTPEYGATANHDVPFYCISGHSHFVQDIVLHFDGESPLATGPIGQLEEMDNVKPGRTCPYSNPVAPSPRSLDFPFNSEGEAIRAPEARPPPKSFNATARASVFASYMELSASYDAETSSYYGGSSSGFGAFLPQLCHAPAVIAAIVAHGHLPTSDVLEFVGMADGGGDIIFDALCMDSNSNLSPSGNDNEELTGDEEDEGLSVAAALSTTPTGWGSTH

SEQ ID NO: 58436 - protein, 146 aa, Zea mays
  Coding DNA Sequence Number=SeqID_16657
  Subcellular localization annotation: CTP_CleavageSite=45; ConfidenceScore=5.16e-01
MASCGQRWNGPFREQLRCSPWRFVTGAVTIRVTGNQANPTALTFRSSARQPASATDGGAIHPVLRSYVPSVAGMNYPKIELSMKSVWCAAGVYADWFDTPILKNPDRDELREARCVVERETSQRDEALKSFSISQDLSQGQSKRAS

SEQ ID NO: 58437 - protein, 214 aa, Zea mays
  Coding DNA Sequence Number=SeqID_16658
MTKFYTKLEEKRKALEEEKLQAEARKWCFKIPRTQDCVIIYGSWRTTVGEWRDPRTQTQRGKGESLLGVGAEHGICGGSGVSEIPAWRDLRDPRPVESEAGRWEWGRLLDAIRGCALGVGRDPRRRAGRGRGCALGVGRDRRFSCWSWARLQAGSGVDTHELLLTASGILAAGGCRAAAEGAALRRVLGRQDKRKKRKHILRGYLSLLMACSVR

SEQ ID NO: 58438 - protein, 307 aa, Zea mays
  Coding DNA Sequence Number=SeqID_16659
  Gene Ontology: Mol. function=DNA binding; Cellular component=nucleus
  Homolog annotation: Hit_ID=Q9LGH0; Match level="QueryCoverage=81%, HitCoverage=80%, E-value=2e-27, Identity=26%"; Hit description=NAM -like protein-like
MENYNYGQPSQAPGDYVPCTYTEGIDLTEIDDEGNMNFAFTKSMNMEDSQHSTPTATDPKLKKVTTWRLGNYTQAEDEILVSAYVNVSKDPAIGTNQSGKAYWRRISDYYNEHKKTANARTQHSLEHRWSDIQRDTTKFCAAYDKVIRLKQSGKSEDDQVKDALQMFEGMHKKQFRFMHCWYMLRREAKQGEDKFGSPSNTFVRPMGRDRAKKARSTSTLSNSTACMALLEKFQEDRAKFEEKATKYEDQATASTEEDRRDMKMYRDRKIQLSENMFKLHQLERDDRIMNMDLDKVAPYARDDESQI

SEQ ID NO: 58439 - protein, 136 aa, Zea mays
  Coding DNA Sequence Number=SeqID_16660
  Subcellular localization annotation: CTP_CleavageSite=40; ConfidenceScore=5.07e-01
MVKACSYGISSISSCSANKFLSTGMWLKFLCAGFLMVHGLAMVRSQGLGILCVGTLDGNLKDPPTHITFRLRIHLNLRRSSWHWWPTRQRHMHGERMTLCEVDRQTHTSMSACVKDPYLGVVLGLVQVAEPSAFAR

SEQ ID NO: 58440 - protein, 93 aa, Zea mays
  Coding DNA Sequence Number=SeqID_16661
  Homolog annotation: Hit_ID=Q852G9; Match level="QueryCoverage=48%, HitCoverage=41%, E-value=9e-09, Identity=64%"; Hit description =Putative root-specific protein
  Subcellular localization annotation: CTP_CleavageSite=52; ConfidenceScore=5.08e-01
MATSTTWQISVDLISGHHCSAAVTACSVYTHITATLLGATLLLLASPAVVVRAQQRGGNPCPTSAVADLKVCADVLVLLKLRINVPQGKERRP

SEQ ID NO: 58441 - protein, 124 aa, Zea mays
  Coding DNA Sequence Number=SeqID_16662
  Gene Ontology: Mol. function=nutrient reservoir activity
  Homolog annotation: Hit_ID=P04704; Match level="QueryCoverage=56%, HitCoverage=29%, E-value=7e-09, Identity=51%"; Hit description=Zein -alpha ZG99 precursor
MESLRNRSTLTSLVVLYQMLINVSITSLTGAKIYATSRLVCFLGGVIVSWKSSTSSVCENPILQPYRIQQAITASILPLSPLFLQQPPALLQQLPLVHLLEQSIKAQQLQQPVLTNLVAYSQQQ

SEQ ID NO: 58442 - protein, 47 aa, Zea mays
  Coding DNA Sequence Number=SeqID_16663
MSCAFDDYYIKSNGCNMDMGDIKVVIEMIITSTKTLEDSLREGQRTE

SEQ ID NO: 58443 - protein, 100 aa, Zea mays
  Coding DNA Sequence Number=SeqID_16664
  Subcellular localization annotation: CTP_CleavageSite=35; ConfidenceScore=5.28e-01
MAAPAAMATSILALLLTPATHTIVPSDLPRRRALRCVALPLLEVVQTRTNTHESTVIHWACGRTAATSSNSLPHSVQDTEAMGSSSVMGSRERIHGDDGK

SEQ ID NO: 58444 - protein, 73 aa, Zea mays
  Coding DNA Sequence Number=SeqID_16665
MLVRTLTPSAADGAALLVPLWGRELLLVAAVRPHAQWITVDSWVLELNVLYLMDILRTAAMLQRIVDSYKIGE

SEQ ID NO: 58445 - protein, 152 aa, Zea mays
  Coding DNA Sequence Number=SeqID_16666
  Subcellular localization annotation: CTP_CleavageSite=49; ConfidenceScore=5.70e-01
GSDSTSTSDDGLRLARPPGSDSTSTSGRRSPPRPTPGLGLNLDLRTTVSASPDSRARTQPRPRRSHHLAPADHATRGGTITLPLASLGYREQDRRPIWLAPVKQVMMAPRVLHDDGGSQPLTEARRHQQGSDNPDSCASTGLKRSSDGHDAT

SEQ ID NO: 58446 - protein, 749 aa, Zea mays
  Coding DNA Sequence Number=SeqID_16667
  Gene Ontology: Mol. function=protein serine/threonine kinase activity; Cellular component=membrane; Biological process=protein amino acid phosphorylation
  Homolog annotation: Hit_ID=Q8LJZ0; Match level="QueryCoverage=99%, HitCoverage=89%, E-value=0.0, Identity=75%"; Hit description =Receptor-like kinase
  Pfam annotation: Domain name=B_lectin; Domain location=74-189; Score =111.8; E_value=1.9e-30; Accession=PF01453.15; Description=D-mannose binding lectin
  Pfam annotation: Domain name=PAN_2; Domain location=349-420; Score =125.2; E_value=1.8e-34; Accession=PF08276.2; Description=PAN-like domain
  Pfam annotation: Domain name=Pkinase; Domain location=538-747; Score =100.5; E_value=4.8e-27; Accession=PF00069.15; Description=Protein kinase domain
  Pfam annotation: Domain name=Pkinase_Tyr; Domain location=538-749; Score=43.5; E_value=3.9e-15; Accession=PF07714.7; Description =Protein tyrosine kinase
  Pfam annotation: Domain name=S_locus_glycop; Domain location=204-332; Score=116.4; E_value=8.2e-32; Accession=PF00954.11; Description=S -locus glycoprotein family
  Pfam module annotation: Pfam domain module=B_lectin::PAN _2::Pkinase::Pkinase_Tyr::S_locus_glycop; Domain location=74-189::349- 420::538-747::538-749::204-332
  Subcellular localization annotation: CTP_CleavageSite=87; ConfidenceScore=5.00e-01
MTRLLCLTALTIFPIILCLTTSAAVTASDTLDSGSNITDGATLVSAGGSFTLGFFSPTGVPTKRYLGIWFTASPEAICWVANRETFLSNTSGGVLVIGSTGSLRLLDGSGRTAWSSVDSTSSSAPPVVAQAQLLESGNLVVRDQSGRDVLWQSFDHPSNTLLAGMRFGKDPRTGAEWFLTSWRASNDPTPGGYRRVLDTRGGLLDSVSWKGSVKKYRTGPWNGLWFSGIPETASYKDMYSTQLVVRPDEIAYVFNTAAGAPFCRLVLNEVGMVQQLGWDPVSRVWNVFTQAPRDVCDNYAKCGAFGLCDVKSGSTLFCSCAVGFSPVNPSQWSMRETRGGCRRNVPLECGNGTTTDGFKMVRAVKLPDTDNATVDMGATLEQCRARCLANCSCVAYAAADIRGGGGGHGCVMWTDAIVDVRYVGKGQDIYLRLAKSELGEHSRRDTYISRMHISAVEKKRNVVIIILPLVTACLLALMGMLLVWIWRKHKLRGKRRSMDDIQHKTIVRHLDETNTLGDENLDLPFFSFGDIVSATNNFAEENMLGEGGFGKVYKGILGEDRVVAIKRLSQGSGQGIDEFRNEVVLIAKLQHRNLVRLLGCCIHGDEKLLVYEYLPNKSLDSFIFDAARKNALDWPTRFRIIKGISRGVLYLHQDSRLTIVHRDLKTSNILLDADMNPKISDFGIARIFGGNQQEANTTRVVGTYGYMSPEYAMDGAFSVMSDTYSLGVILLEIAWSLWNGGRAMDWTNL

SEQ ID NO: 58447 - protein, 356 aa, Zea mays
  Coding DNA Sequence Number=SeqID_16668
  Homolog annotation: Hit_ID=Q84YR7; Match level="QueryCoverage=30%, HitCoverage=5%, E-value=2e-20, Identity=79%"; Hit description =Putative 1,4-beta-D xylan xylanohydrolase
MTAAPVVASSEVDAHLKEAVSRGFLARVYGLKLAYVKVQRAHVSYDSERVKGKKFYMSMAWIRKMNFLQRIHVGKWMLMGINGMKLKQHSSLKSSHPKLLHMFKALLQMLEFFQFMTLVIVSLVVDKNQWVNCGQVDADGDQWYEIKAAFKLEKQPSKVTAYVQGPPAGVDLRVMDFYIYAVRENRQGWSDMGIGLLCGIEKFDASRGFRMSTYVYWCIHQLPYEDMTPFQAAVAIVQKIDWIYMGLTLLVLKEKERAWLAGPVHGPSRDADTKGHSEHERGIKENIQNSFPVVFLVEKRPGEFVGVSRPVPRRRWPRDVTSGIRGFGSSAVRCGHALSTAVLFGGHDFAMLEFLI

SEQ ID NO: 58448 - protein, 648 aa, Zea mays
  Coding DNA Sequence Number=SeqID_16669
  Gene Ontology: Mol. function=translation initiation factor activity; Cellular component=eukaryotic translation initiation factor 3 complex; Biological process=translational initiation
  Homolog annotation: Hit_ID=Q6YNS0; Match level="QueryCoverage=79%, HitCoverage=59%, E-value=0.0, Identity=63%"; Hit description =Putative translation-initiation factor 3 subunit
  Pfam annotation: Domain name=PCI; Domain location=381-511; Score =126.9; E_value=5.7e-35; Accession=PF01399.17; Description=PCI domain
  Pfam annotation: Domain name=eIF-3c_C; Domain location=512-648; Score= 67.0; E_value=6e-17; Accession=PF05469.2; Description=Eukaryotic translation initiation fac
  Pfam annotation: Domain name=eIF-3c_N; Domain location=2-375; Score =288.4; E_value=1.3e-83; Accession=PF05470.3; Description=Eukaryotic translation initiation fac
  Pfam module annotation: Pfam domain module=PCI::eIF-3c_C::eIF-3c_N; Domain location=381-511::512-648::2-375
MKLQMIKMWMMTMLDESDAEIEDPDKIAMSESEEEQDEEDDDKDAQKLEILFHVISAQFDVNPSLLGHMPVNVWKKCVNNMLLVLDILQQYPNIVVDTSFEPDENETQKGADYNGTIHVVGDLVAFLERLDSEFLKTLQCTDPYTKDYVQRLREEPLFLVVAQNVQDYLERVGNFKAAAKVALRRVELVYYKPQEVYDAMRKLAEQPEDCVDDDDAEAGDEHKAVDDNRGPSPFVVIPEAVHRKPTFPESGRTLMDGLMFLIYKYGDERTKARAMLFYSTESWPQLGLCAFRAGLINEAHGCLTELYSTGRVKELLAQGVQQSRYHEKTPEQERLERRRQMPYHMHINLELLEATHLICAMLIEVPNMAASTYDKRRPMSKTFRRLLEVSERQTFVGPPENVRDHVMAATRALNKGDHQKAFSVINSLEIWKLLRNREHVLEMLELKIKEEALRTYLFSYSSSYESLSLNQLTTMFDLSEQHAHSIVSKMMMHEELHASWDQPTKCIVFHSVDQTRLQGLLFQMADKLSVLVEINERAYEARTGGTLEGVPPRRRGEGQDNMGKWQDNFVSSQGRQGGGNRFGYSGRGAISGQSGGGHQRDRGNQGYRGGYGGVSRFQDARGRNQSIPSGRGGDGGARMVNLNRMGRV

SEQ ID NO: 58449 - protein, 495 aa, Zea mays
  Coding DNA Sequence Number=SeqID_16670
  Gene Ontology: Mol. function=protein serine/threonine kinase activity; Cellular component=membrane; Biological process=protein amino acid phosphorylation
  Homolog annotation: Hit_ID=O65470; Match level="QueryCoverage=47%, HitCoverage=37%, E-value=7e-52, Identity=49%"; Hit description =Serine/threonine kinase-like protein
  Pfam annotation: Domain name=Kdo; Domain location=143-332; Score= -77.0; E_value=0.016; Accession=PF06293.4; Description=Lipopolysacchar ide kinase (Kdo)
  Pfam annotation: Domain name=PAN_2; Domain location=1-45; Score=40.4; E_value=6.4e-09; Accession=PF08276.2; Description=PAN-like domain
  Pfam annotation: Domain name=Pkinase; Domain location=145-402; Score =124.1; E_value=4e-34; Accession=PF00069.15; Description=Protein kinase domain
  Pfam annotation: Domain name=Pkinase_Tyr; Domain location=145-402; Score=50.7; E_value=1.4e-15; Accession=PF07714.7; Description =Protein tyrosine kinase
  Pfam module annotation: Pfam domain module=Kdo::PAN_2::Pkinase::Pkinas e_Tyr; Domain location=143-332::1-45::145-402::145-402
MSITVEDCAARCLANCSCLAYAAADIRGGDVRSGCVMWTDDIVDLRYVDKGQDLYLRLARSELPAAAGPSPQRPFRTAPVVGASAAAVAVVLIVLSVVLVIRRRRRPIIPAAQSASPSVPSTELRRPPSVPSVDLSSLRRATNDFSADNVIGRGGFSTVFEGNLADGTKVAVKRLTQSYLTDGGGETFMREVEVMSELKHENLARLLAYCKDGNERILVYEYMENRSLNLCIFARDANQRAVLNWERRLEIIVGVARGVAYLHGLSKVVIHRDLKPSNVLLDGNWRAKIADFGTAKVFVDGQTNPTLVQTEGYRAPEYTARGPSLTLKCDVYSFGVVLIEIVSGQRNSSNQTLVSDARESWSQNKIKENLLDPAVGQPGPEILLRLERYTRSRTAEAILIRFSDSGLGSNIDDMKSTSGLVFFVGMNLVTWVSQKQRVVALSSCEPEYIASANAACQGIWLRHLLSELLGIKPQKVNLLVDNKSAIALSKKSSSS

SEQ ID NO: 58450 - protein, 366 aa, Zea mays
  Coding DNA Sequence Number=SeqID_16671
  Gene Ontology: Mol. function=protein serine/threonine kinase activity; Cellular component=membrane; Biological process=protein amino acid phosphorylation
  Homolog annotation: Hit_ID=Q2QUP5; Match level="QueryCoverage=87%, HitCoverage=72%, E-value=6e-92, Identity=53%"; Hit description=D -mannose binding lectin family protein, expressed
  Pfam annotation: Domain name=B_lectin; Domain location=108-222; Score= 116.1; E_value=1e-31; Accession=PF01453.15; Description=D-mannose binding lectin
  Pfam annotation: Domain name=S_locus_glycop; Domain location=236-364; Score=115.6; E_value=1.5e-31; Accession=PF00954.11; Description=S -locus glycoprotein family
  Pfam module annotation: Pfam domain module=B_lectin::S_locus_glycop; Domain location=108-222::236-364
MSLIRGTYNQDITILTIIGDAPGGVQGLNPESPIIMDTIFVHLLLLSFMILRPIAIAADVPESDTLGKGRNITDGETLVSADGTFTLGFFSPGASTKRYLGIWFSASSVAVCWVANGGRPVNGNSGVLVVRDTGSLLLLDGSGQTIWSSNSTSSSSSAEAQLLNSGNLVVRDGGSSSSSDAILWQSFDHPSNTLLSGMKLGKNKWTGAEWYLTSWRSADDPSPGAYRRALDTSGLPELVVWEGNVRTYRTGPWNGRWFSGVPEVSAYRNLIWYQVTTSPAEVSYGYTSNPGAALTRVVLTDAGVAKRLVWDAGARTWQTFFQGPRDVCDAYGKCGAFGLCDAGAASTWFCTCLTGFSPGVAARVVP

SEQ ID NO: 58451 - protein, 247 aa, Zea mays
  Coding DNA Sequence Number=SeqID_16672
  Gene Ontology: Mol. function=translation initiation factor activity; Cellular component=eukaryotic translation initiation factor 3 complex; Biological process=translational initiation
  Homolog annotation: Hit_ID=Q6YNS0; Match level="QueryCoverage=82%, HitCoverage=22%, E-value=7e-37, Identity=44%"; Hit description =Putative translation-initiation factor 3 subunit
  Pfam annotation: Domain name=eIF-3c_N; Domain location=45-247; Score=- 270.0; E_value=4.2e-06; Accession=PF05470.3; Description=Eukaryotic translation initiation fac
MASRFWGQGDSESEEEEVEEVESEQGSDSDDDGGRGGAGRGAQNRYLKNQEDDSDESDTGHRVIRSLRDKRNEEMRSIVDQMRNAMKINDWVSLQESFEKLNKHLEKVVRVNESTEVPKMYIKALVLLEDFLAEALANKEAKKKMSSSNSKAFNAMRQKLKKNNKQYEEQIQKCREHPESFEDEAADDKDTDDDDVDESDAEIEDPDKIAMSESEEEQDEEDDDKDGWEQKRSKKDKLMDKQFLKDP

SEQ ID NO: 58452 - protein, 446 aa, Zea mays
  Coding DNA Sequence Number=SeqID_16673
  Gene Ontology: Mol. function=translation initiation factor activity; Cellular component=eukaryotic translation initiation factor 3 complex; Biological process=translational initiation
  Homolog annotation: Hit_ID=Q6YNS0; Match level="QueryCoverage=60%, HitCoverage=30%, E-value=2e-70, Identity=56%"; Hit description =Putative translation-initiation factor 3 subunit
  Pfam annotation: Domain name=PCI; Domain location=14-144; Score =128.1; E_value=2.5e-35; Accession=PF01399.17; Description=PCI domain
  Pfam annotation: Domain name=eIF-3c_C; Domain location=145-280; Score= 52.6; E_value=1.3e-12; Accession=PF05469.2; Description=Eukaryotic translation initiation fac
  Pfam module annotation: Pfam domain module=PCI::eIF-3c_C; Domain location=14-144::145-280
MAASTYDKRRPMSKTFRRLLEVSERQTFVGPPENVRDHVMAATRALNKGDHQKAFSVINSLEIWKLLRNREHVLEMLKLKIKEEALRTYLFSYSSSYESLSLNQLTTMFDLSEQHAHSIVSKMMMHEELHASWDQPTKCIVFHSVDQTRLQGLLFQMADKLSVLVEINERAYEARTGGALEGVPPRRRGEGQDNMGKWQDNFVSSQGRQGGGNRFGYSSRGAVSGQSGGGHQRDRGNQGYRGGYGGVSRFQDARGRNQSNPSGRGGDGGARMRLIKYTNTNLKYGAESSTANDIVSTEKSFVALIKVDSSTEATDGASRSACIRLRQVQKDVDAAPASQTSLGPWKKSFDHPSNTLLAGMRLGKDPKTGAEWSLTSWRAPNDPTTGDCRRVMDTRGLPDCVSWQGNTKKYRTGPWNGLWFSGVPEMASYSTLFSNQVVVVMTRGRG

SEQ ID NO: 58453 - protein, 48 aa, Zea mays
  Coding DNA Sequence Number=SeqID_16674
MGIVAWERRWTGPLERKRSFLAHLIGVVQRLQKFSASVGGKSSKFLAW

SEQ ID NO: 58454 - protein, 686 aa, Zea mays
  Coding DNA Sequence Number=SeqID_16675
  Gene Ontology: Mol. function=protein serine/threonine kinase activity; Cellular component=membrane; Biological process=protein amino acid phosphorylation
  Homolog annotation: Hit_ID=Q8LLI3; Match level="QueryCoverage=97%, HitCoverage=90%, E-value=0.0, Identity=53%"; Hit description=S-locus receptor-like kinase RLK13
  Pfam annotation: Domain name=B_lectin; Domain location=74-195; Score =105.8; E_value=1.3e-28; Accession=PF01453.15; Description=D-mannose binding lectin
  Pfam annotation: Domain name=PAN_1; Domain location=343-423; Score =17.5; E_value=0.0029; Accession=PF00024.16; Description=PAN domain
  Pfam annotation: Domain name=PAN_2; Domain location=343-412; Score =111.5; E_value=2.4e-30; Accession=PF08276.2; Description=PAN-like domain
  Pfam annotation: Domain name=Pkinase; Domain location=474-685; Score =7.1; E_value=5.5e-09; Accession=PF00069.15; Description=Protein kinase domain
  Pfam annotation: Domain name=Pkinase_Tyr; Domain location=474-673; Score=-49.6; E_value=2e-09; Accession=PF07714.7; Description=Protein tyrosine kinase
  Pfam annotation: Domain name=S_locus_glycop; Domain location=203-328; Score=49.0; E_value=1.6e-11; Accession=PF00954.11; Description=S -locus glycoprotein family
  Pfam module annotation: Pfam domain module=B_lectin::PAN_1::PAN _2::Pkinase::Pkinase_Tyr::S_locus_glycop; Domain location=74-195::343- 423::343-412::474-685::474-673::203-328
MDMTSLTISILLLLLMIRVCKSDDQLASARPLSPGDLLISKGGVFALGFFSPSGSNTSTSLYVAIWFHGIPERSRTVVWVANRDSPATTSSSPTLAISNSFDLVLSDSQGRTLWRTQNAAAAAVHDSGTPLAVLLDTGNLQLQLPNGTVIWQSFDHPTDTILPGMRFLMIHGARPAARLVSWRGPADPSTGAFSFGLDPVSNLQLMVWHGAEPYCRISVWNGVSVSGGMYTGSPSSIVYQTIVNTGDEFYLTYTVSDGSPYFRIMLDHTGTMKLLSWDTNSSSWTLISERPTGGYGLYGSCGPNAYCDFTGAAPACQCLEGFEPVAADLNSSEGCRRTEPLQCSKASHFVALPGMRVPDKFVLLRNRSFEQCAAECSKNCSCTAYAYANLSSSGAMEDQSRCLVWTGELVDTWKSINYGEKLYLRLASPGKWQKKGIQKKVMLGYLSTSNRLGDKNDEFPFVSFNDIVAATDNFSDCNMLGRGGFGKVYKKDAIMQGILEDGKEVAVKRLSQGSGQDTSRTRVLDWPTRFNIIKGIARGIKYLHQDSRLTIIHRDLKASNILLDTEMSPKISDFGMARIFGGNQQLANTTRVVGTYGYMSPEYVTSGAFSVKSDTYSFGVLLLEIVSGLKIISTQFIMDFPNLIAYKKDLHFSRHGSYGKREMQRNWWTHWLLKVVHSMKLLGVFM

SEQ ID NO: 58455 - protein, 535 aa, Zea mays
  Coding DNA Sequence Number=SeqID_16676
  Gene Ontology: Mol. function=protein serine/threonine kinase activity; Cellular component=membrane; Biological process=protein amino acid phosphorylation
  Homolog annotation: Hit_ID=Q8LJZ0; Match level="QueryCoverage=96%, HitCoverage=61%, E-value=0.0, Identity=79%"; Hit description =Receptor-like kinase
  Pfam annotation: Domain name=PAN_1; Domain location=57-130; Score =4.7; E_value=0.054; Accession=PF00024.16; Description=PAN domain
  Pfam annotation: Domain name=PAN_2; Domain location=49-120; Score =131.6; E_value=2.1e-36; Accession=PF08276.2; Description=PAN-like domain
  Pfam annotation: Domain name=Pkinase; Domain location=219-487; Score =145.2; E_value=1.8e-40; Accession=PF00069.15; Description=Protein kinase domain
  Pfam annotation: Domain name=Pkinase_Tyr; Domain location=219-489; Score=120.9; E_value=3.5e-33; Accession=PF07714.7; Description =Protein tyrosine kinase
  Pfam module annotation: Pfam domain module=PAN_1::PAN_2::Pkinase::Pkin ase_Tyr; Domain location=57-130::49-120::219-487::219-489
  Subcellular localization annotation: CTP_CleavageSite=35; ConfidenceScore=5.48e-01
MCGAFGLCNVNTASTLFCSCVVGFSPVNPTQWSMRESGGGCRRNVPLECGNGTTTDGFKVVQGVKLPDTDNTTVDMGATLEQCRERCLANCSCVAYAAADIRGGGDGSGCVMWTNNIVDVRYVDKGQNLYLRLAKSELASRKRMVATKIVLPVIASLLALVAAAVYLVWKFRLRAQRRKKDIQKKAMVGYLTTSHELGDENLELPFVSFEDIVTATDNFSEDNMLGQGGFGKVYKGMLGEKKEVAIKRLGQGSGQGAEEFRNEVVLIAKLQHRNLVRLLGCCICGDEKLLIYEYLPNKSLDSFIFDAARKKLLDWPTRFKIIKGISRGLLYLHEDSRLTIVHRDLKPSNILLDADMNPKISDFGMARIFGGNQHEANTNRVVGTYGYMSPEYAMDGAFSVKSDTYSFGVILLEIISGFKISLNHITDFPNLLAYAWSLWNEGKAMNLVDSSLVKSCLPNEALRCIHIGLLCVQDNPNSRPLMSSVVFMLENETTTLSVPKQPVFFSQRYSEAQETGENTSSSMNNMSMTMLSEGR

SEQ ID NO: 58456 - protein, 102 aa, Zea mays
  Coding DNA Sequence Number=SeqID_16677
MNNNRGVSREGPVVLMCGGVNVERCELTPSTNAAEEALPEPTTAHDGRNPTVRPRGTTVGPRCHVAYCAGHASDCYDTNACLSNARVVIQVSMTKACPCPEP

SEQ ID NO: 58457 - protein, 179 aa, Zea mays
  Coding DNA Sequence Number=SeqID_16678
MGNSLRCCLACVLPCGALDLVRIVHLSGRVDEYGRAVSAGEVLAAHPNHVLSRPCSSPQGVVRRILIVSPDSELERGEIYFLIPAASVPDAKKGGGGASTPGRHVRSKSEGSVVAAAVTDRQLGLGAESPEEAAAAPAAKKKNQQQHKRAAAQQHRRRMSTGSHAAPWQPHLACIAEDL

SEQ ID NO: 58458 - protein, 281 aa, Zea mays
  Coding DNA Sequence Number=SeqID_16679
MGVDASGMARKREGVGAGAQESVLAGEWRVGAARQRWPATGTRCRVRWRSELDGETVGSSFSRSFLFFGEEIMFNESVAVALSRSGLSSMVFARTTVVNGWVPNCQGTLAGRMDPHSGEASVNYCGGLHLVLVLVIGGLIGRSSPGDEARSRRATQASTAGIPPCRQLLERSSMRRRRSVQIIRGRERSGRRRASTWRLQFAGPDRWHVGQEGEQPGTRCSCSRGAVAAGASAAGRVGAWGRDGEAPSAERAGRASGRKRNKSKAKENRRWQRKQSLCFVQ

SEQ ID NO: 58459 - protein, 392 aa, Zea mays
  Coding DNA Sequence Number=SeqID_16680
  Gene Ontology: Mol. function=DNA binding; Cellular component=nucleus; Biological process=RNA-dependent DNA replication
  Homolog annotation: Hit_ID=Q9LGH0; Match level="QueryCoverage=83%, HitCoverage=95%, E-value=1e-46, Identity=34%"; Hit description=NAM -like protein-like
MFRPPRPCRIESGEKGMGIGSAESQSQFLLGRVEEEAYHLEGESADSTIRSMRHQVVPLTANDRIPEDVPSGSQFDGTMDSRYYTNLLVNGIEESQATRSDVRIQHGRATAKSSQGRSKNFRDEEDILLVSAWLNVGMDPIQGVDQTHGTLWRRIHEYFNANKKFDSNRSEVSLMNRWSGIQHDVNLFCGCLSRVEARNHSGWSIDDKVANACVMFKAEDPKDKKFSYLHCWKILKDKPKWMDRRKEIGSAKKSATKKQKTTTNSSPASVANAIAVDAPLGGADHDEPSCRPDGKKKEKQKLRQRSSMEVVDYLIAKKKDSDLEKDLKKEERCNKAFALQEERIKLDKEKFAFQRQLEEDRIIGLDLSTMNYKQQQYYEDRQNEILARRFNI

SEQ ID NO: 58460 - protein, 223 aa, Zea mays
  Coding DNA Sequence Number=SeqID_16681
  Homolog annotation: Hit_ID=Q9SLP6; Match level="QueryCoverage=25%, HitCoverage=16%, E-value=2e-23, Identity=92%"; Hit description =Ferredoxin
MVDYSLPSEFLMPLSDNPIKENTENNKQHTERASPADGIDKNGKPHKVRLYSIASSAIGNFGDSKTVSLCVKRLIYTNDAEDIVKGVCSNFLSKCMGLKEFKMGYESSQFDFCFKSILCSVVGDLTIHFVGYAGGPVVNLGKIVQVILANEIGLGKTVQLITSHCNILALGVVSVFFFSWMHAGIVLIGEIRGMAEENVATFIQRKLNYSCKWYQWMEYKLKL

SEQ ID NO: 58461 - protein, 356 aa, Zea mays
  Coding DNA Sequence Number=SeqID_16682
  Homolog annotation: Hit_ID=Q2R1H1; Match level="QueryCoverage=45%, HitCoverage=66%, E-value=3e-57, Identity=67%"; Hit description=HAT family dimerisation domain containing protein
  Pfam annotation: Domain name=hATC; Domain location=233-327; Score =22.6; E_value=0.00014; Accession=PF05699.5; Description=hAT family dimerisation domain
MDHAAIRYQSIELQCLSGCYQGRIYDRGCLGCIPGRGPITRGAGIQPQPSFASRYGLRRYPSPVSSRRTDAEHIQTPEPQTRSCRLADRRTPRGARLRARLRRRHRSGCQRQARLPPAPRPPGATARLRVCASLLGSGHRGTAQAARPDRWRAGEQASRQAGRAKQSGEQASRAEQSSEQASRAEQSNEQPCTERCIACLDPRDSFANFDLEKLIELSKIYDADFSDYERICLMDQLLLFIDEVRNDDGFRDCNDLGHLATKMVKTDRHICFSLVYRLVELALILPVTTATVERAFSAMNIIKTERRNKMGDEWMNNSMLCYIERDMFVEIEDEKILKHFQGLRTRKIILPRSINS

SEQ ID NO: 58462 - protein, 149 aa, Zea mays
  Coding DNA Sequence Number=SeqID_16683
MSPHALLPVGSRIHDPQYDRTRIPSEPQDVDLTVTNFESRPKHPTIRSYINGPNLPAPRSNLNRTFTIQGPSALFPLLQPLPAAMSRTAVELGRSWPNPTPRRAQTPIRRMLRKAVMTANMAKGILLAKTSQRSRATARAGSTTGQQVR

SEQ ID NO: 58463 - protein, 152 aa, Zea mays
  Coding DNA Sequence Number=SeqID_16684
MGKNNKRKREPTPPSEEFGDSEYSEEEFSSESEGSPAPVPLRESSDDSDDSQELAAEVWTYIRAVERSGLEGSDESEYSSDEEDSDSGGKDEDDDDDDGDDDGDGDGRDNGMGSGGGGKDGDGGGSRGSNRDGSSRGSTRGGSGGGSNRASG

SEQ ID NO: 58464 - protein, 187 aa, Zea mays
  Coding DNA Sequence Number=SeqID_16685
  Gene Ontology: Mol. function=nucleic acid binding
  Homolog annotation: Hit_ID=Q2QU58; Match level="QueryCoverage=63%, HitCoverage=27%, E-value=9e-10, Identity=33%"; Hit description=Zinc knuckle family protein
  Pfam annotation: Domain name=zf-CCHC; Domain location=127-144; Score =18.2; E_value=0.00097; Accession=PF00098.13; Description=Zinc knuckle
  Pfam annotation: Domain name=zf-CCHC; Domain location=152-169; Score =2.8; E_value=0.34; Accession=PF00098.13; Description=Zinc knuckle
  Pfam module annotation: Pfam domain module=zf-CCHC::zf-CCHC; Domain location=127-144::152-169
MTKEHEDKGALMIIWSNDNTLSCSNPCCSKKSQSSIEKKIAGKINRNKRIMRRRRLDQPTQDIHGHMVKKLEKGETAACVKLHKNEFLRQHEKQTTRTRTKVKIQVLMLFALVIFLCPPRAKRRGKRRYFKCKELGHFIASCPHMDIEDEVRRCFTYNKKDHMIPSYPSHEESRLCFPHDDSHQEEE

SEQ ID NO: 58465 - protein, 41 aa, Zea mays
  Coding DNA Sequence Number=SeqID_16686
MAQGHISPFTVYPEVRLLPFTRLVIIPFFRNAGRKKRVTSS

SEQ ID NO: 58466 - protein, 146 aa, Zea mays
  Coding DNA Sequence Number=SeqID_16687
EDEDAEVEVEDEEVACWTRPAVSMAAAVTVTLTPAGMPCDVGVHTRRSRGDEQRNKAPGRRLGGWPRQRKQLVPVDSLGAQLAASQTDRVVCTAAAVKWRKTGSAVRLAATDAARRPLPLPCSSHGGYRAPPNAAAVDASQRSTKR

SEQ ID NO: 58467 - protein, 232 aa, Zea mays
  Coding DNA Sequence Number=SeqID_16688
  Gene Ontology: Mol. function=transcription factor activity; Cellular component=nucleus; Biological process=regulation of transcription, DNA-dependent
  Homolog annotation: Hit_ID=Q3T5N0; Match level="QueryCoverage=94%, HitCoverage=96%, E-value=3e-47, Identity=48%"; Hit description=SbCBF6
  Pfam annotation: Domain name=AP2; Domain location=53-119; Score=82.8; E_value=1.1e-21; Accession=PF00847.10; Description=AP2 domain
  Subcellular localization annotation: CTP_CleavageSite=73; ConfidenceScore=5.34e-01
MCPIKRETTSAESGSPCSSSTSTSSSSEHHQTAWASPPKKRPAGRTKFRETRHPVFRGVRRRGRAGRWVCEVRVPGRRGCRLWLGTFDTAEAAARAHDAAMLAVAAGAARLNFADSAWLLAVPTASYASLADVRRAVAEAVESFLRRREEEEGDALSAASSTSPNDKDGDESSSATTTDDDSPFELDMFGGMSWDLYYANLAQAMLVEPPPIVPALCDDGRGFRIAALELLG

SEQ ID NO: 58468 - protein, 210 aa, Zea mays
  Coding DNA Sequence Number=SeqID_16689
DWPKTPRPHELIGMVLQPACFELFASRACPSSPQPDELSPEAGESQVSAKEEYRVPDLSPARGGDTCVRAEAEPAMMMGKAATVRSSSTGADKTAMRFSHHIFSISSIIFYYIAQKYILHVGTALLTNLPVEQPGEARLQTNLPAEKLCEAGLPTNPARRQPALEQARKSRPRTIEPHRHDRTSTSHVQTVEVVPKGLYQTRRRMCIPAD

SEQ ID NO: 58469 - protein, 206 aa, Zea mays
  Coding DNA Sequence Number=SeqID_16690
  Gene Ontology: Mol. function=drug transporter activity; Cellular component=membrane; Biological process=multidrug transport
  Homolog annotation: Hit_ID=Q6ZFW3; Match level="QueryCoverage=97%, HitCoverage=37%, E-value=3e-59, Identity=67%"; Hit description =Putative ripening regulated protein DDTFR18
MPLTDTANAQATRPSAAPRAEPDARDEARALRPPGAQLVPDTRGNGAAERMREDVYQRGGLYEHAHGRHRRLGVDEHATEEHHDLVPPPLQADRHAAVHAQPHKAPPLPLGWCRRRHGRALLGAAVVMGAVHSAEVDVRHEEKQEVEVGPDPSERDATDAEAEAAHEEEVDGHVEEQRGGGAVGERQRDGLRAEVDADRVEEGRIF

SEQ ID NO: 58470 - protein, 77 aa, Zea mays
  Coding DNA Sequence Number=SeqID_16691
  Gene Ontology: Mol. function=single-stranded DNA binding; Cellular component=nucleus; Biological process=pollen development
  Homolog annotation: Hit_ID=Q64MA3; Match level="QueryCoverage=87%, HitCoverage=10%, E-value=3e-17, Identity=69%"; Hit description =Putative single-strand DNA endonuclease-1
  Subcellular localization annotation: CTP_CleavageSite=44; ConfidenceScore=5.15e-01
MGAFPVFVVDGEPSPLKSQARAARFFRGSGMDLAALPVTEAESSAAAAPVKKRNAAFTRAVEECVTVMLSSMGLRPS

SEQ ID NO: 58471 - protein, 155 aa, Zea mays
  Coding DNA Sequence Number=SeqID_16692
  Gene Ontology: Mol. function=transcription factor activity; Cellular component=nucleus; Biological process=regulation of transcription, DNA-dependent
  Homolog annotation: Hit_ID=Q8GZQ2; Match level="QueryCoverage=99%, HitCoverage=59%, E-value=4e-65, Identity=79%"; Hit description=DREB -like protein
MLALQGRGAGHLNFPESTRLLAVPPPSALPGLDDARRAALEAVAEFQRRSGAADEATSGASPPSSSPSLPDVSAAGSPAAALEHVPVKADEAVALDLDGDVFEPDWFGDMDLELDAYYASLAEGLLVEPPPPAAAWDHEDCCDSGAADVALWSYY

SEQ ID NO: 58472 - protein, 90 aa, Zea mays
  Coding DNA Sequence Number=SeqID_16693
MADTVTLEPNNFFKRGLIVGVGWLMHRLFGSPTSSVVTVDILPKSSPLTSKPPYISHSHAAESHGRNTGLTEKILTFFILLLADSINNLR

SEQ ID NO: 58473 - protein, 164 aa, Zea mays
  Coding DNA Sequence Number=SeqID_16694
  Homolog annotation: Hit_ID=Q6QP54; Match level="QueryCoverage=64%, HitCoverage=37%, E-value=2e-07, Identity=48%"; Hit description =Putative kinase
MAPPVDVVGPCPRLGEVEAPPRSRSSLSSKVEVESEPPGRTRRRPSAEARAESKPWGQAKRSSSSFGAEPEFEPLGSGGAEVRCLPGLSPSSSPGVGRSGVRRLPGLSPSPSPGVGQSGPHSVEWLSSRSGAGGAVLLSDRLVEWRSDCGHFGSVDWRVRVRIK

SEQ ID NO: 58474 - protein, 538 aa, Zea mays
  Coding DNA Sequence Number=SeqID_16695
  Gene Ontology: Mol. function=binding; Cellular component=kinesin complex; Biological process=defense response
  Homolog annotation: Hit_ID=Q6K715; Match level="QueryCoverage=64%, HitCoverage=55%, E-value=2e-85, Identity=46%"; Hit description =Kinesin light chain-like
  Pfam annotation: Domain name=TPR_1; Domain location=160-193; Score =5.8; E_value=1.1; Accession=PF00515.18; Description=Tetratricopeptide repeat
  Pfam annotation: Domain name=TPR_1; Domain location=202-235; Score =10.9; E_value=0.27; Accession=PF00515.18; Description=Tetratricopepti de repeat
  Pfam annotation: Domain name=TPR_1; Domain location=412-445; Score =9.5; E_value=0.4; Accession=PF00515.18; Description=Tetratricopeptide repeat
  Pfam annotation: Domain name=TPR_1; Domain location=454-487; Score =22.5; E_value=0.0015; Accession=PF00515.18; Description =Tetratricopeptide repeat
  Pfam annotation: Domain name=TPR_2; Domain location=110-143; Score =2.8; E_value=15; Accession=PF07719.7; Description=Tetratricopeptide repeat
  Pfam annotation: Domain name=TPR_2; Domain location=160-193; Score =5.7; E_value=7.2; Accession=PF07719.7; Description=Tetratricopeptide repeat
  Pfam annotation: Domain name=TPR_2; Domain location=202-235; Score =9.1; E_value=2.9; Accession=PF07719.7; Description=Tetratricopeptide repeat
  Pfam annotation: Domain name=TPR_2; Domain location=244-277; Score =0.6; E_value=28; Accession=PF07719.7; Description=Tetratricopeptide repeat
  Pfam annotation: Domain name=TPR_2; Domain location=364-397; Score =3.1; E_value=15; Accession=PF07719.7; Description=Tetratricopeptide repeat
  Pfam annotation: Domain name=TPR_2; Domain location=412-445; Score =13.3; E_value=0.9; Accession=PF07719.7; Description=Tetratricopeptide repeat
  Pfam annotation: Domain name=TPR_2; Domain location=454-487; Score =21.8; E_value=0.0024; Accession=PF07719.7; Description =Tetratricopeptide repeat
  Pfam annotation: Domain name=TPR_2; Domain location=68-101; Score =2.4; E_value=17; Accession=PF07719.7; Description=Tetratricopeptide repeat
  Pfam module annotation: Pfam domain module=TPR_1::TPR_1::TPR_1::TPR _1::TPR_2::TPR_2::TPR_2::TPR_2::TPR_2::TPR_2::TPR_2::TPR_2; Domain
  Pfam module annotation: Domain location=364-397::412-445::454-487::68- 101
  Subcellular localization annotation: CTP_CleavageSite=60; ConfidenceScore=5.03e-01
MRRLAKSLLLASLSRTLRHRPQLPLLHPWPPQPRRPEPRLLPFSTQTLAPGPAPPPALVAASTGEPTGLALLESAELHESEGDHQEALGLALKALAPLQASHGGWSLPVARALRLAGAAATRAGSLSDGLESLGAAADIVDYLAPARRKGVPAEVAVVGAAVYEQLARAKMAIGRRWDAVGDLQRALDLKTLFLEAGSAELGNAYRDVAEAYAGVLDFDKALPLCSKALGIAERRFGEDSAEVAKLRRLLMSVYTGLGRHEEALAQIELAKVVYERLGLNVELSQAEIDGANIRILLGRSEEALNNIKRVMQRADKESEERALAYVTMAKILMSEDTVLDSKRCLEIAQGIIDAKDSIDPGRFAEAYAEISMLYESLANFETSSGSFEMASNLMKKTLAILESAKEMHHIEGSISARLGWLLLYIKNVDESVQYLERAVDKLKNCFGPRHFGLGFAYRNLGQAYLEMNQHQSAVEFFKLALDIIEATFGPLHDDTIDTKQCIANAYGLMKRHAILTLNYCLLRPADRAYGGAKHCFAL

SEQ ID NO: 58475 - protein, 101 aa, Zea mays
  Coding DNA Sequence Number=SeqID_16696
MDTPMPQASCGKGSEKKSYFMNVTAIVVFPQFWKLARCKRVQRSSQAFESEIPIGERDHQNQIDRLHGFFSRKVRRQRTAFCCSFDAPSSSQNLSHKKPVA

SEQ ID NO: 58476 - protein, 444 aa, Zea mays
  Coding DNA Sequence Number=SeqID_16697
  Gene Ontology: Mol. function=nucleic acid binding; Cellular component= intracellular; Biological process=DNA integration
  Homolog annotation: Hit_ID=Q8S467; Match level="QueryCoverage=81%, HitCoverage=80%, E-value=1e-156, Identity=79%"; Hit description =Putative gag protein
  Pfam annotation: Domain name=zf-CCHC; Domain location=343-360; Score =31.2; E_value=3.7e-06; Accession=PF00098.13; Description=Zinc knuckle
METGDKPTTSQGSTSSEESHTKRREKRKVSSKGKEKRSSSHHEEKKKDSSKGKEKVSSSHHKEKKEKSSSHKPHRSGDKKKRMRKVVYYETDSSSTSTSGSDAASVTSKRQERKKYRDEDYDMDEVAQIEHFNSQATTILLASLSKEEYNKVQGLKNAKEIWDLLKTAHEGDELTKITKRETIEGELGRFRLRPGEEPQDMYNRLKTLVNQVRNLGSKKWDDHEVVKVILRSLIFLNPTQVQLIRGNPRYTQMTPEEVIGNFVSFECMIKGSRKINELDEPSTSEAQPVAFKAMEEKKEESTPSRQPIDPSKLDNEEMALIIKSFRQILKQRKGKDYKPRSKKVCYKCGKPGHFIAKCPMSSDSDRGDDKKGKRREKKKYYKKKGGDAHVCREWDSDESSTESSSDEDAANIAVTKGLLFPNVDHKCLMAKDGKRRKNLIPKRP

SEQ ID NO: 58477 - protein, 217 aa, Zea mays
  Coding DNA Sequence Number=SeqID_16698
MGLLGLSPLVPAASCGEFAGSQVALLSVGVGPSIRDEEHQFQECEGDHNAVRFSSNDYSHISASVQIRMPFRLLQATGEFWRLRRGASVTLDESQSKCSRKDALMRRLLLLVAGSTLASRLRASSKCATSSPPELKGAPVPTPTPFVPTTAAATAVDLPLGGLDLPTNTRCLDGCMMHPSFLPPSYMSVHCFSEFTLLKKEFRAPTKHSVPTVKSQV

SEQ ID NO: 58478 - protein, 98 aa, Zea mays
  Coding DNA Sequence Number=SeqID_16699
  Gene Ontology: Mol. function=oxidoreductase activity; Biological process=metabolic process
  Homolog annotation: Hit_ID=Q53CF4; Match level="QueryCoverage=91%, HitCoverage=17%, E-value=5e-12, Identity=62%"; Hit description =Betaine aldehyde dehydrogenase
MGLASDGSRLRAALRRRRVAPARAGPPPSPVVNPTTEAHIGEIPAGTAEDVDAAVGGGAGGAQRSVARLGARPGGAVRAKYLRAIAAKVIERYLSWLS

SEQ ID NO: 58479 - protein, 85 aa, Zea mays
  Coding DNA Sequence Number=SeqID_16700
MSPDTHDVPGTLSGDGFHRATASTENRRVLSKRSISDQYVMVIPIWRGKGFRWIKLQHLHHFSMLSWMEIDANDTGLENSMLGAL

SEQ ID NO: 58480 - protein, 243 aa, Zea mays
  Coding DNA Sequence Number=SeqID_16701
  Gene Ontology: Mol. function=oxidoreductase activity; Cellular component=mitochondrion; Biological process=metabolic process
  Homolog annotation: Hit_ID=Q53CF4; Match level="QueryCoverage=92%, HitCoverage=44%, E-value=1e-130, Identity=97%"; Hit description =Betaine aldehyde dehydrogenase
  Pfam annotation: Domain name=Aldedh; Domain location=1-225; Score =8.4; E_value=4.7e-16; Accession=PF00171.12; Description=Aldehyde dehydrogenase family
MDYAILPSLIIRSKYKTAVEWTLFGCFWTNGQICSATSRLLIHTKIAKKFNERMVAWAKNIKVSDPLEEGCRLGPVVSEGQYEKIKKFISNAKSQGATILTGGVRPAHLEKGFFIEPTIITDITTSMEIWREEVFGPVLCVKEFSTEDEAIELANDTQYGLAGAVISGDRERCQRLSEEIDAGCIWVNCSQPCFCQAPWGGNKRSGFGRELGEGGIDNYLSVKQVTEYISDEPWGWYQSPSKL

SEQ ID NO: 58481 - protein, 282 aa, Zea mays
  Coding DNA Sequence Number=SeqID_16702
  Homolog annotation: Hit_ID=Q9FFU3; Match level="QueryCoverage=82%, HitCoverage=43%, E-value=1e-61, Identity=51%"; Hit description =Genomic DNA, chromosome 5, P1 clone:MBG8
MAALPRRRLLLFLALLRVLICGAAPFRARDLLPLLPRRMAWQLMGATAHSAVDLLPSFVGAVAPGGPAAAWRGACFDENQAVLDLTPGRNGTAGGLGGAVLRLKTASPQSWTCMDLYVFATPYRVAWDYYMRSNENHTFEIKAWEDAAEMEYVKQHGIAVFLMPSGMLGTLLSLADVAPLFSNTGWGQDANLAFLGKHMGASFERRRSANTIIRREDVRSGDFLALSKIRGRWGGFQTLEKWVTGAFAGHTAVVLKDGDANLWVAESGYENNKAVLAGSVFS

SEQ ID NO: 58482 - protein, 247 aa, Zea mays
  Coding DNA Sequence Number=SeqID_16703
  Homolog annotation: Hit_ID=Q9FI69; Match level="QueryCoverage=68%, HitCoverage=55%, E-value=6e-30, Identity=44%"; Hit description =Arabidopsis thaliana genomic DNA, chromosome 5, TAC clone:K19E20
  Pfam annotation: Domain name=Sld5; Domain location=14-247; Score =138.0; E_value=2.6e-38; Accession=PF05916.2; Description=Synthetic lethal mutants of dpb11-1 fi
MSSWDADDSAAASAAEAATTDVELLKRAWRNEKAAPEILRFDSPLVSRVREQTQLLVRPPSRRPPPPSCYFSGSDADSLPRCRQEETLDDFADSGVDDLVVSLYQMDLDRTLFLLRSYLRLRLQKIEKYTMHISRSEDLLSRLSQQERRFAKSCAEIMEKHLEQSVLSKLPYGYDSVSRQSLSSTEDDMVPEPQLDTFVFCKTKGDVGAFQLDDIGEEVVDLVADDLYVLRYKSVKGLIEGGRIDLI

SEQ ID NO: 58483 - protein, 160 aa, Zea mays
  Coding DNA Sequence Number=SeqID_16704
  Gene Ontology: Mol. function=RNA binding
  Homolog annotation: Hit_ID=Q9FMZ7; Match level="QueryCoverage=67%, HitCoverage=33%, E-value=5e-09, Identity=34%"; Hit description =Arabidopsis thaliana genomic DNA, chromosome 5, P1 clone:MJB21
MAVSQVHNMRVNDSGYLECYLEYIDYDGEDLDWVAVFQENPASSSQNSKGSTEVMIRPSFPQWYYGHEPDQLPVSDVTAVVDEAWKIGDMVDWLKDGCYWSGTITKLLKKDMVKYVLGSDGVPTGVGSTLSFLVEVHVPVWPDTMEGSLIPSISTDPHTP

SEQ ID NO: 58484 - protein, 308 aa, Zea mays
  Coding DNA Sequence Number=SeqID_16705
  Gene Ontology: Mol. function=RNA-directed DNA polymerase activity; Cellular component=mitochondrion; Biological process=RNA-dependent DNA replication
  Homolog annotation: Hit_ID=UPI00004C1733; Match level="QueryCoverage =99%, HitCoverage=21%, E-value=1e-137, Identity=83%"; Hit description= UPI00004C1733 related cluster
  Pfam annotation: Domain name=RnaseH; Domain location=1-123; Score= -4.6; E_value=0.00015; Accession=PF00075.14; Description=RNase H
MFFDGSLMKTGAGAGLLFISPLGKHLRDVLRLHFPASNNVAEYEALVNGLQIAIELGVRRLDARGDSQLVIDQVMKNSHCRDQKMEAYCDEVRRLEDKFYGLELNHIARRYNETADELAKIASGRTTVPPDVFPRDLHQPSVKIDDTPEPEAPSAEPEESYPSTKPKLGGTPTRDTLGGCGHHAAPRALVGNAFRQGFYWPTAVADATRIVRTYEGCQFYARQTHLPAQALQTIPITWPFAVWGLDLVGPLQKAPGGYTHLLVAVDKFSKWIEVRPLNSIRSEQAVAFFTNIIHRFGVPNSIITDNGT

SEQ ID NO: 58485 - protein, 91 aa, Zea mays
  Coding DNA Sequence Number=SeqID_16706
  Subcellular localization annotation: CTP_CleavageSite=28; ConfidenceScore=5.07e-01
MYADSDKSTSVAGNTSLAHRDETGKCKRGSSVKGSVSELGSSTAEERCDTVEVVIRTLLAFLRTNSRNTSIRQQQQHLHGIEDETPTTSMR

SEQ ID NO: 58486 - protein, 97 aa, Zea mays
  Coding DNA Sequence Number=SeqID_16707
  Subcellular localization annotation: CTP_CleavageSite=27; ConfidenceScore=5.08e-01
MGVARLLPATVGTFRVCDHSGGTNSGRAALNSSSELAPGPCSAHRRGHAPVPHSVARSNLGLVLGDGQLDLGRASARVAMAAAPLPGVGGEEKNMRR

SEQ ID NO: 58487 - protein, 150 aa, Zea mays
  Coding DNA Sequence Number=SeqID_16708
  Homolog annotation: Hit_ID=Q6K4E0; Match level="QueryCoverage=23%, HitCoverage=12%, E-value=2e-08, Identity=72%"; Hit description=WD-40 repeat protein-like
MSARAISGHCKLQKCTHVIHPVKSKTFESSWATCVAIDASESWLVLLPNCVFRLRGNHESFNMVSRRSVDTVSNMEATTEAELRENDFWSTHHTKLICTMGRWPAPRHHGGIILACVDGLDCAIKSLQSICQLIETSNLHELINKPIPGS

SEQ ID NO: 58488 - protein, 1170 aa, Zea mays
  Coding DNA Sequence Number=SeqID_16709
  Gene Ontology: Mol. function=RNA-directed DNA polymerase activity; Cellular component=membrane; Biological process=RNA-dependent DNA replication
  Homolog annotation: Hit_ID=Q53NJ9; Match level="QueryCoverage=75%, HitCoverage=86%, E-value=0.0, Identity=48%"; Hit description =Retrotransposon protein, putative, unclassified
  Pfam annotation: Domain name=Pkinase; Domain location=832-1107; Score= -1.0; E_value=1.7e-08; Accession=PF00069.15; Description=Protein kinase domain
  Pfam annotation: Domain name=Pkinase_Tyr; Domain location=839-1087; Score=-116.7; E_value=2.6e-05; Accession=PF07714.7; Description =Protein tyrosine kinase
  Pfam annotation: Domain name=RVT_1; Domain location=396-662; Score =193.6; E_value=4.8e-55; Accession=PF00078.17; Description=Reverse transcriptase (RNA-dependent
  Pfam module annotation: Pfam domain module=Pkinase::Pkinase_Tyr::RVT _1; Domain location=832-1107::839-1087::396-662
MKADGTEWWITVVYGPQSDADKLLFLQELRALASQGHERWLVLGDFNLIYQASDKNNLNLNRRLMGSFKSTIDDIHLKELRLNGRQFTWTNGQAEPTMTRIDRFFCTPDWELLFPTCYIHSLPSLMSDHTPLLLQGEIMRKTNSSFRFENFWTRIDGFKEAVYSAWNKTLPSVQQPLLRLHIKLARTAKAIKAWRRVKVGDTKLQLAIVKEVILRLETAQEARTLSLVELNLLRRLKAKSLGLALVEKSRIRQRSRLTAVRLGDANSRFFHLRACSRARKNFIQALQTETGLVVTQEGKEKVITDHFMQHLGTTAPRARTFDWNSLGYHHIDLSSLEAPFSQEEIKETILSMPRDKAPGPDGFTGTFYRACWDIIKDDLTAAFNQLHNLNGQGFKLLNAGNIVLIPKKKDALRVSDFRPISLIHSVAKIFSKLLANRLAPHLDDLVSKCQSAFIRKRCIQDNFLYVQNIVRQFQKNKTPALFLKLDIQKAFNTINWSYLLEYLQARGFGHRWREWITILFSTASSRALINGVQGESFDHRRGVRQGDPLSPMLFILAFDPLQRILDLASEHGVLTPLPLAAAKLRTSLYADDAAIFINPTRNDLQAVKQILNAFGAATGLTTNFEKSSIHPIRCENEDLSNILQPFPGCCKTFPCQYLGLQLHTRPLQKIHVQPLVEKIGQRLAGWKGPLLNRAGRITLVSSVLSSMPIYHLTIFPLAKWATKQIDKIRRSFLWKGEDNAHGGHCLVNWKTVARPKDLGGLGVLDLEKFSRALRLRWLWQEWTDSSKPWEGLQVPCNKLDRLLFQASTTVVIGNGIKAKFWHHGWLDGEAPRNLAPHLYKLIRRKNKSVAQELTNSAWIQSLRRKITTTTQLEEFVYLWTRIRQDRKREFNGLVIYTMWNLWKERNRRIFEHCSLPPLQIAERVRESDMKAENTLSWEKLFDVATGTARGLEYLHRGCNTPIVHFDIKPHNILLDQDFCPKISDFGLAKLCPNKASSAVSIVGARGTVGYIAPEVYSKQFGVVSSKSDVYSYGMMVLEMVGARDKSTSADSERSSQYFPQWIYEHLDDYCVSASEVDGGTTELVRKMIVVGTARLTGLARPRHGPFASVRGPGAEPHRPTARGRFGGDRRTLLSLVPSASAKRSASGVICASAEIPVLRLTPLRNRDSQS

SEQ ID NO: 58489 - protein, 672 aa, Zea mays
  Coding DNA Sequence Number=SeqID_16710
  Homolog annotation: Hit_ID=Q5N7S6; Match level="QueryCoverage=16%, HitCoverage=12%, E-value=8e-49, Identity=83%"; Hit description =Receptor serine/threonine kinase PR5K-like
  Pfam annotation: Domain name=Pkinase; Domain location=68-458; Score= -67.7; E_value=0.00016; Accession=PF00069.15; Description=Protein kinase domain
  Pfam annotation: Domain name=Pkinase_Tyr; Domain location=69-327; Score=-95.1; E_value=1.2e-06; Accession=PF07714.7; Description =Protein tyrosine kinase
  Pfam module annotation: Pfam domain module=Pkinase::Pkinase_Tyr; Domain location=68-458::69-327
MDDQGILAGTLSSLLFLCLVILTFFSAYKYGMLPFKSKDEPRIESFLQKNGNLHPKRYTYADVKRMTRSFTEKLGQGGFGAVYRGSLHDGRQVAVKMLKDTKGDGEEFMNEVASISRTCHVNIVTLTGFCLQGSKRALVYEYMPNGSLESRPPHLNPAPHLSPPPQIDRSTRYLPPKPCLASADALSYRAPALSTSASAAGRITEEISPSLSYCGSRGLHCCLLPTGHPRSHQTCTGWLDNGPAQALAWCPRAFKTSNHQAVAAFKFGQRQIAGPGHKARLCPKAKTSQNTTAQQPPPRLHSDDFPPLVQATMPRPGEPGTRPSETFAVAASTGDMEAELERLSTHAVVAWLGRDRPEHHRETALERREFLFGNLDIRVRRWLPMTQADPVDLRYHVRLCLEGIPLHAWNESIAKSVVARACDLDYVELQSLRKEDTRALCLWAWTEDPSRIPKVTWLTISRRSSLVRDGATPPARRSGSHFRVIVHLDLVEDPPESDGRCSTREFRWALGVVDGERTPRDRHDPAPVAIVGRRDEDDDDEERRGRRSRKEDSWSSRLFRSLSRAPHRERDRSEPRRDRHGDRRSTTGGRRHLTCSVDDSLLQRNGSKHVSLDVFPDRVAPRQPVCIDGSATSGGGREQRHRQPRTDASSTPWEARAVRTSTSTRDRSGLYR

SEQ ID NO: 58490 - protein, 312 aa, Zea mays
  Coding DNA Sequence Number=SeqID_16711
  Gene Ontology: Mol. function=protein serine/threonine kinase activity; Cellular component=nucleus; Biological process=protein amino acid phosphorylation
  Homolog annotation: Hit_ID=Q5N7S6; Match level="QueryCoverage=84%, HitCoverage=53%, E-value=3e-50, Identity=40%"; Hit description =Receptor serine/threonine kinase PR5K-like
MAAFRSLRRRLPLALLLAVCVAASRSDPSGDDFYNRSICKLQPYRCGEVNITYPFYLSDDTADVLGNSSSYCGYPGLAIDCVDDEYPTIQLGGNSSNTGYSYNVTDIDYPTSTIYLADPDVLDDASCPRVDHNVTVSPSPTLWLNLSDYTVRYLLFFANCSINVLHVPNQSDINPIACASGSDGDYSFVIPSEMPHQLLLQMCSQQVILVPVLQNASLTPVDPQWSTSGYRDALKQGFQLQWDSDRKTERCAECEGSNGRCGYNRSGEFVTCLCADGHVSDHECTKDSSSKWRHDLSDHRLTASLQLYVGCK

SEQ ID NO: 58491 - protein, 314 aa, Zea mays
  Coding DNA Sequence Number=SeqID_16712
MAPLLLLLPVVQLLLAVADAVPDSCAKATCAGHEIHYPFRLDSSMPDDCVVYPVPGIGLICQDNSTLILPFESHRYTVLSINYKAHTILVSDADIGDEYAAAAAGAGCPRLHVNLTMDAFWLRLSPSDSNITFLYNCKRNVTLPSAVELSGCQDGNDDDDDDSRSPSPSYSYALRDGGVTGAEAHELECQEVVVAPVLDVHKRAIVGAPGGPPPPPGDGSSPFREVLQGGFELSYDTHSRQCDRCERSGGWCGYQRAGATTPAAGASATMTFTCFCESGPASDRCDKSGVFRLTEIGVQNQDFLSCDFPFSELV

SEQ ID NO: 58492 - protein, 68 aa, Zea mays
  Coding DNA Sequence Number=SeqID_16713
MKTERCDDCERSSGKCAYNTSGEFVACLCADGHVTDHGCTNGSRWREVAVAPRMHRTVRCTPDMSGEL

SEQ ID NO: 58493 - protein, 364 aa, Zea mays
  Coding DNA Sequence Number=SeqID_16714
  Gene Ontology: Mol. function=protein serine/threonine kinase activity; Cellular component=nucleus; Biological process=protein amino acid phosphorylation
  Homolog annotation: Hit_ID=Q5N7S6; Match level="QueryCoverage=75%, HitCoverage=53%, E-value=8e-49, Identity=39%"; Hit description =Receptor serine/threonine kinase PR5K-like
MAALCSPRRRLPLPLLLPLLLAVLVAASRGDDPSGDEYFNRSICKLQPYRCGEVNITYPFYLSDDTADVLGNSSSYCGYPGLAIDCVDDEYPTIQLGGGSSTGYSYNVTDIDYPTSTIYLADPDVLDDASCPRVDHNVTVSPSPTLWLNLSDYTVRYLLFFTNCSVHVLHVPNQSDISPIACASGSDGDDYSFVVPSEMPHQLLSQQCGQVTLVPVLQNATLTPVDPLWSTSGYRDALKQGFQLQWDSDMKTERCDDCERSSGKCAYNTSGEFVACLCADGHVTDHGCTNELAILTSSCPNLDAMCAAVERSLSTRTSTARTARAHFSTAAVGGNETELDQGQGLRLLRVLQSAHRSRRHTPSF

SEQ ID NO: 58494 - protein, 812 aa, Zea mays
  Coding DNA Sequence Number=SeqID_16715
  Gene Ontology: Mol. function=ATP-dependent DNA helicase activity; Cellular component=nucleus; Biological process=regulation of transcription, DNA-dependent
  Homolog annotation: Hit_ID=Q38861; Match level="QueryCoverage=56%, HitCoverage=92%, E-value=1e-125, Identity=70%"; Hit description=DNA repair helicase XPB1
  Pfam annotation: Domain name=DEAD; Domain location=189-351; Score= -18.1; E_value=0.00019; Accession=PF00270.19; Description=DEADDEAH box helicase
  Pfam annotation: Domain name=Helicase_C; Domain location=322-402; Score=-0.5; E_value=0.018; Accession=PF00271.21; Description =Helicase conserved C-terminal domain
  Pfam annotation: Domain name=Metallophos; Domain location=631-791; Score=79.9; E_value=8.1e-21; Accession=PF00149.18; Description =Calcineurin-like phosphoesterase
  Pfam annotation: Domain name=ResIII; Domain location=185-342; Score =5.8; E_value=1.5e-05; Accession=PF04851.6; Description=Type III restriction enzyme, res subunit
  Pfam module annotation: Pfam domain module=DEAD::Helicase _C::Metallophos::ResIII; Domain location=189-351::322-402::631 -791::185-342
MAGGDGDRHRAPKRHKSSTPSKAALVDESAEFDYADDFDDDAHDADTEVKKRDFTKLELKVDHASRPLWACADGRIFLETFSPLYKQAYDFLIAIAEPDSLGAPSFTVSKTSGQIASGHEDLLNGMEIAAATEDKETHSFEIDPSQVENVKQRCLPNALNYPMLEEYDFRNDTVNPDLDMELKPQARPRPYQEKSLSKMFGNGRARSGIIVLPCGAGKSLVGVSAACRIKKSCLCLATNAVSVDQWAFQFKLWSTIKDENISRFTSDNKEKFTGMAGVVVTTYNMVAFGGKRSEDSEKIIEEIRNREWGLLLMDEVHVVPAHMFRKVISITKSHCKLGLTEVWCPMTKEFFAEYLKKENSKKKQVGDNSIDIPEANVIIQISSHAGSRRQEAQRLGRILRAKEMYYSTKRQQFLIDQGYSFKVITSLPPAEEGPNLSYYTLDEQLELLSMALNAGDDMIGVERLEEDSDGKALIRARRSAGSMSAFSGAGGMVYMEYSRKHEAVSETAKVLIDSSQPPKASRPKSQAQITTSPPVPSPAPRSPLAARLPAEIEEAPIARGFPLPSTAPTSPRPLRLKSHAPGWPPPPAMDVDLWISKVKEGQHLAEHELQSLCEYVKEILIEESNVQPVNSPVTVCGDIHGQFHDLMKLFATGGHVPETNYIFMGDFVDRGFNSLEVFTILLLLKARKYGNANAWRYCTDVFDYLTLSAIINGQVLCVHGGLSPDIRTIDRNCEIPHEGPFCDLMWSDPEEIETWAVSPRGAGWLFGSRVTAEFNFVNGIELVCRAHQLVQEGLKCGLHLIIATDVAMSLLS

SEQ ID NO: 58495 - protein, 87 aa, Zea mays
  Coding DNA Sequence Number=SeqID_16716
  Subcellular localization annotation: CTP_CleavageSite=21; ConfidenceScore=5.04e-01
MAECAAACCVLCACLPVAVLCCVARAPLRVARRCCGRWTRRRLAPGVSSSFSDAEVGEFLQGGAGGRAMGAAALGAVGGGSAKLASY

SEQ ID NO: 58496 - protein, 87 aa, Zea mays
  Coding DNA Sequence Number=SeqID_16717
MPLAARVLPLRLASLPIKRLRKQPADSLGDGALRKRLLKSLHRTARMAFLNVCALSLSSAVLNLKHGSHDGKNRKQIIHVDAKMPRS

SEQ ID NO: 58497 - protein, 567 aa, Zea mays
  Coding DNA Sequence Number=SeqID_16718
  Homolog annotation: Hit_ID=Q1SL66; Match level="QueryCoverage=98%, HitCoverage=96%, E-value=0.0, Identity=59%"; Hit description =Aldehyde oxidase and xanthine dehydrogenase, a/b hammerhead; Membrane attack complex ...
  Homolog annotation: Hit description=component/perforin/complement C9
  Pfam annotation: Domain name=MACPF; Domain location=133-312; Score =84.7; E_value=2.8e-22; Accession=PF01823.10; Description=MACPerforin domain
MSLTGSALEAALQAVGRGLDAAGDHRLLYCKGGGRLVALEEDRARDLPLPDGGVLPSVPPDVEVEQCRRDPERIRPFPSGPSSAAADGPFVCSFDKMAEYFNRKSCLSETVPLGSFNSLFSFTGSWKNDAAATKALAIDGYSLPLFRVKIRSSELTLLESVKHAIPNVWDPSALASFIENYGTHIIISVTVGGKDEVYIKQHSSSQLSGLEFKNYVREIGRERFSDVENKSNATPINYSEKKCVVFSGLRQDITVIFRRRGGCDLVQSFSDWKGTVASAPDVIGMTFLSIVSLVDDVPGKKHLARAVELYLTYKPPIEELQYFLDFQVPLVWAPAPPGIASHHRKEPVCPSLQFSLMGPKLFISTEQISVGRRPVVGLKLLLEGAKQNRLAIHLQHLVSLPKIFLPHWDSHITIGPPKWQGPEEQDSRWFEPIKWKNFAHVSTAPIEYTETNITDLSGVYIVTGAQLGVWDFGAKSVLHLKLLFSRVPGCTIRRSVWDHSPSSSSIHKADESSSSSSDNAKLLKIIDMTETLKGPQDAPGHWLITGAKLGVEKGRIVVRAKYSLLNY

SEQ ID NO: 58498 - protein, 477 aa, Zea mays
  Coding DNA Sequence Number=SeqID_16719
  Homolog annotation: Hit_ID=Q5XWK4; Match level="QueryCoverage=63%, HitCoverage=76%, E-value=4e-59, Identity=42%"; Hit description =Expressed protein-like
  Pfam annotation: Domain name=DUF616; Domain location=145-459; Score =502.8; E_value=3.9e-148; Accession=PF04765.4; Description=Protein of unknown function (DUF616)
  Subcellular localization annotation: CTP_CleavageSite=28; ConfidenceScore=5.39e-01
MPSSTIRSISITVSDDDGAAAAPSRRPRAGRRKAVARSLGQRAVRLVARWWPVLLLLPAVALLLFEASRLRASSPGPSPPVSSLGRLDPTTRLVHGVREPCLKLLSPKSLANVVFPEGTRLDSVVSRITYKTDDDDYDTYHSEANSTYLLQHAEATRFDLFTGFQTLAEREDSFKVVNETVSVHCGFYSDNGGFKISEEDRRYMRACKVVVSTCAFGGGDDLYQPIGMANSSIGRVLHSPLFSELNVRVCYVAFWDEVTLAAQEAEGKVIGDDSMIGRWRIIVVRSLPFVDQRLNGKIPKMLTHRLFTEARYSIWVDSKYQLRRDPIGMLEALLWRTNSTFAISEHGARSNIYDEGKAIVQKHKATPEEVEVQLTRYRQDGMPDTKRLHGLKALAEASVIVRELTPATNHFMCAWFNEVVRFTSRDQLSFPYVLWRLNMHGLSMFPVCTRRDLVNSLGHTRKVKPLTQTNSGSSTTS

SEQ ID NO: 58499 - protein, 547 aa, Zea mays
  Coding DNA Sequence Number=SeqID_16720
  Gene Ontology: Mol. function=transporter activity; Cellular component= membrane; Biological process=oligopeptide transport
  Homolog annotation: Hit_ID=Q5JNJ2; Match level="QueryCoverage=97%, HitCoverage=89%, E-value=0.0, Identity=69%"; Hit description =Putative nitrate transporter
  Pfam annotation: Domain name=MFS_1; Domain location=1-480; Score= -26.6; E_value=0.0052; Accession=PF07690.6; Description=Major Facilitator Superfamily
  Pfam annotation: Domain name=PTR2; Domain location=54-464; Score =322.6; E_value=7e-94; Accession=PF00854.12; Description=POT family
  Pfam module annotation: Pfam domain module=MFS_1::PTR2; Domain location=1-480::54-464
MASLSLAVNLMMYFLGVMHLNLEDASNLLTNYMGASYMISVLISVFADVFVGRYMTVILSSLVELVGLLLLMLQARSDRLKPPPCKDPRDPTTCPRVHGSNEVHLYLALYLIALGSGGIKAALPAHCADQFDAKHPREKLQMSSCFNYLLLSLCTGGAFSVTVFVWIQENKGWAKGFAAATGVMGLAVIVFIAGLPRYRIATVQGSSALKEIFQVYVAAVRNRKQQLPENPDELYEISKNKASPDTEFVAHRDRPFRFLDRAAIVQTAKDAAADPWRQCRVTQVEHAKTVLAMVPIFCSAIIMGTCLAQLQTFSMVQGSTMDTALGRHFQMPVASMPIIPLVFLIFAVPIYEQLFVPFARRLTGIPTGITYLQRVGVGLVLSIVSMVMAAVVEVQRKKVAERHGMLDMIPGFQHLPMSCFWLAPQFAVFGIADMFTYVGLMEFFYSQAPQALKSMSSSFLWCSLSLGYFMSTVIVKAVNKATKKKTASGGWLAGENINRNHLDLFFWLLAVLSTVNLFNYLFWASWYKYKPQEKTLATENEKQQEQV

SEQ ID NO: 58500 - protein, 159 aa, Zea mays
  Coding DNA Sequence Number=SeqID_16721
MEEETMLLRKQVEETEEFPRIEEVGLREEERRVLVDKREMGTVAAAYTEDAFPKMVEKLRLEVEECDLVRIQVASGDVMVSNQRMKEVKWWTGGHIFTFPMRVLDIGGNEVWAFVLLEQVVPEKEEENKPLAFLSKELGMKNKQLSSYEKEFVALILAV

SEQ ID NO: 58501 - protein, 61 aa, Zea mays
  Coding DNA Sequence Number=SeqID_16722
  Gene Ontology: Mol. function=hydrolase activity
  Homolog annotation: Hit_ID=Q6ERC2; Match level="QueryCoverage=69%, HitCoverage=10%, E-value=5e-10, Identity=67%"; Hit description =Cytidine/deoxycytidylate deaminase-like protein
MLNAQAYMPLVLASLGIVRGFQEEELPSIFNCMKAAIQLSKAGNAAIIVDPSSMQIVAKAH

SEQ ID NO: 58502 - protein, 253 aa, Zea mays
  Coding DNA Sequence Number=SeqID_16723
MAQRGRGEDRYGEAARRGPPVGLAINLGHAHVPLPVITGGYSSEKGGRGRERKNSSGEIHLGGSADGGGSRSGMVDGPCRGGFGAQTTRQRRSFGELESGRAQLGWGRRDKESEAGREVGTGSGFKRDRGGEFTQRRDVGTTASMCMSAARAGERLKEGRGLLESEGKRVGADKPVPPVRGGAELGQLGQKGWEGRERIGEGNQGRGTTGSCLGMRATTSEQDEGRSSERVGAQEDSMVGGQTSVQRRGGSMT

SEQ ID NO: 58503 - protein, 110 aa, Zea mays
  Coding DNA Sequence Number=SeqID_16724
MGRGRKGRGWPRRGDNKRKRASSPPSEDLDSEYSEEWSCGDSDDEGDDSGDDCGEGDDDDDGSSEGDDDNGIGDNDNDGDGGSKGDGGDGGSKGDNDNGNGKASGIAPLV

SEQ ID NO: 58504 - protein, 441 aa, Zea mays
  Coding DNA Sequence Number=SeqID_16725
  Gene Ontology: Mol. function=protein binding
  Homolog annotation: Hit_ID=Q1SYZ9; Match level="QueryCoverage=90%, HitCoverage=96%, E-value=1e-113, Identity=53%"; Hit description=AAR2
  Pfam annotation: Domain name=AAR2; Domain location=11-399; Score =389.8; E_value=4e-114; Accession=PF05282.2; Description=AAR2 protein
MASGGGAAARMDPEVATELVRKGATLLLLDVPQRTLFGIDTQMFSVGPKFKGMKMVPPGAHFVYYCSPNREVIAPIILYRIKVHAILLVIDSSSPVIVRKWDVQEERLIKLSEEEDIRYSEAVRHFEFDDQLGPYNLDSYGDWKQLSDYLSPNVIERLEPIGGEITIAWESSWMDKAPQSDMERRLVEQLREGKFAKNAPVQSGRRGCYYTSIPASVKHKDISGGDLTALNLDKTSLLETILAKNYEGQEDLFLGELQFAFIAFMMGQSLEAFMQWKALVSLLLSCSDAPLHTRTNMFIKFIRTLYYQLKHGFQHTQDSKSGDMGNSLCLDETWFSRDIFLYRLSKDFFTVVFEAPVVDGDLLSWVGIPEPICLTFPSHMQARKLKSLLETTFGWDLEDDAVNLIDEDDEVQWCADLYEVLLLVLTLNIRANYRLGFHLTV

SEQ ID NO: 58505 - protein, 248 aa, Zea mays
  Coding DNA Sequence Number=SeqID_16726
  Gene Ontology: Mol. function=alpha-N-arabinofuranosidase activity; Biological process=L-arabinose metabolic process
  Homolog annotation: Hit_ID=Q10M79; Match level="QueryCoverage=86%, HitCoverage=31%, E-value=3e-69, Identity=63%"; Hit description=Alpha- L-arabinofuranosidase C-terminus family protein, expressed
  Pfam annotation: Domain name=Alpha-L-AF_C; Domain location=77-248; Score=77.7; E_value=3.7e-20; Accession=PF06964.2; Description=Alpha -L-arabinofuranosidase C-terminus
MGRASDDYFNRFSSTSLGKVFFGSSASQSLEDFSRIKLVTKNDLAPQRGYCWGSILHQVICFPNLECLITQPVPGPSEYAVTGNDAGRGTLIAALAEAAFLIGLERNSDVVEMASCAPLFVNGNDQRWNPDAIVFNSWQHYGCPNYWMRVFFKDSSGATLHPSTIQLPNYDQLVTSAITWNNPHDGNTYMKIKDVNFGSKVVSLNISVTRLETDIQTFGSIKTVLTSGWLRDENSFQQPDKVVPAAVQ

SEQ ID NO: 58506 - protein, 117 aa, Zea mays
  Coding DNA Sequence Number=SeqID_16727
  Subcellular localization annotation: CTP_CleavageSite=38; ConfidenceScore=5.15e-01
MAGPAPLQLATAPRAVVSTACTSGTLPDRPAARSHRPQCSEQESRGRHYWSALIITIGAARATTFVANYTHYTSQRVTIDPYVASTTQKTIIDRRLVKKGNTADYNVLKKRFPVPQA

SEQ ID NO: 58507 - protein, 80 aa, Zea mays
  Coding DNA Sequence Number=SeqID_16728
MYILDLDLTLQVDRGRTGGASAAAQDGTKRAVAALAIFPLALVIAVAGWDFGHSCAFLTLSWMETKKVESVPGHNHAGSG

SEQ ID NO: 58508 - protein, 111 aa, Zea mays
  Coding DNA Sequence Number=SeqID_16729
MRQRHQFKAHRVAGDENESGEEGDSWKVMLRTRSEYVSWIGGGPNRPKCDISPESEAAWDGGRVAAGIYNLLLVVTRQSDFIIGGRDPGHNTIHLRGLLVDVRRDDDLLFS

SEQ ID NO: 58509 - protein, 111 aa, Zea mays
  Coding DNA Sequence Number=SeqID_16730
  Gene Ontology: Mol. function=protein serine/threonine phosphatase activity; Cellular component=protein serine/threonine phosphatase complex; Biological process=protein amino acid dephosphorylation
  Homolog annotation: Hit_ID=O81709; Match level="QueryCoverage=86%, HitCoverage=17%, E-value=2e-12, Identity=50%"; Hit description =Protein phosphatase 2C
MSCGRWPPRMWAQLRLSPVFSSHVVVTNCGYSDVVLHHGKEPIESSIDHKSDSKDEQARIEALGVGCKVIQWNGYQVCEVVSMIATLRGAWGVGPNYLKFPSILLLSVSTL

SEQ ID NO: 58510 - protein, 187 aa, Zea mays
  Coding DNA Sequence Number=SeqID_16731
  Subcellular localization annotation: CTP_CleavageSite=38; ConfidenceScore=5.35e-01
MNHGTTAEASSISVRQPLVDAQPPYRPWSMRLMLLLPSAAPAVASSSFSKEAAAEARLVRGCEARGREAQLPSYREERQNTPNRCAAAAAAWKGKRRWHGKEDDDGVVRSRRGQAEGSGTVGEAWIAATAMDGKVRWGGADCDSGMVGEQLRAAVAWWERIRAMRSGGRGLCDRTWRTIVNAYIEAL

SEQ ID NO: 58511 - protein, 180 aa, Zea mays
  Coding DNA Sequence Number=SeqID_16732
MTVASEAHRTVRCTPDSPSRPLRADSRCSAGAPDSPVNYSGGAPGKPKGEEFELIHPGAPDIVRNNYVAHYTSYCVLIEMVITEELGMNLENVEPHMLGSCKKLILFQPHVLKRNPFNDHLLLTNVDEEGHLYGVSGGSGGYAETIFLVITEELGMNLENVESHMLGSCKKGSLEKKHLL

SEQ ID NO: 58512 - protein, 135 aa, Zea mays
  Coding DNA Sequence Number=SeqID_16733
  Gene Ontology: Mol. function=protein serine/threonine kinase activity; Cellular component=membrane; Biological process=protein amino acid phosphorylation
  Homolog annotation: Hit_ID=Q6DTV6; Match level="QueryCoverage=70%, HitCoverage=23%, E-value=7e-38, Identity=76%"; Hit description =Serine/threonine and tyrosine protein kinase
  Pfam annotation: Domain name=Pkinase_Tyr; Domain location=1-108; Score=-140.9; E_value=0.0008; Accession=PF07714.7; Description =Protein tyrosine kinase
MASLVLSLLTSQTNVAKDPNVHVEDGSIGHTTRKLMSTVFAIVLWELVTGNVPFANMSAVQAAFAVVNKGVRPAIPHDCLPALAEIMTMCWDTNPEVRPPFAEIVRMLEQVEVEVLTTVRKARFRCCIAQPMTLD

SEQ ID NO: 58513 - protein, 78 aa, Zea mays
  Coding DNA Sequence Number=SeqID_16734
MTHAHDAGVAAVRPIEVGWGWRGRFHVPVWGFRFASGKMAPIHPKSPVTDQWDQVINRQTFGSSVGGDRGEEPSYCRG

SEQ ID NO: 58514 - protein, 59 aa, Zea mays
  Coding DNA Sequence Number=SeqID_16735
MARGRRPWAQWVAPASEEQGIAQRSTCSAAGPSGAMDHSLVAVSDYEPPGLLENGVRSP

SEQ ID NO: 58515 - protein, 109 aa, Zea mays
  Coding DNA Sequence Number=SeqID_16736
MAESAAADARAHDEGASQFDEAIAGRILLLDCFAARTVAATRTTSPHHTTATTREQEERPSGARSCAHGRPGERAAWAGASRALELGAERRPRERELCCQDEQIGVTWL

SEQ ID NO: 58516 - protein, 82 aa, Zea mays
  Coding DNA Sequence Number=SeqID_16737
MLLKEFCGLTVVPIGSRCTTRRTGTFPYVLVEKARQVLFQVMNAIAEWLGNVKPCGCSWCRRRRCSPSPAPRGDQKVVDELH

SEQ ID NO: 58517 - protein, 74 aa, Zea mays
  Coding DNA Sequence Number=SeqID_16738
MDGRAQRRRAMVEDAWSSKLAGADGYGRRRGREKLCAWGEGHLLSLLDSEGSKKSAREQRRRRGINRGEFYNFY

SEQ ID NO: 58518 - protein, 96 aa, Zea mays
  Coding DNA Sequence Number=SeqID_16739
MARGRRPWAQWVAPASEEQGIAQRSTCSAAGPSGAMDHSLVAVSDYGEYLVRFAVVLIVRGDLRLTSGEPCSAGPRGSGGVATMDIGRRRCLAGKG

SEQ ID NO: 58519 - protein, 43 aa, Zea mays
  Coding DNA Sequence Number=SeqID_16740
MARGSGAGFYTEVESAFREAMAENLAGAVARDPWQHNRDSNYV

SEQ ID NO: 58520 - protein, 153 aa, Zea mays
  Coding DNA Sequence Number=SeqID_16741
  Gene Ontology: Mol. function=oxidoreductase activity; Biological process=metabolic process
  Homolog annotation: Hit_ID=Q6K785; Match level="QueryCoverage=99%, HitCoverage=38%, E-value=1e-58, Identity=72%"; Hit description =Putative steroleosin
MAFYNASKAAQLRFYETLRTEVGSEVGITILTPGYVESEITKGKGMQKSGEVAVDEEARDAQIGVFPVGRVEALCEVALDGIRNGDWYVTWPSMYRPLQLIACLAPEVLDWMSDAMYKETTQGRRPLGQRIMEATGAKRLYPPSLLQPRIKAD

SEQ ID NO: 58521 - protein, 302 aa, Zea mays
  Coding DNA Sequence Number=SeqID_16742
  Homolog annotation: Hit_ID=Q6K785; Match level="QueryCoverage=21%, HitCoverage=16%, E-value=2e-09, Identity=53%"; Hit description =Putative steroleosin
  Subcellular localization annotation: CTP_CleavageSite=24; ConfidenceScore=5.14e-01
MSSGAESLRPSYGCDRTRPTKRVRCGSQRGPSWLAATKQQHVVVTFCRGFAARLWAPRPTSWRRMKGEHEEGEGPITWGKEGHTIANEEDTAPPYNLLLIVRPCSLEVSRSLRLPVEAICLRVERSSQPFGNDPTARELRDDVDRPICAVSNRLCYICKTYGHLRAGKLKKGSIKNAFVMLVDKIKRQKTIKSAVNKDILCNGGGYIYVLICNVHGRIGGQELAYQYAKEGACLALVARRVQALKAVAAAALERGAPDVLVFPADVSDPEQSRRAVEETVAHFGKRTCACMQLLSLLMNNAE

SEQ ID NO: 58522 - protein, 250 aa, Zea mays
  Coding DNA Sequence Number=SeqID_16743
  Gene Ontology: Mol. function=RNA-directed DNA polymerase activity; Cellular component=mitochondrion; Biological process=RNA-dependent DNA replication
  Homolog annotation: Hit_ID=UPI00004C1731; Match level="QueryCoverage =82%, HitCoverage=22%, E-value=3e-65, Identity=92%"; Hit description =UPI00004C1731 related cluster
  Pfam annotation: Domain name=rve; Domain location=106-250; Score =67.6; E_value=3.9e-17; Accession=PF00665.16; Description=Integrase core domain
MLLSRPGLHRPGLVLICLTVRSSLAHEGDDLTNYGAFGPFVSAGLLFISPLGKHLRYVLCLHFPASNNVAEYEALVNGLRIAIELGVRCLDARGDSQLVIDQVMKNSHCRDRKMEAYCDEKAPGGFSHLLVAIDKFSKWIEVRPLTSIRSEQVVAFFTNIIHRFGVPNSIITDNGTQFTGKKFLDFCEDHHISVDWAAVAHPMTNGQVERANGMLLQGLKPRIYNDLNKSGKRRMKELPSVVWSLRTTQR

SEQ ID NO: 58523 - protein, 67 aa, Zea mays
  Coding DNA Sequence Number=SeqID_16744
MAAFGQGLTACQPPLCQVALQSEWRRRRCHSVRPLYADGGYQLRIRRLEGTPNYGPRHFCYYEWSFP

SEQ ID NO: 58524 - protein, 135 aa, Zea mays
  Coding DNA Sequence Number=SeqID_16745
  Subcellular localization annotation: CTP_CleavageSite=60; ConfidenceScore=5.18e-01
MAKTALRYASQESPKDSSPCLTVSGSGRTEAGSCLPLPPTTTEPQRFMSGSGPWHPRRISAAAVSYRSSPLAGSRPGAHGGADGSGLLWLRSLVRRAAQRILLALALGCRNRPSLPESPPLPPAAADVTSLNSNS

SEQ ID NO: 58525 - protein, 637 aa, Zea mays
  Coding DNA Sequence Number=SeqID_16746
  Gene Ontology: Mol. function=RNA-directed DNA polymerase activity; Cellular component=mitochondrion; Biological process=RNA-dependent DNA replication
  Homolog annotation: Hit_ID=UPI00004C1731; Match level="QueryCoverage =99%, HitCoverage=43%, E-value=0.0, Identity=78%"; Hit description =UPI00004C1731 related cluster
  Pfam annotation: Domain name=RnaseH; Domain location=213-340; Score =13.5; E_value=3.2e-06; Accession=PF00075.14; Description=RNase H
  Pfam annotation: Domain name=rve; Domain location=419-573; Score =95.8; E_value=1.3e-25; Accession=PF00665.16; Description=Integrase core domain
  Pfam module annotation: Pfam domain module=RnaseH::rve; Domain location=213-340::419-573
MGPIKDLKGVQRVMGCLAALSRFISRLGERGLPLYRLLRKAECFTWTPKAEEALGNLKALLTNAPILVPPAAGEALLIYVAATTQVVSAAIVVERREEGHALPVQRPVYFISEVLSETKIRYPQIQKLLYAVILTRRKLRHYFESHSVIVVSSFPLGEIIQCREASGRIKKWAVEIMGETISFALRKAIKSQVLADFVAEWVDTQLLAAPIQPELWTMFFDGSLMKTGAGAGLLFISPLGKHLRYVLRLHFPASNNVAEYEALVNGLRIAIELGVRRLDARGDSQLVIDQVMKNSHCRDPKMEAYCDEVRRLEDKFYGIELNHIARRYNETADELAKIASGRTTVPPDVFSRDLHQPSVKTDDTPEPEKASAQPEAPSAQPEAPSAPEAPRASSSDAYPLPKARSSYKKYTRGLVVTTQRLEPLLETLSDKKAPGGYTHLLVAIDKFSKWIEVRPLNSIRSEQAVVFFTNIIHRFGVPNSIITDNGTQFTGRKFLDFCEDHHIRVVWAAVAHPMTNGQVERANGMILQGLKPRIYNDLNKFGKRWMKELPSVVWSLRTTPSRATGFTPFFLVYGAEAILPIDLEYDSPRARAYDDQSNRTNREDSLDQLEEARDMALLHSARYQQFLRRYHARGVRS

SEQ ID NO: 58526 - protein, 84 aa, Zea mays
  Coding DNA Sequence Number=SeqID_16747
MTTSLVVGRSKPGCGLPPALSFKDVHHPCLGGRRAESGSCLPHGPVTRFFLQHSGEKAFTGLAEKANFGYAGPAGCKRCQLPRA

SEQ ID NO: 58527 - protein, 103 aa, Zea mays
  Coding DNA Sequence Number=SeqID_16748
  Homolog annotation: Hit_ID=Q655H7; Match level="QueryCoverage=65%, HitCoverage=13%, E-value=4e-10, Identity=53%"; Hit description=LvsC -like
MNIVRGVADLLRKAPPPPPAPDAGAAPTASFSAGDFDDAPTPRVVFSGSLEEGALNALWKNYENALDKVNPNITEPDTGFLQNGRQSGRLLDALLSMLVDCKV

SEQ ID NO: 58528 - protein, 47 aa, Zea mays
  Coding DNA Sequence Number=SeqID_16749
MEKGGGAREGLTRERDCALRNACTVLWHNNQVKHNSRGGQGMHNTAQ

SEQ ID NO: 58529 - protein, 59 aa, Zea mays
  Coding DNA Sequence Number=SeqID_16750
MAVGVGWKKDESERVRASESGGNERCLLALHTIVETGRLTMSKHGKRIQKFTNFLQSMP

SEQ ID NO: 58530 - protein, 84 aa, Zea mays
  Coding DNA Sequence Number=SeqID_16751
MATIRPLWGYSKHSKLKDVVAWGPRVGHIMGCMGKLRHTRSPQDCMLHDGGLHDCGPDAKEPKNLILALLDMLVNSFEVVDLPI

SEQ ID NO: 58531 - protein, 204 aa, Zea mays
  Coding DNA Sequence Number=SeqID_16752
  Subcellular localization annotation: CTP_CleavageSite=51; ConfidenceScore=5.14e-01
MSTFLLFSCWTSLLSPLLCFIYKAFRHQNYLRRCTTSQRSYTSEALKLFPSETKKRKQKYVKVTSKHRKISPSKSKPEMMKDDLEQKAAIIEPRQLFLFLNINSEDDDVVELHILEEAPLAKIVVELKEVPTLTFSPSALQKDERIIPIMSAFIFYDKEDVGEDVAEAKGSKRTTVMTTVVMKDSGVPSIAVGAPTTTEIPKMF

SEQ ID NO: 58532 - protein, 160 aa, Zea mays
  Coding DNA Sequence Number=SeqID_16753
  Subcellular localization annotation: CTP_CleavageSite=87; ConfidenceScore=5.12e-01
MDGKAGWRLKKAGRGKGRGAAPEPPCPRRVPGTRLSPRYGDAPASSGFTAPAAGGATPATSQPRACSRGDGKPSRRLREGEGPSAARAGAAGVCKGVAWGSAAGGGTTASRRRGRGRVKPGDERGEGQGWPAAGKGAAPGGRDEPPGVAAGPGQLAGGCR

SEQ ID NO: 58533 - protein, 115 aa, Zea mays
  Coding DNA Sequence Number=SeqID_16754
  Homolog annotation: Hit_ID=Q6QP51; Match level="QueryCoverage=85%, HitCoverage=50%, E-value=2e-08, Identity=44%"; Hit description =Putative growth-regulating factor 1
  Subcellular localization annotation: CTP_CleavageSite=51; ConfidenceScore=5.40e-01
MALSATAPHPSTFSCRRRRSHPLPGKQRRPPRFCCCANRPGETDNGQDKPRAQQEAPPRPTPGLGLDLGLGRRSSPRPTPGLGLDLGLGRRSPPRPTPGLGLDFGLGKSHILART

SEQ ID NO: 58534 - protein, 331 aa, Zea mays
  Coding DNA Sequence Number=SeqID_16755
  Gene Ontology: Mol. function=sequence-specific DNA binding; Cellular component=nucleus; Biological process=regulation of transcription
  Homolog annotation: Hit_ID=Q6IEK7; Match level="QueryCoverage=60%, HitCoverage=57%, E-value=1e-64, Identity=64%"; Hit description=WRKY transcription factor 74
  Pfam annotation: Domain name=WRKY; Domain location=133-195; Score =111.8; E_value=2e-30; Accession=PF03106.6; Description=WRKY DNA -binding domain
MASTEMEMGVVGGGVNSSGGGSCGGLVVTELSHIKELVRQLEVHLGGSPDLCKHLASQIFSLTERSIGLITSSNLDGARRQKRPAGDAGLASPLSATPTSDVTDGPFQSTKKKRKVMEQRRQRVSSAGGENPVEDGHSWRKYGQKEILGAKHPRGYYRCTHRHSQGCPATKQVQRTDEDPTVYDVIYHGGHTCVHRAAAGQAQATAPPEHRPDAHGHLRSLGAGLTVKTETEEGLPAAAPLCLSASTPPVSGGGCPCPCLAPSTPENWGVSPASSNSNHAASYLPFEDAEWRGHAGLQEVVSASAPPPPAVDSLDDLLLLVDIDDIASLFD

SEQ ID NO: 58535 - protein, 226 aa, Zea mays
  Coding DNA Sequence Number=SeqID_16756
  Subcellular localization annotation: CTP_CleavageSite=48; ConfidenceScore=5.38e-01
MAAPLPSASRMFIIRAGGKGKPSWGPAFRTGWRPTSSFSIWGRRVFTSLAEEANYQLLLGKGAVVRPPHGRRSHHAQVPHVHSSSCAAGHTGGAYKTSYATGGGVRVPGRSCPHSRGEDGSEDLPVRFGAAAIRRCGVGAQVAAVIGAEVVAASADETVSATYGRTSGSLALMACPRPRTGDGDESLFTVAFALRQSLLLSSRPRRRSLSLLVQWSPASRLELVVL

SEQ ID NO: 58536 - protein, 146 aa, Zea mays
  Coding DNA Sequence Number=SeqID_16757
MEVVHRCNYAQIHIVVAFVTARMVENSTVHPVPTAVPTTRERLTIVAATPGFSLGCNKELRLARPQASTSASASGGGLRLAQPQPQPREESPPRPTSASDQLCYWGSIITLPLASRFRLRRNKTGHFSDGHVGTCIGLKALHRQPR

SEQ ID NO: 58537 - protein, 72 aa, Zea mays
  Coding DNA Sequence Number=SeqID_16758
MAPARNSGLVVAASPQHQRGGEGQLLYACTVYYTPRVGERSMEAHGSADIDKINPRLDLIVAPTVDPMADTC

SEQ ID NO: 58538 - protein, 98 aa, Zea mays
  Coding DNA Sequence Number=SeqID_16759
MDGGAVAPASLYLPRYAMTGAPVWMALNSTPNDHFPSINCTNPGQNLSVHDDGGNREQFDMFLAIQGSLAQLNRLTGDEPDSRHVAPDRWAAYSGELI

SEQ ID NO: 58539 - protein, 115 aa, Zea mays
  Coding DNA Sequence Number=SeqID_16760
MSHGALDSPPLLRWRIGQSGVTPVSPVNYSGVAPRIPEGGKFGVGFPGAPDIVRWHTGQSGTFGLGLKPYMMQKARMKTKADVAPKLRTKELRLDGRKRNRLKGEKAIYSSLGCP

SEQ ID NO: 58540 - protein, 138 aa, Zea mays
  Coding DNA Sequence Number=SeqID_16761
  Subcellular localization annotation: CTP_CleavageSite=26; ConfidenceScore=5.57e-01
MKKKHRTLQSFFSPALTPVVCNVQPRSNPNSQPTVGTGISNNQAQEISTEEATVEAVLNPTSDEQEQEIPPSEQSLWLFRPGSWLISGSATVSMACRPSAYRWQTTYEARRGLRGSPAELDLNPRKGLHQGRKILELS

SEQ ID NO: 58541 - protein, 599 aa, Zea mays
  Coding DNA Sequence Number=SeqID_16762
  Gene Ontology: Mol. function=hydrolase activity, hydrolyzing O -glycosyl compounds; Cellular component=anchored to membrane; Biological process=carbohydrate metabolic process
  Homolog annotation: Hit_ID=Q10P58; Match level="QueryCoverage=62%, HitCoverage=91%, E-value=1e-106, Identity=57%"; Hit description =Glycosyl hydrolases family 17 protein, expressed
  Pfam annotation: Domain name=Glyco_hydro_17; Domain location=196-480; Score=159.3; E_value=1e-44; Accession=PF00332.9; Description=Glycosyl hydrolases family 17
  Subcellular localization annotation: CTP_CleavageSite=65; ConfidenceScore=5.31e-01
MKFNDIYPPIPLITQKTIRSDFLRLSNFFSGKSLSFVNGEPAGCGFGASPKIQPLRQPLQPCRVTVSRVVPLDSTPQDPLLSTINVSWDPRFSIIDVFVPGGSHFFLLDSPQSSVRNLFALAVAVTTVLQGWRRVACSRSVGVSSAPVAFASPRRCARLWSRWRWRPPWMPRRRRFWASTTAAWGTTSRRLSPSCRCSRASVLAACGCTTPTPPCCARSPRTGVELIVGVPDECLAAVADPSGAAQWLKENVAPFLPDTKISVLAVGNEVLTGANSSTLSRTLLPAMQSLHGAVAALGLDKQITVTSAHNLGVLGTSYPPSAGAFRKDLLPYLCPILDYHARTGSPFLVNAYPYFAYSSDPRGAALPPTSSWRRWTRCTTPSRRPIPRRRGWWRCGSRRPAGPPRGPANETAATPQNAARYNSNAMRLVAEGKGTPLKPGAPLRAYVFALFNENLKPGLASERYYGLFKPDGTPAYELSFKLPRDNSTFGHGDTGKGGGGIGGNGNGNGSSWNNSGGGNSGYYDISASARDTTDQEWSGVAVLGQRPDLVLLRWIRFACLLEMKPFPNTGSTLMDPKNRNPNWDRWGPKDASAGFPVVG

SEQ ID NO: 58542 - protein, 155 aa, Zea mays
  Coding DNA Sequence Number=SeqID_16763
  Gene Ontology: Mol. function=structural constituent of ribosome; Cellular component=ribonucleoprotein complex; Biological process =translational elongation
  Homolog annotation: Hit_ID=P46252; Match level="QueryCoverage=63%, HitCoverage=89%, E-value=2e-24, Identity=62%"; Hit description=60S acidic ribosomal protein P2A
  Pfam annotation: Domain name=Ribosomal_60s; Domain location=60-154; Score=140.7; E_value=4.1e-39; Accession=PF00428.9; Description=60s Acidic ribosomal protein
MTKPTEASGIIAHRLPIAAVGKKEPKKRYSQSTVSSEHTIDSRMKVVAAYLLAVLAGNASPSAEDLTGILESVGCEVDNERMELLLSQLSGKDITELIAAGREKFASVPCGGGGVAVAAGAPAAGGAAPAAEAKKEEKVEEKEESDDDMGFSLFD

SEQ ID NO: 58543 - protein, 415 aa, Zea mays
  Coding DNA Sequence Number=SeqID_16764
  Homolog annotation: Hit_ID=Q9LIJ1; Match level="QueryCoverage=69%, HitCoverage=76%, E-value=1e-44, Identity=38%"; Hit description =Arabidopsis thaliana genomic DNA, chromosome 3, TAC clone:K24A2
MAVPAYELMFGKVSLHNLFEDYFDQAGNMTSRIMLKPLEDPHVDLIATVSCQTLLIISAASSVPSSFQYHVFSGCCIVPQAEVFTYIFVDITYNLVPDFEMLTSFRELDDPHTFVDLLVSTSNPLLQLRLCAYHPKYRIGAFGTLPLLMGNRVRSEDYGVMGYPVRYPLVHGWLGEKGAYLQEYNTSHLVSVTRLNGGSKYPMPFTELENWNYAISYGVGSTSPLSPSFIFSLELARSTQLTASFYQHLVVQRRVKNPFEDDQVVGITNYIDFGLELAAKVDKDKVSGDGNSFQLAASWQANKNFLLKGKLGPSTSSVALAFKSWWRPSFTFSVTAVNDHSKGTTSYGFGLRVEDLRRASYQRADPNYVMLTPSKEHLAPGVLREYGKRPMFQTQIDSGNYDHLPTELKPLGRIF

SEQ ID NO: 58544 - protein, 371 aa, Zea mays
  Coding DNA Sequence Number=SeqID_16765
  Gene Ontology: Mol. function=protein serine/threonine kinase activity; Cellular component=membrane; Biological process=protein amino acid phosphorylation
  Homolog annotation: Hit_ID=Q8LQ53; Match level="QueryCoverage=98%, HitCoverage=98%, E-value=1e-148, Identity=70%"; Hit description =Protein kinase 6-like
  Pfam annotation: Domain name=Pkinase; Domain location=74-341; Score =155.0; E_value=2e-43; Accession=PF00069.15; Description=Protein kinase domain
  Pfam annotation: Domain name=Pkinase_Tyr; Domain location=75-341; Score=184.1; E_value=3.4e-52; Accession=PF07714.7; Description =Protein tyrosine kinase
  Pfam module annotation: Pfam domain module=Pkinase::Pkinase_Tyr; Domain location=74-341::75-341
MKEEGGGGDAGFVRADPDRPQEPGRAAGAPSHPRLDHGEAQGGGLRRRWRRRPGSTSSPGARGGRTGRSTPPKLVVKGVIAPRHLWHRPTAASTTLTTSQDGHRSEQDIAALRAAFSQEVSVWHKLDHPNVTKFIGAIMGARDLNIQTENGHIGMPTNICCVVVEYLPGGALKSFLIKNRRKKLAFKVVVQIALDLARGLSYLHSKKIVHRDVKTENMLLDKTRTVKIADFGVARLEASNPSDMTGETGTLGYMAPEVLNGNPYNRKCDVYSFGICLWEIYCCDMPYPDLSFSEVTSAVVRQNLRPEIPRCCPSSLSNVMKRCWDANPDKRPEMAEAVSMLEAIDTSKGGGMIPVDQRPGCLACFRQYRGP

SEQ ID NO: 58545 - protein, 163 aa, Zea mays
  Coding DNA Sequence Number=SeqID_16766
MKLYKFRSWGTYILYQVRNLPLWKVVGAASTNWRLSRGIHCYEKAGNSPHSKTDKITPLPEAVDAARAAAVAAAEAKCAASVAEKEARAAVQSATIAADKVQLAVDAVKYRRFVEDNSIVDSLVTDFTFSITLPFEGSVQESREDFNCVCKSLQTVSYPIVTL

SEQ ID NO: 58546 - protein, 509 aa, Zea mays
  Coding DNA Sequence Number=SeqID_16767
  Gene Ontology: Mol. function=sugar porter activity; Cellular component=integral to membrane; Biological process=carbohydrate transport
  Homolog annotation: Hit_ID=Q94EC4; Match level="QueryCoverage=99%, HitCoverage=99%, E-value=0.0, Identity=76%"; Hit description =Putative monosaccharide transport protein
  Pfam annotation: Domain name=MFS_1; Domain location=19-446; Score =80.4; E_value=5.5e-21; Accession=PF07690.6; Description=Major Facilitator Superfamily
  Pfam annotation: Domain name=Sugar_tr; Domain location=24-486; Score =578.5; E_value=6.2e-171; Accession=PF00083.14; Description=Sugar (and other) transporter
  Pfam module annotation: Pfam domain module=MFS_1::Sugar_tr; Domain location=19-446::24-486
MAGGTFTEKGKQYPGKMTVFVFLTCLVASSGGLIFGYDIGISGGVTSMDPFLKRFFPSVYAKEQEVVETNQYCKFDSVLLTLFTSSLYLAALVASLFAGYVTKKCGRRMSMLGGGAIFLVGAVLNGFAQNVAMLIVGRIFLGIGVGFSNQSVPLYLSEMAPARMRGMLNISFQLMTTVGILVANLINYFTAKIPGGWGWRIGLGLAAVPAVIMVGGSIFLPDTPNSLVSRGKVESARAMLRRIRGTDDVSLEFDDMVAASEATKAIQNPWGTLLQRRYRPQLVMAVLIPTLQQLTGINVVMFYAPVLFKTIGFGGTASLMSAVITGLVNMFSTFVSIATVDRLGRRKLLLEGGIQMILAQFVLGTLIAVKFGTAGVAAISRPYAIGVVFCICVFVAAFAWSWGPLGWLVPSEIFPLEIRSAGQSVVVVFNMIFTFIIAQIFLMLLCRLKFGLFYFFGAWEIAMTLFVYFFLPETKGIPIEEMDQIWANHWYWKRFVDGGRKVELMSTAV

SEQ ID NO: 58547 - protein, 86 aa, Zea mays
  Coding DNA Sequence Number=SeqID_16768
MWSPGRSPDLRGKKHEDKTPSNEAKISSDKHKEDKEEYAISIKSHKKKGDKKKKKMKKVVYETDSSMPSTSDAESTFLKRHDRKSI

SEQ ID NO: 58548 - protein, 46 aa, Zea mays
  Coding DNA Sequence Number=SeqID_16769
MAMMGSKSEKMYLFQVRKQPTFVASVPRWYQRKSTRSEAAGGKDPP

SEQ ID NO: 58549 - protein, 205 aa, Zea mays
  Coding DNA Sequence Number=SeqID_16770
MEAITVFSRDEAEAGDAASGAASPTVSDLLCAIPDTPEVAPSLGTWRAEEAGPSDTPEMVLGGGLLGDEIIIEPFLSGGSGDLIHAAPDPSIWGGPTVVWMSTEGGPYFILDDLKERELLAEMRVATQERMTRSMSKSIFVHRERDVWATLQRHWLALLRSNEQLAWRSAEVADLMSRCKGMKEEGVADRESIRRLRDEVSDLKA

SEQ ID NO: 58550 - protein, 655 aa, Zea mays
  Coding DNA Sequence Number=SeqID_16771
  Gene Ontology: Mol. function=carbamoyl-phosphate synthase activity; Cellular component=cytoplasm; Biological process=pyrimidine nucleotide biosynthetic process
  Homolog annotation: Hit_ID=Q8L6J9; Match level="QueryCoverage=90%, HitCoverage=78%, E-value=0.0, Identity=63%"; Hit description =Putative carbamoyl phosphate synthase large subunit
  Pfam annotation: Domain name=CPSase_L_D2; Domain location=193-429; Score=453.3; E_value=3e-133; Accession=PF02786.7; Description =Carbamoyl-phosphate synthase L chain, ATP binding domain
  Pfam annotation: Domain name=CPSase_L_D3; Domain location=489-612; Score=228.8; E_value=1.2e-65; Accession=PF02787.9; Description =Carbamoyl-phosphate synthetase large chain, oligomerisation domain
  Pfam annotation: Domain name=CPSase_L_chain; Domain location=71-191; Score=183.6; E_value=4.9e-52; Accession=PF00289.12; Description =Carbamoyl-phosphate synthase L chain, N-terminal domain
  Pfam annotation: Domain name=Dala_Dala_lig_C; Domain location=193 -394; Score=-98.8; E_value=0.0032; Accession=PF07478.3; Description=D- ala D-ala ligase C-terminus
  Pfam annotation: Domain name=GARS_A; Domain location=198-369; Score= -119.7; E_value=0.073; Accession=PF01071.10; Description =Phosphoribosylglycinamide synthetase,
  Pfam module annotation: Pfam domain module=CPSase_L_D2::CPSase_L _D3::CPSase_L_chain::Dala_Dala_lig_C::GARS_A; Domain location=193 -429::489-612::71-191::193-394::198-369
  Subcellular localization annotation: CTP_CleavageSite=45; ConfidenceScore=5.61e-01
MATSLYTPSQLRPSHSQARRLGSHPRVCSARCPARRRRAAAISVRASTDGDAAVTVRRFPAAPTKAGGLSGVKKIMILGAGPIVIGQACEFDYSGTQACKALVEEGYEVVLVNSNPATIMTDPGLAHRTYIGPMTPTLVERIIDAERPDALLPTMGGQTALNLAVSLADSGALDRLGVRLIGASLPAIRAAEDRQLFKQAMDRIGLQTPPSGIGTTLEECLTIAEDIGEFPLIVRPAFTLGGTGGGIAYNRAEFEDICRAGLTASHTQQVLVEKSLLGWKEYELEVMRDMADNVVIICSIENIDPMGVHTGDSITVAPAQTLTDKEYQRLRDYSVAIIREIGVECGGSNVQFAVNPADGEVMVIEMNPRVSRSSALASKATGFPIAKMAAKLSVGYTLDQIPNDITKKTPASFEPSIDYVVTKIPRFAFEKFPGSEPILTTQMKSVGEAMALGRTFQESFQKAVRSLETGFAGWGCGPIKELDWDWEQIKYSLRVPNPDRIHAIYAAFKKGMRVEDIHEISFIDKWFLTELRELVDVEQFLLSRSLDQLSKDDFYQVKRRGFSDKQIAFATSSSESDVRSRRLALGVTPSYKRVDTCAAEFEANTPYMYSSYEYECESAPTNKKKVLILGGGPNRIGQGIEFDYCCCHASFALRE

SEQ ID NO: 58551 - protein, 114 aa, Zea mays
  Coding DNA Sequence Number=SeqID_16772
MALELGEIVASTCGSAVQVLLRSMALELEEIIVASRSGGGLRSEDSRGEDPPEEALEDANGGAWHGEGYAWSRMGDASAGWNNKSGRHGGKGAGGRSESPPLTPTSCLRSSTAP

SEQ ID NO: 58552 - protein, 124 aa, Zea mays
  Coding DNA Sequence Number=SeqID_16773
MLRPDEQPPPERGDDDDNDHIGCLRGVNDVDKAPQRAARHGRGRPQVQGIPRATIVFADFYTPIRRILENPNQFGVVVSDVPKARPCARIPQSPPSLSSSPESPPSDTTSTHPASPCTKHTSSS

SEQ ID NO: 58553 - protein, 164 aa, Zea mays
  Coding DNA Sequence Number=SeqID_16774
  Homolog annotation: Hit_ID=Q6QP51; Match level="QueryCoverage=49%, HitCoverage=26%, E-value=8e-15, Identity=54%"; Hit description =Putative growth-regulating factor 1
MQAACNRTKGAHPFDFDASSMEAHAHTSCNRRAGYCVQETAPPLAPLPCLLDCGTSTATRGTGKGDTPKGILLREGNGPRAPLLIRGSKAGPSEGFNSRLKALGLRAHYWSEVRRPTPQKGSTAASGHSGSAPTTDQGFVGWPPKGSTTASDAERGMTLDTFDT

SEQ ID NO: 58554 - protein, 261 aa, Zea mays
  Coding DNA Sequence Number=SeqID_16775
  Gene Ontology: Mol. function=DNA-directed RNA polymerase activity; Biological process=transcription
  Homolog annotation: Hit_ID=Q5QM91; Match level="QueryCoverage=96%, HitCoverage=53%, E-value=4e-81, Identity=61%"; Hit description=RNA polymerase III subunit-like protein
  Subcellular localization annotation: CTP_CleavageSite=50; ConfidenceScore=5.47e-01
MVSQHGILLAVNIISDHFGPIVSVSPLPSPPSPLPAVPRTLSLTLASPILSSTERAGDRTVTLYLAIFDNVLHRLRFSKFLSVVRVDIPESEVLLEGLLQNGRLTFEQLVERTIFKVSEDSPLPTREEVRMNFNKLVYAHYVERCPKPEPFFDPLAVEQPTSTRKRAPKTVEAVLSLEQKVVCTAALSDAERFSEIPYFMDGSSSAKDGHHAVAGNKRKHETLEVDEDDSIIAESEVLWRINFERFIFCLKKKMGLLEAGS

SEQ ID NO: 58555 - protein, 68 aa, Zea mays
  Coding DNA Sequence Number=SeqID_16776
MRVCQRAQMREERWASKARGLKRGAWARTWLENARSWARPRRGDRGQEVEDELTGFSIQIQIKFRNSN

SEQ ID NO: 58556 - protein, 110 aa, Zea mays
  Coding DNA Sequence Number=SeqID_16777
  Subcellular localization annotation: CTP_CleavageSite=35; ConfidenceScore=5.19e-01
MGALFHGVKTTRPCSVPRTACARGRPANRPSRRINSSVGQATPWQLKRALFHLHHDDHVKKGTGKGDIPKGILLREGSEPRALLLIRGSKAGPSEGFDSRPRALGLQAHY

SEQ ID NO: 58557 - protein, 500 aa, Zea mays
  Coding DNA Sequence Number=SeqID_16778
  Gene Ontology: Mol. function=protein serine/threonine kinase activity; Cellular component=cell surface; Biological process =protein amino acid phosphorylation
  Homolog annotation: Hit_ID=Q9FG33; Match level="QueryCoverage=95%, HitCoverage=72%, E-value=3e-94, Identity=42%"; Hit description =Lectin-like protein kinase
  Pfam annotation: Domain name=Lectin_leg-like; Domain location=42-261; Score=-104.4; E_value=0.021; Accession=PF03388.4; Description=Legume -like lectin family
  Pfam annotation: Domain name=Lectin_legB; Domain location=31-257; Score=227.7; E_value=2.5e-65; Accession=PF00139.10; Description =Legume lectin domain
  Pfam annotation: Domain name=Pkinase; Domain location=333-498; Score=- 64.9; E_value=0.00011; Accession=PF00069.15; Description=Protein kinase domain
  Pfam annotation: Domain name=Pkinase_Tyr; Domain location=333-497; Score=-72.2; E_value=4.9e-08; Accession=PF07714.7; Description =Protein tyrosine kinase
  Pfam module annotation: Pfam domain module=Lectin_leg-like::Lectin _legB::Pkinase::Pkinase_Tyr; Domain location=42-261::31-257::333 -498::333-497
MASPSHTGIRRRFALLASATLAILVLCGTCSCLQFSYPTFGAANEADFSFTPGAGIEDGALQITPSTGDLRHRSGRVCYARETLKLWNRRRTALTSFRTEFVLNIVPRNGTGEGMAFILTNNPELPRNSSGQWLGLVNGQTDGSPANRIVAVEFDTRKSGKHDHDDNHVGLDVNGIESASAYPVGNLSIVLSSGADVWVTIQYDGATLSIVAVQTYSFMYAWAGDLSQYLTDDITVGFAASTGDFTELNQIKSWNFTTLGDDADGRWRHRKKMRLLLAYLIPFAIAGSFLAFCVWRRLTRPRRLAYRNLEKMIDAQGPVKFKFRELRNATANFSSDRKLGRGGFGTVYLGYLKRMGVNVAVKRVMTSGNSNRGEQEFVAEVNSISKLSHRNLVKLMGWCHERGELLLVYEYFPMGSLDRHLYADAGAISNAPASASEATPELTWERRYRIVCGVASALDYLHHGSSKRILHRDVKAQQRDGGRRVRGAAGRLRPGPRHTA

SEQ ID NO: 58558 - protein, 802 aa, Zea mays
  Coding DNA Sequence Number=SeqID_16779
  Gene Ontology: Mol. function=binding; Cellular component =intracellular; Biological process=metabolic process
  Homolog annotation: Hit_ID=Q1RXQ0; Match level="QueryCoverage=99%, HitCoverage=97%, E-value=0.0, Identity=33%"; Hit description =Tetratricopeptide-like helical
  Pfam annotation: Domain name=PPR; Domain location=173-207; Score =42.2; E_value=1.8e-09; Accession=PF01535.11; Description=PPR repeat
  Pfam annotation: Domain name=PPR; Domain location=274-308; Score =27.3; E_value=5.4e-05; Accession=PF01535.11; Description=PPR repeat
  Pfam annotation: Domain name=PPR; Domain location=344-378; Score =17.5; E_value=0.047; Accession=PF01535.11; Description=PPR repeat
  Pfam annotation: Domain name=PPR; Domain location=406-440; Score =23.5; E_value=0.00073; Accession=PF01535.11; Description=PPR repeat
  Pfam annotation: Domain name=PPR; Domain location=442-476; Score=3.7; E_value=2.8; Accession=PF01535.11; Description=PPR repeat
  Pfam annotation: Domain name=PPR; Domain location=508-542; Score =43.3; E_value=8.3e-10; Accession=PF01535.11; Description=PPR repeat
  Pfam annotation: Domain name=PPR; Domain location=543-577; Score =13.4; E_value=0.19; Accession=PF01535.11; Description=PPR repeat
  Pfam annotation: Domain name=PPR; Domain location=579-612; Score =10.8; E_value=0.4; Accession=PF01535.11; Description=PPR repeat
  Pfam annotation: Domain name=PPR; Domain location=645-679; Score =15.2; E_value=0.12; Accession=PF01535.11; Description=PPR repeat
  Pfam annotation: Domain name=PPR; Domain location=9-43; Score=30.0; E_ value=8.5e-06; Accession=PF01535.11; Description=PPR repeat
  Pfam module annotation: Pfam domain module=PPR::PPR::PPR::PPR::PPR::PP R::PPR::PPR::PPR::PPR; Domain location=173-207::274-308::344-378::406- 440::442-476::508-542::543-577::579-612::645-679::9-43
MDIAHPNVITHNVMLNGYAKLGRLSDAVELFGRMPARDVASWNTLMSGYFQSRQYLVSLETFLSMHRSGDSWPNAFTLACAMKSCGALGWHSLALQLLAMVQKFDSQDDSEVAAALVDMFVRCGAVDLASRLFVRIKEPTMFCRNSMLAGYVKTYGVDHALELFDSMPERDVVSWNMMVSALSQSGRVREALDMVVDMQSKGVRLDSTTYTSSLTACARLSSLRWGKQLHAQVIRNLPHIDPYVASALVELYAKSGCFKEAKGVFNSLHDRNNVAWTVLISGFLQYGCFTESVELFNQMRAELMTLDQFALATLISGCCSRMDLCLGRQLHSLCLKSGQIQAVVVSNSLISMYAKCDNLQSAEAIFRFMNEKDIVSWTSMITAYSQVGNVAKAREFFDGMSEKNVITWNAMLGAYIQHGAEEDGLRMYKVMLSEEYVRPDWVTYVTLFKGCADLGANKLGDQIIGRTVKVGLIIDTSVANAVITMYSKCGRILEARKVFDFLNVKDIVSWNAMITGYSQHGMGKQAIEIFDDILKRGAKPDYISYVAVLSGCSHSGLVQEGKFYFDMMKRAHNISPGLEHFSCMVDLLGRAGHLTEAKDLIDDMPMKPTAEVWGALLSACKIHGNNELAELAAKHVFELDSPDSGSYMLMAKIYADAGKSDDSAQIRKLMRDKGIKKNPGYSWMEVDNKVHVFKADDVSHPQVLAIRKKLDELMEKIARLGYVRTDSTRSEIHHSEKLAVAFGLMTLPTWMPIHIMKNLRICGDCHTVIKLISTVTGREFVIRDAVRFHHFNGGSCSCGDYW

SEQ ID NO: 58559 - protein, 82 aa, Zea mays
  Coding DNA Sequence Number=SeqID_16780
  Homolog annotation: Hit_ID=Q5W7C9; Match level="QueryCoverage=37%, HitCoverage=11%, E-value=1e-07, Identity=87%"; Hit description =Unknow protein
MGESLTEQCRVEVEGLRVVNFFSRRRNNDAGNAVNQVSLRQEMVLECKGRRDPELLSSVPTKEALLFNQFVSPGPSGGMAFP

SEQ ID NO: 58560 - protein, 44 aa, Zea mays
  Coding DNA Sequence Number=SeqID_16781
MKEGMGKQKQKQASDKGCSRAAPAAEGQQLSYLSRAGTAAAQRG

SEQ ID NO: 58561 - protein, 471 aa, Zea mays
  Coding DNA Sequence Number=SeqID_16782
MALGSARFLPALLLATSEAMQKREGFEGCGLGVGEERQVVQGVVHHGRATAPMLQSAAGEGRKDLILFVLPFLFASHAMQRNVCRRDSFITHRAFCDALTEESAKAIGGVNAMAAPVHHHHHPMLFSPPPAHVMQQQDVLLLQEHQHHQHQQQQQEDDVMQQPPPQQCNYAMKTEMPPWPAMAYDHPLLQPLCNAAAAAAAQGSAATSAPQLPAASAHLSATALLQKAAQMGATIGGAGYTQMAGPATSATAAFGLGLPGLQNAQHHHPQQQDGGGGVMAAGLARTASSHGRGGDEGGGGGSGDGMTRDFLGLRAFSHRDILGLAGPGLLVHGRHHRQRQHGLLRATATTYTASGAAAAAKQQRTMARHGAAIASLGRRYPFWHQSYFLCVFLSSAVLHRRRCFNSDYRCRRARCRGKTSYGRPPRVQRVAFESGNLIVSRPSLRSSFAPVHAVIPSELLTTQCKQACKLG

SEQ ID NO: 58562 - protein, 687 aa, Zea mays
  Coding DNA Sequence Number=SeqID_16783
  Gene Ontology: Mol. function=protein dimerization activity; Cellular component=chromatin; Biological process=electron transport
  Homolog annotation: Hit_ID=Q2QPA8; Match level="QueryCoverage=99%, HitCoverage=87%, E-value=0.0, Identity=66%"; Hit description=HAT family dimerisation domain containing protein
  Pfam annotation: Domain name=DUF659; Domain location=193-345; Score =204.4; E_value=2.6e-58; Accession=PF04937.6; Description=Protein of unknown function (DUF 659)
  Pfam annotation: Domain name=hATC; Domain location=544-635; Score =48.1; E_value=3e-11; Accession=PF05699.5; Description=hAT family dimerisation domain
  Pfam annotation: Domain name=zf-C2HC_plant; Domain location=2-46; Score=41.2; E_value=3.6e-09; Accession=PF07567.3; Description =Protein of unknown function, DUF1544
  Pfam module annotation: Pfam domain module=DUF659::hATC::zf-C2HC _plant; Domain location=193-345::544-635::2-46
MSKKHAIQCKYCDKVIHGGITRVKYHLANIGGFNVTKCKKVPAHVKQEMEALLTKKTGEKEQRKKEKQRERDEIDLDKSDGSDEEEKEHENDIIVLKSTRESNNCSNSRPPTSGGSGTIDNFYKPQSVEESVHKNKIQTKLSTQKREERRDRACEYICQFFYEAGIAHNTVTLPSFGHMLEAIGAFGRGLRGPSAYEMSGPFLKRAKQKVLDRFKNHHESWQLTGCSVMTDAWTDRKGRGVMNLVVHSAHGVCFLDLVDCSAVKKDRKYVFDLVDRCIQEIGEENVVQVVTDNASVNTAAASLMAAKRPSIFWTGCAAHCLDLMLEDIGKLGPIEQTIASARQVTTFLYAHTRVLDLMRKFLGNDLVHSGVTRFATAYLNLKSLQDNKKDIARLFRSDELNELGYLKKAKGKKANKVVALEGFWKNVDMAINFFEPLANVLRRMDSDVPAMGFFHGCMLEAKKEIATRFDNNESKYRAAWDIIDKRWDNKLKTPLHLAGYYLNPYFYYPNKSSIELDGSFRAAVISCITKMFDDEDTQDSIIEELNIYQDQQGAFGHDIAVRQRRNKTFNPAKWWMNHGTTTPHLRILATRILNLTCSSSGCERAWSVFEQIHTKKRNKLLHDRMRDLVFVKFNSKLREKRDNKSKDPIEKELNDILEDDGNEFITGVVLDENVDQDEDQEGAHDEP

SEQ ID NO: 58563 - protein, 144 aa, Zea mays
  Coding DNA Sequence Number=SeqID_16784
MAGSKDHIEISQDNILRPVVSSPSTDEQKQYEDLMSQVRENAHRHLAKVEQEATKKFLSYFIVDHHYKITKHGEIEIASLLPSLQISNPQSLYGMPMNSYPGQIPPPSSLLDISSTLDMTGPFTSNRRPSIPNIDSLALPYRTV

SEQ ID NO: 58564 - protein, 93 aa, Zea mays
  Coding DNA Sequence Number=SeqID_16785
  Homolog annotation: Hit_ID=O24587; Match level="QueryCoverage=31%, HitCoverage=2%, E-value=2e-09, Identity=96%"; Hit description=Pol
MTGEKKMFSSYVKNKDSQDSIIFGDGNQGKGYDDENADISHIGSIIVVKDWFSKLDKDNDGVFFSVKNPRTCLRVDPIKEESSRGLRGMIVED

SEQ ID NO: 58565 - protein, 103 aa, Zea mays
  Coding DNA Sequence Number=SeqID_16786
  Homolog annotation: Hit_ID=Q9FG92; Match level="QueryCoverage=80%, HitCoverage=25%, E-value=1e-22, Identity=60%"; Hit description =Genomic DNA, chromosome 5, P1 clone:MQD19
MAGGVYTSDKEAGERRKIERMIRQLEKQQRSNGDGVNNNLSKLREDLEYVRFFPKNEKYVSLFTGGNSQDIVQERNKWRKQIKENLMAAAANGKDLEGVCLRY

SEQ ID NO: 58566 - protein, 193 aa, Zea mays
  Coding DNA Sequence Number=SeqID_16787
  Subcellular localization annotation: CTP_CleavageSite=64; ConfidenceScore=5.09e-01
MDCQGKHGVKPPTPMLAGSDAAYVCKALVVSNKGSRSIWSSNEAAGGGQGQGRRCKAGAAAGPRAGTRVGGAVARLEQRQGHGRGQGMVYKLLPQSLAERYGSRAAALLERVRSGSPPHRQSCGGLIPAGEPPLPSAGTPLSPVASPSADSLASLASIAVLHHGALGGATNPVIPDSVAPELGGDSGHIPLMP

SEQ ID NO: 58567 - protein, 105 aa, Zea mays
  Coding DNA Sequence Number=SeqID_16788
  Homolog annotation: Hit_ID=Q6H3Y3; Match level="QueryCoverage=66%, HitCoverage=21%, E-value=1e-09, Identity=59%"; Hit description =Chaperone protein dnaJ-like
MATSDGRSTPPRRLRTHDSTIENTSKNKNVELGFSDEERDQEFPDFPSFIPFLPPLSAANLKVYYATRFTIIVGIMVFGGFLAPIIALNAYQVDVLSCGWKLNLV

SEQ ID NO: 58568 - protein, 145 aa, Zea mays
  Coding DNA Sequence Number=SeqID_16789
MDQERPFTVTNYQQRRTDRKNKQPNQEQEQMGLQSKHPPPPPPRDARLPARTTRPPIPPPSFNATDMWVYNLTGPTCQPGDLGTIHVQTKRRIPWGLVGPRLLTGPIRGARCPDCVGRPMVLVPLASLPYTLSSGPEREWDPCRR

SEQ ID NO: 58569 - protein, 69 aa, Zea mays
  Coding DNA Sequence Number=SeqID_16790
MGVLGLDLGSCFEVEARTVIGRWVAARARTEDHRHRHPRETVDRNRCLIFVDTGDPMGDPYMGMGTRVP

SEQ ID NO: 58570 - protein, 275 aa, Zea mays
  Coding DNA Sequence Number=SeqID_16791
  Gene Ontology: Mol. function=nucleic acid binding
  Homolog annotation: Hit_ID=Q1SUT8; Match level="QueryCoverage=65%, HitCoverage=60%, E-value=4e-58, Identity=58%"; Hit description=Zinc finger, CCHC-type
  Pfam annotation: Domain name=zf-CCHC; Domain location=77-94; Score =14.7; E_value=0.0037; Accession=PF00098.13; Description=Zinc knuckle
MKFMEAYSGPVASATNSVTPKGNAEKRPLTRDKSDDEDEAPDPNAVPTDFTSREAKVWEAKAKATERNWKKRKEEEMICKICGDPGHFTQGCPSTLGANKRNADFFERVPARDKQVRDLFNERVISQIEKDVGCKIRMDEKFLFVSGKDRLILSKGVSAVHKIIQEAQAHANFGAKGRPAQSKSPRHTSYLDELPRTHGENNQFAASRVPNDWGIERHGADASSSLRFDMPSHQQTLEELEMEFKKEATQLARARDQEEDEENYRHREVKIFGVC

SEQ ID NO: 58571 - protein, 91 aa, Zea mays
  Coding DNA Sequence Number=SeqID_16792
MEASAPCAREEGLELGDGALAAAVWERRQGDGERRDDLMRHRWNSIGRRRGRLALVERSGCRPLAALRIGHRDFKPNWRKFIRGQHIGDSA

SEQ ID NO: 58572 - protein, 490 aa, Zea mays
  Coding DNA Sequence Number=SeqID_16793
  Gene Ontology: Mol. function=nucleic acid binding; Biological process= DNA integration
  Homolog annotation: Hit_ID=Q1S4N1; Match level="QueryCoverage=99%, HitCoverage=56%, E-value=1e-86, Identity=61%"; Hit description =Peptidase S8 and S53, subtilisin, kexin, sedolisin; Integrase, catalytic region; Zinc ...
  Homolog annotation: Hit description=finger, CCHC-type; Peptidase aspartic, catalytic
  Pfam annotation: Domain name=rve; Domain location=171-326; Score =13.4; E_value=0.00045; Accession=PF00665.16; Description=Integrase core domain
MSLKSGKEIWDYLKAEYEGDERIRGMKVLNLIRDFELQKMKESESVKEYSDRLLSIANKVRLLGSELNDSRIVEKLLVTVPEKFEATITTLENTKDLSKISLAELLNALQAQEQRRSMRQKGVIEGALPIKHQDNNRESSESWLIDSGCTNHMTYDKELFEELRNTEVKRVRIGNGEYLEVKGKGTIAITSYEDKGYKVLFENKQCLIRDANGRDLFNVKMKGNIFALNPMENEQMAFKSRVSATETWHKRLEAGIEHQLTTPYTPQQNRVSERRNRFIIEMTRCMLYEKSLPKSFWGEAANTAVFLQNQISTKAVKDQTPFEAWYGYKPFLKFLRVFGCLCFTYIPQVKRDKLDKKAEASIFVGYSTVSKAYRVFQPHTGRVIVSRDAYFVENEQWNWEDSTKMNQTSSAPNHFTIGSTLEEPEDERQNVLANDAPVRGTRLLSDIYQICNMTICEPTGYHDAKKQSTLDGCNEGGACDDREKQNLGVG

SEQ ID NO: 58573 - protein, 80 aa, Zea mays
  Coding DNA Sequence Number=SeqID_16794
MAAGNNIRLLEDDFSENIIVEKRYYSYRPDIQCRSCKQFGHIEKVAAEKGGHALGVPGVVSGACLNADWGGLLMPRRTKL

SEQ ID NO: 58574 - protein, 400 aa, Zea mays
  Coding DNA Sequence Number=SeqID_16795
  Gene Ontology: Mol. function=RNA-directed DNA polymerase activity; Biological process=RNA-dependent DNA replication
  Homolog annotation: Hit_ID=Q1SYR3; Match level="QueryCoverage=46%, HitCoverage=8%, E-value=4e-23, Identity=34%"; Hit description=RNase H, putative
MSLESRYSYRTRLRARVMDAELNEIMERMERTQRELQEQLPKSQQEARDLMVRSREESLKQKDQMAKMIEMMTALVKGKGPMQRPNIIEPPQSRANQDPLYPPGFTLPHVHAMQRGYPQREPTVLEQHHAPSAHLGLGMFVSNPGANPSDPIVPDLDDPVEIARLKIDDNNTQDKYRILEERINAVEGVEVFSALSAKELSLVPDLVLPRKFKAPDFEKYDGTRCPKAHLIMFCRKMTGYMNNDKLLVHCFQDSLVSSALRWYNQLSRENPIMELVGSVTKDFADIVISGELIETAIKSGRMECPESLKRAVPIKKKEPKAHMVGTESHCTPNPYPAQSRPRYRPPTNFYFPFQSPYYQTPPSYPVYTMNNQRPFSMFPPSTMPTQTQPKNEQRPARPKF

SEQ ID NO: 58575 - protein, 269 aa, Zea mays
  Coding DNA Sequence Number=SeqID_16796
  Gene Ontology: Mol. function=receptor activity; Cellular component =integral to membrane; Biological process=protein amino acid phosphorylation
  Homolog annotation: Hit_ID=Q9SLS3; Match level="QueryCoverage=78%, HitCoverage=80%, E-value=6e-23, Identity=37%"; Hit description =Elicitor-inducible LRR receptor-like protein EILP
  Pfam annotation: Domain name=LRR_1; Domain location=113-134; Score =10.7; E_value=2.9; Accession=PF00560.23; Description=Leucine Rich Repeat
  Pfam annotation: Domain name=LRR_1; Domain location=136-158; Score =11.6; E_value=1.9; Accession=PF00560.23; Description=Leucine Rich Repeat
  Pfam annotation: Domain name=LRR_1; Domain location=160-182; Score =9.8; E_value=4.2; Accession=PF00560.23; Description=Leucine Rich Repeat
  Pfam annotation: Domain name=LRR_1; Domain location=184-206; Score =14.4; E_value=0.43; Accession=PF00560.23; Description=Leucine Rich Repeat
  Pfam annotation: Domain name=LRR_1; Domain location=208-230; Score =12.1; E_value=1.5; Accession=PF00560.23; Description=Leucine Rich Repeat
  Pfam annotation: Domain name=LRR_1; Domain location=56-78; Score=3.4; E_value=66; Accession=PF00560.23; Description=Leucine Rich Repeat
  Pfam annotation: Domain name=LRR_1; Domain location=90-111; Score =13.1; E_value=1; Accession=PF00560.23; Description=Leucine Rich Repeat
  Pfam module annotation: Pfam domain module=LRR_1::LRR_1::LRR_1::LRR _1::LRR_1::LRR_1::LRR_1; Domain location=113-134::136-158::160 -182::184-206::208-230::56-78::90-111
MTEPLALDIKTLNNQFGTDFGRHEGANPSSCVTDSRSCFPKFRRPKYVLRCSATGSVIEIDLSGHSLNGSITPQIGALSKLKCLNLCSNNLRVLDASYNEIHSIPLEIEKMENLVSLNLTRNLIVDMPSAIGLLTNLTHLIMNSNPLRSIIPPYISNLKKLMTLHLGNCQLYGSIPPNIGKLKSLVNLRLSNNMLVGPIPSSISNVTNLESLLLQYNQLNGSIPQEIELVDCNSEEQIADIFTKALNMSKFVKLRRQLGVTSMETKEEC

SEQ ID NO: 58576 - protein, 453 aa, Zea mays
  Coding DNA Sequence Number=SeqID_16797
  Gene Ontology: Mol. function=protein binding; Cellular component =integral to membrane; Biological process=protein amino acid phosphorylation
  Homolog annotation: Hit_ID=Q9ZTK1; Match level="QueryCoverage=81%, HitCoverage=81%, E-value=1e-50, Identity=32%"; Hit description =Disease resistance protein
  Pfam annotation: Domain name=LRR_1; Domain location=115-137; Score =12.4; E_value=1.3; Accession=PF00560.23; Description=Leucine Rich Repeat
  Pfam annotation: Domain name=LRR_1; Domain location=139-161; Score =7.0; E_value=14; Accession=PF00560.23; Description=Leucine Rich Repeat
  Pfam annotation: Domain name=LRR_1; Domain location=163-185; Score =8.1; E_value=8.7; Accession=PF00560.23; Description=Leucine Rich Repeat
  Pfam annotation: Domain name=LRR_1; Domain location=187-209; Score =15.3; E_value=0.23; Accession=PF00560.23; Description=Leucine Rich Repeat
  Pfam annotation: Domain name=LRR_1; Domain location=211-233; Score =11.3; E_value=2.2; Accession=PF00560.23; Description=Leucine Rich Repeat
  Pfam annotation: Domain name=LRR_1; Domain location=235-257; Score =15.3; E_value=0.23; Accession=PF00560.23; Description=Leucine Rich Repeat
  Pfam annotation: Domain name=LRR_1; Domain location=259-281; Score =13.2; E_value=0.94; Accession=PF00560.23; Description=Leucine Rich Repeat
  Pfam annotation: Domain name=LRR_1; Domain location=283-305; Score =12.0; E_value=1.6; Accession=PF00560.23; Description=Leucine Rich Repeat
  Pfam annotation: Domain name=LRR_1; Domain location=307-329; Score =7.6; E_value=11; Accession=PF00560.23; Description=Leucine Rich Repeat
  Pfam annotation: Domain name=LRR_1; Domain location=331-352; Score =13.9; E_value=0.58; Accession=PF00560.23; Description=Leucine Rich Repeat
  Pfam annotation: Domain name=LRR_1; Domain location=355-377; Score =13.0; E_value=1; Accession=PF00560.23; Description=Leucine Rich Repeat
  Pfam annotation: Domain name=LRR_1; Domain location=379-401; Score =20.7; E_value=0.0053; Accession=PF00560.23; Description=Leucine Rich Repeat
  Pfam annotation: Domain name=LRR_1; Domain location=403-425; Score =1.6; E_value=1.4e+02; Accession=PF00560.23; Description=Leucine Rich Repeat
  Pfam annotation: Domain name=LRR_1; Domain location=96-114; Score =4.5; E_value=41; Accession=PF00560.23; Description=Leucine Rich Repeat
  Pfam module annotation: Pfam domain module=LRR_1::LRR_1::LRR_1::LRR _1::LRR_1::LRR_1::LRR_1::LRR_1::LRR_1::LRR_1::LRR_1::LRR_1::LRR _1::LRR_1; Domain
  Pfam module annotation: Domain location=283-305::307-329::331 -352::355-377::379-401::403-425::96-114
MAFSFYTCFAILLFSLSIAVRSSEITRATNNDSESLVAEEKALMETGWWSNYSDIGVHHCTWPGVRCSATGSVIEIDLSGHGRNGSITPQIGALFKLKCLNLSSNNLRAIGLLTNLTHLIMNSNPLRSIIPPHIWNLKKLMTLHLGNCQLYGSIRPNIGKLKSSVNLRLSNNMLVGPIPSSISNVTNLESLLLQDNQLNGSIPQEIGRLTNLITLYLWSNMLVGPIPSSISNVTNLESLLLQDNQLNGSIPQEIGRLTNLITLTLSSNMLVGPIPSSSGNLSSLESFFLYKNKINGPIPSSLGNLSRLESFSLYKNKINGSTPLEIKNLKRLTDLDLGANNLSGQIPSFLGLLPSLSSLYLDSNLLEGFIPLDIGKLKNLTVLYLSNNKLTGSIPLSLLHLPNLWHLSMASNLLEGPILLSMDCNATEGHEADQQLQQTSIREGPGAPMAFLH

SEQ ID NO: 58577 - protein, 67 aa, Zea mays
  Coding DNA Sequence Number=SeqID_16798
MVAKDKAQSAPASHDEVDPDELLDVRSKKPPPNLTVGGGCLFDGAPDSSVHTGHVRCRSHVTNAVGF

SEQ ID NO: 58578 - protein, 746 aa, Zea mays
  Coding DNA Sequence Number=SeqID_16799
  Homolog annotation: Hit_ID=Q6H5M0; Match level="QueryCoverage=98%, HitCoverage=92%, E-value=1e-104, Identity=34%"; Hit description =Leucine zipper protein-like
  Pfam annotation: Domain name=DUF630; Domain location=1-60; Score =92.2; E_value=1.6e-24; Accession=PF04783.3; Description=Protein of unknown function (DUF630)
  Pfam annotation: Domain name=DUF632; Domain location=264-655; Score =404.4; E_value=1.6e-118; Accession=PF04782.3; Description=Protein of unknown function (DUF632)
  Pfam module annotation: Pfam domain module=DUF630::DUF632; Domain location=1-60::264-655
MGSSPSKATGEDALVLCKDRMRHIRQAIDSRDALSAAHLSYTQSLRSVGTALRQYAESEISPESSLSISEVDKSPSHSSMASPSPSRAVESVASLGHRASPSITPPSTRIHCMKAAATTPLTFVIDQSTAEFVGRESPVSAFVPPPPPLPPELCTTWDFFDPIDAAGTSSSNNENEVTLNFSRLRDLRESRVAEVVPLKEVEEEIMSRRHTEISDDNTPPEQEREPKQGGTGKPSQLVDTSTKATSEQVAAKLEESEMEKELCAEAEDPSEFITHRAKDFVSSMKDIETRFMRAAEAGNEVSRMLETKKIRLDICAKIPGSPVKLPSARFVSALRVCCNRDVILNQGNRGLFIILFPIIMFPEVLILSVFVETAQHVSKVVTWKRSVSSLSSSSKSALMTSIMKDDVDDSNSDFVEEFAMVSGSHSSTLDRLHAWERKLYDEIKASENVRKAYDEKCNLLRRQFARGLNAQVIDKTRAVVKDLHSRVSVVIQAVDAISKRIEKIRDEELQPQLVELIQGLIRMWKLMLECHHKQFITITLAYHVKDSTSARQGEHHHHRQAAMHLWNEMDSFSSSFRNWVTAHKSYVEALNAWLQKCVLQPPQDRRRRKRKVSFPPRQAVSPPIFILCGDWLARTEPLPADELCRSLKDVMQLLRGSFEHRDEQNRPRSGESQECGMLENSSEQEAAAKSGSCAASAEGLQSRLTAVLDRLTKFSEASLKCYEELKQNYEMACADYRRVGPNAQLA

SEQ ID NO: 58579 - protein, 684 aa, Zea mays
  Coding DNA Sequence Number=SeqID_16800
  Gene Ontology: Mol. function=acyl-CoA dehydrogenase activity; Cellular component=peroxisome; Biological process=fatty acid metabolic process
  Homolog annotation: Hit_ID=Q2R1G8; Match level="QueryCoverage=95%, HitCoverage=94%, E-value=0.0, Identity=84%"; Hit description=Acyl -coenzyme A oxidase 2, peroxisomal, putative, expressed
  Pfam annotation: Domain name=ACOX; Domain location=539-682; Score= -28.4; E_value=4.1e-05; Accession=PF01756.9; Description=Acyl-CoA oxidase
  Pfam annotation: Domain name=Acyl-CoA_dh_1; Domain location=333-497; Score=15.2; E_value=6.2e-05; Accession=PF00441.14; Description=Acyl -CoA dehydrogenase, C-terminal doma
  Pfam annotation: Domain name=Acyl-CoA_dh_M; Domain location=188-247; Score=77.0; E_value=5.8e-20; Accession=PF02770.9; Description=Acyl -CoA dehydrogenase, middle domain
  Pfam module annotation: Pfam domain module=ACOX::Acyl-CoA_dh_1::Acyl -CoA_dh_M; Domain location=539-682::333-497::188-247
MATGSAAGEESSAAARRLRRLSLHLLQPAPAPADRHQQPLALAACARRVEGGADVAAALAAYLRGRHRAAQMRLFDFFRARPDLQTPVELPTAAHRELCYRQLRALVREAGVRPLTLMATDPAEYFAVMEAAGGADISLGVKLGVQYRVVCMLQLIGDDSRLRVFHVGTKKHRDKYFDGIDNLDYPGCFAMTELHHGSNVQALQTTATFDPVTDEFIINTPNDGAIKWWIGNAALHGKFATVFARLILPLQGKGGEAADMGIHAFIVPIRDLETHAVLPGIEINDCGHKIGLNGVDNGALRFRSVRIPRDNLLNRFGDVSRDGKYTSSLPTINKRFAATLGELVGGRVGIAYCSVGVLKVAVTIAVRYALLRHQFGPPKQPEISVLDYQSHQHKLMPMLASSYAFHFATVQLVDKYSEMKKTNDEDLIADVHVLSSGLKAYITSYTAKSISVCREACGGHGYAAVNRFGALRNDHDIFQTFEGDNTVLLQQVAGDLLKQYQEKFKGGTLSVTWNYLRDSMGTYLSQPNPVTARWEGEDHLRDPNFQLDAFRKHSKTLGGFGAWNRCLNHLLTLAESHIESVILAKFIESVKSCPDEKSREVLKLVCDLYALDRIWQDIGTYRNVDYVAPNKAKAIHKLTDYLSYQVRLVARELVDAFDLPDLIIRAPIGMQSEAYAQYTQYVGF

SEQ ID NO: 58580 - protein, 413 aa, Zea mays
  Coding DNA Sequence Number=SeqID_16801
  Homolog annotation: Hit_ID=Q6Z284; Match level="QueryCoverage=79%, HitCoverage=81%, E-value=4e-63, Identity=42%"; Hit description =Putative lateral organ boundaries (LOB) domain protein
  Pfam annotation: Domain name=DUF260; Domain location=88-188; Score =141.3; E_value=2.5e-39; Accession=PF03195.5; Description=Protein of unknown function DUF260
  Subcellular localization annotation: CTP_CleavageSite=62; ConfidenceScore=5.86e-01
MTSSVSPAAAASQSQLHITTTGTGTGSTAIISPSSNQSTSNANARSSSSSSSSPHSASSPPRARGPSTTGGTGSSGGSGSGSGCTNQACAACKYQRRKCNTDCPLAPYFPADQQERFLNAHRLFGVRKILKTLENISPELSADAMATLIFQSDMRAQDPVGGCYHLILSLERQLQIETAELSAMLQTLALFGQATTTTTMPPDQGGGGTAGLDYTASSNLLHNAQQEVLYALYKNKHEEADIVHSDNEVVRHHGGGGHGPNKDDHGRQQHQVLNYFYCNNATASDDVDNMQQFHFNDSCAAADKVDLTPPAGADEMRHHHQHLDENCQIDHKDYFEIKAAAALVDDAFHMRQEVVDVSAEVDMEDIKTVDVNNAGIGGVDIKAMAMNANVVDVTPQMAAESSHCRLGLGFSSF

SEQ ID NO: 58581 - protein, 36 aa, Zea mays
  Coding DNA Sequence Number=SeqID_16802
MAVARGAVGFDNDGGGHHRAPGARRKLILYVAYRIA

SEQ ID NO: 58582 - protein, 231 aa, Zea mays
  Coding DNA Sequence Number=SeqID_16803
MDETPTCLCSSDGCRGALLWPMAATVRRAEKHLCSSFLPPMSTDAMEPNPRSPSLIQRAGHFSGSELEQPHLAAILPRPTPPSTPPMFSAWSEPLPRLRSRQPWRAAEPLLHGLSQRPLPAGSLVVPSLVGTQSPSPISILAASTRNPPRCLVPMPTPRLLPWLSVGALFPMPWMHLHLLLLHGRKPQLVVVNTSNVPLLETLDLLVVLPHPHFHLPRCSLQRPLTVRRNV

SEQ ID NO: 58583 - protein, 128 aa, Zea mays
  Coding DNA Sequence Number=SeqID_16804
MHPDQVGRIIIQCMSALYRLQALQSDAMTHLTGLAHTTKTTLDEREVFMVDLSSELVEKDLQIEQMGNRTQELEQQVEIRYKTIEVLENQLHDVQEELDEANVHLDMRHQDMNQAMEADGNSEDEEDP

SEQ ID NO: 58584 - protein, 93 aa, Zea mays
  Coding DNA Sequence Number=SeqID_16805
MPSALLLWAMVQLGDSLSAQHQWNSGKVGIWWRPSRAILARTIDSSTKPALEVPLHRRGCVCGRGVEEQPCRHPQLLARRLWIAPSPYTPMAG

SEQ ID NO: 58585 - protein, 65 aa, Zea mays
  Coding DNA Sequence Number=SeqID_16806
  Homolog annotation: Hit_ID=Q53RP5; Match level="QueryCoverage=72%, HitCoverage=4%, E-value=3e-16, Identity=77%"; Hit description=FAR1 family, putative
MEGNREGLLPVLVPRVGMEFGTIEEAWMFWVGYGGLKGFEVRKMYTNKRKSDGKSGVSNDLDAEF

SEQ ID NO: 58586 - protein, 274 aa, Zea mays
  Coding DNA Sequence Number=SeqID_16807
  Gene Ontology: Mol. function=zinc ion binding
  Homolog annotation: Hit_ID=Q1S0W0; Match level="QueryCoverage=62%, HitCoverage=15%, E-value=8e-29, Identity=44%"; Hit description=PHD -finger, putative
MAAPREEGATELNQESRWPVWSSLLLYRQILDEIEANDYDNFTRKAYVPKMKKLMALPKAYLRSLVNELISDSIASKKPKIRKRENNNSVSSSAPSIPNTQDVITTFCEVVEDFCGKTKIPDDGDGGDWLSIPLGDVKVLVNEITSVRSKRILHEVPMDTVTRLLDVIDRQIRYSQGLSIDVKENSDVVDAEPLVFSALESSHAALAIMTHHDMPKQLYREEIRYSQGLSIDVKENLFTCICSFHIVIRVKEILKVREIGGERSLIDNFFCYHV

SEQ ID NO: 58587 - protein, 152 aa, Zea mays
  Coding DNA Sequence Number=SeqID_16808
  Gene Ontology: Mol. function=heat shock protein binding; Cellular component=nucleus; Biological process=regulation of transcription
  Homolog annotation: Hit_ID=Q8H0H3; Match level="QueryCoverage=60%, HitCoverage=34%, E-value=1e-36, Identity=69%"; Hit description =Hypothetical protein B25
  Pfam annotation: Domain name=Myb_DNA-binding; Domain location=29-76; Score=29.9; E_value=8.8e-06; Accession=PF00249.21; Description=Myb -like DNA-binding domain
  Pfam annotation: Domain name=Myb_DNA-binding; Domain location=77-111; Score=11.0; E_value=0.41; Accession=PF00249.21; Description=Myb-like DNA-binding domain
  Pfam module annotation: Pfam domain module=Myb_DNA-binding::Myb_DNA -binding; Domain location=29-76::77-111
MARAPGGARRRGGGSGRRGQADGGQAVRKGHWTAEEDAVLLRHVLVHGPRDWSSIRSKGFLPRTGKSCRLRWEERVVLELQAQFGNKWARISTYLPGRTDNDVKNFWSTRQKRIARLLGTPPRGRSSRSRSRSAKGKAPVVASSLESRPATV

SEQ ID NO: 58588 - protein, 92 aa, Zea mays
  Coding DNA Sequence Number=SeqID_16809
MAFGGFERRQEPGHRACRLGAPEGGRTLGAPEQPPSCPGSPICGEPGPSGPPEPRSSAKARRRSPAPDSLQLSEPYPGSGLRLLGPLILAST

SEQ ID NO: 58589 - protein, 111 aa, Zea mays
  Coding DNA Sequence Number=SeqID_16810
MTHLISGLDANKRELNKVGYLENYVIRYHQETHQGKTSTTTVIRIDFGLLDLDSIESYTRVEFRNNVPLILAKLYQYDKTSSSESICTSRLNKRIAYPCKDYFRNFTSSHF

SEQ ID NO: 58590 - protein, 121 aa, Zea mays
  Coding DNA Sequence Number=SeqID_16811
MARATVPNVHHKPIKRSRERVQTKEQRDNRRHPGLAHRTVRSGCKPGHVRVAPATSPGHLGSRTGGKLWTSGAGLEGLGAAPDIETVGGAVVGKQWGVAGLLGAAWGGILMRAGGRGLGAK

SEQ ID NO: 58591 - protein, 176 aa, Zea mays
  Coding DNA Sequence Number=SeqID_16812
MACLVRGIQSSILCSSDIVGTENASMALMQTRAINRSDKVRPQNAVPKGYQGDLESTVSLLDDMYLTMSSYTRLWYIGMAVKNIGCARFGDLFTHGTLCATAEAPSRHIAVYDEYEHDQCDGFLNADRHRVLCDYGHMVVIVERTIGNRPSFPTSDRVKLDVAACSRATDVDMAKQ

SEQ ID NO: 58592 - protein, 286 aa, Zea mays
  Coding DNA Sequence Number=SeqID_16813
  Gene Ontology: Mol. function=protein kinase activity; Cellular component=integral to membrane; Biological process=protein amino acid phosphorylation
  Homolog annotation: Hit_ID=Q6V5I0; Match level="QueryCoverage=99%, HitCoverage=77%, E-value=1e-66, Identity=45%"; Hit description =Protein kinase
  Pfam annotation: Domain name=Pkinase; Domain location=1-280; Score= -0.9; E_value=1.7e-08; Accession=PF00069.15; Description=Protein kinase domain
  Pfam annotation: Domain name=Pkinase_Tyr; Domain location=3-280; Score=-60.4; E_value=9.1e-09; Accession=PF07714.7; Description =Protein tyrosine kinase
  Pfam module annotation: Pfam domain module=Pkinase::Pkinase_Tyr; Domain location=1-280::3-280
APGEVLAKSSHSTLYRAGLSAGEAVALLRFVRPACAAGADEARAAARALGAARHPNLVPIRALYIGPRGEKLLVHPFYAAGSLRRLLQEGINDSQRWEIICKLSIGIAKGLDHLHTASHKANVHGNLKTNNVMLDADFQPRISDFGLYLLLNSAAAQEMLETSAAQGYKAPELMKMRDATRESDVYSLGVIMVEMLAQKEVADGRNKPPPNARDIHLPASFRDLVLERKISEAFGSELLLKRSKDSGMEGRLDAYFELATACCNPSPSLRPDTKKILKRLEDIARQ

SEQ ID NO: 58593 - protein, 266 aa, Zea mays
  Coding DNA Sequence Number=SeqID_16814
  Homolog annotation: Hit_ID=Q1S104; Match level="QueryCoverage=37%, HitCoverage=53%, E-value=1e-19, Identity=51%"; Hit description =Embryo-specific 3
  Pfam annotation: Domain name=ATS3; Domain location=53-161; Score =105.9; E_value=1.2e-28; Accession=PF06232.2; Description=Embryo -specific protein 3, (ATS3)
MASGAVPPQRVALLALAAALSVVSFPHLSLLASSHPLPQEAAAAAAGAAAGGEASEPHGTAADGAAVARRACTYTVQIKTSCASPRSSADAVSLAFGDAYRNEVYAATVTPRRGFERCATDTFRVAGPCGYGVCYLYLRRSGPRGRVDARVGQGVRAGVRRALHLLLRRPAPRRRLILASTATAARRTLPFDRRNAMPPTEIQRRRLPRGRVHQLLFRYQDLRAPKSQSAHKLVTFDREKTSKKDPCRTWEEFEQFRVEFFGDPTV

SEQ ID NO: 58594 - protein, 87 aa, Zea mays
  Coding DNA Sequence Number=SeqID_16815
MFYAIGCWDLAGLCLIYIMARMIHIFAALILPIEIRTSTVDINDESRGRPFQKAKIEIILGKSDRFNELMAAAAEERGEVEEGEEQA

SEQ ID NO: 58595 - protein, 237 aa, Zea mays
  Coding DNA Sequence Number=SeqID_16816
  Homolog annotation: Hit_ID=O65047; Match level="QueryCoverage=65%, HitCoverage=95%, E-value=1e-17, Identity=36%"; Hit description =Hypothetical protein Sb07
MTTTRDRGAGGGSASRVGDGDVDLGEGWDWGAIPRLLSSACLFLCSGWVRFAHVPLPSSSLASFPHLVNRVRPAPPVTEPTVGGVELPRPRVKPAAYAGNLITQDQITIGEPFWSTTTIEVEPADLSGVTSVNTSNLASGTGSSHNLPGLGNNGLVLWEHTRQEWTETRSLRLKVKQVISAVLALMVSVSTESSNCVLWNAAYESLLGSNKPFPQPIPLHEMVDFLVDIWEQEGLYD

SEQ ID NO: 58596 - protein, 425 aa, Zea mays
  Coding DNA Sequence Number=SeqID_16817
  Gene Ontology: Mol. function=RNA-directed DNA polymerase activity; Cellular component=mitochondrion; Biological process=RNA-dependent DNA replication
  Homolog annotation: Hit_ID=UPI00004C1733; Match level="QueryCoverage =88%, HitCoverage=25%, E-value=1e-177, Identity=83%"; Hit description= UPI00004C1733 related cluster
  Pfam annotation: Domain name=RnaseH; Domain location=1-123; Score= -7.9; E_value=0.00032; Accession=PF00075.14; Description=RNase H
  Pfam annotation: Domain name=rve; Domain location=239-399; Score =112.4; E_value=1.3e-30; Accession=PF00665.16; Description=Integrase core domain
  Pfam module annotation: Pfam domain module=RnaseH::rve; Domain location=1-123::239-399
MFFDGSLMKTGAGAGLLFISPLGKHLRYVLRLHFPASNNVAEYEALVNGLRIAVELGVRRLDARGDSQLVIDQVMKNSHYRDPKMEAYCDEVRRLEDKFYGLELNHIAQRYNETADELAKIASGRTTVPTDVFSRDLHQPSVKIDDVPEPEAPSAQPEVPSAQSEAPSAPPEAPSARPEVPSAPEGETLHVEGEQSGVTPGFYWPTAVADATRIVRACEGCQFYARQTHLPAQALQTIPITWPFAVWGLDLVGPLQKAPGGYTHLLVAIDKFSKWIEVRPLNSIRSEQAVAFFTNIIHRFGVPNSIITDNGTQFTDKKFLDFCEDHHIRVDWAAVAHPMTNGQVERANGMILQGLKPRIYNDLNKFGKRWMKELPSVVWSLRTTPSRATGLHAVLSSLWGQGHLAHRPGIRFPEDEGLCQPKQPS

SEQ ID NO: 58597 - protein, 40 aa, Zea mays
  Coding DNA Sequence Number=SeqID_16818
MNDDTREMSADGKRCQCRRELRLMMEVFFSVEGLQDEGIA

SEQ ID NO: 58598 - protein, 171 aa, Zea mays
  Coding DNA Sequence Number=SeqID_16819
  Subcellular localization annotation: CTP_CleavageSite=52; ConfidenceScore=5.12e-01
MGEQGPGSSAGPSRGWPQRALRWLNIVGPPHWLRRLTAAPVARSGGAPEQRRQAAASGCNHRRRRNSGETGLGSAASHQAGVAALAGVMRTTMPVGAGHGGHCARRKGRAHRYAPWLATGEGNTETKNGKVEWMKNAHSLVGEGLVHVVEQRAGMMVVGVNDVDEEPVQNL

SEQ ID NO: 58599 - protein, 321 aa, Zea mays
  Coding DNA Sequence Number=SeqID_16820
  Gene Ontology: Mol. function=RNA-directed DNA polymerase activity; Cellular component=nucleus; Biological process=RNA-dependent DNA replication
  Homolog annotation: Hit_ID=Q8S472; Match level="QueryCoverage=99%, HitCoverage=29%, E-value=1e-144, Identity=77%"; Hit description =Putative gypsy-type retrotransposon RIRE2
MLKEPCPYHQGPVKHTLEECVMLRRHFHKVGPPAEGGRAHNNDKKEDQKAEEFPEVHDCFMIYGGLVANASARHRKQERQEVCSVKVAALVYLDWSDMPITFDQGDHPDRVPSPGKYPLVVDLVIGNVRLTKVLLGRGSSLNIIYAETLGLLQIDLSSIRAGAVPFHGIIPRKRVQPLGQLDLPVCFGTPSNFLRETLTFEVVGFRGTNHAVLGRPSYAKFMAVPNYTYLKLKMPGPNGVITVGPTYQHAYECDVECVEYAEALAESEALIADLESLSKEAPDVKRHTDNFEPAETIKPVLLDPSNDTSKQTRIGSELDPK

SEQ ID NO: 58600 - protein, 302 aa, Zea mays
  Coding DNA Sequence Number=SeqID_16821
  Gene Ontology: Mol. function=RNA-directed DNA polymerase activity; Cellular component=intracellular; Biological process=RNA-dependent DNA replication
  Homolog annotation: Hit_ID=UPI00004C1732; Match level="QueryCoverage =99%, HitCoverage=31%, E-value=1e-115, Identity=80%"; Hit description= UPI00004C1732 related cluster
MPGIPRNVAEHLLDIRAGARPVKQPLHRFDEEKRRAIGEEIHKLMAAGFIKEVFHPEWLANPVLVKKKGVTYQRCMNHVFGEHIGRTVEAYVDDIVVKTRKASDLLSDLETTFKCLKAKGVKLNPEKCVFGVPRGMLLGFIISERGIEANPEKIAAITNMGPIKDLKGVHRVMGCLAALSRFISCLGERGLPLYRLLRKTEHFTWTPEAEEALGNLKALLTSAPILVPPRCRRSPLDLRSRNHSGGAGAGLLFISPLGKHLRYVLRLHFPASNNVAEYEALVNGLRIAIELGVRCLDARGDS

SEQ ID NO: 58601 - protein, 142 aa, Zea mays
  Coding DNA Sequence Number=SeqID_16822
MGDVGGSSEVAVGQCRVTVRWRVALGEGSAVATRRCSEGARIFDVGHECRPIYGSRERSGVAAHRRARTMVLGTAQREDGGVTAPDDGMTHWRDVGKQQCVAREQQRAEQQRGGGESSFEGEERGWRGAVSMLYRSGRIVIH

SEQ ID NO: 58602 - protein, 422 aa, Zea mays
  Coding DNA Sequence Number=SeqID_16823
  Gene Ontology: Mol. function=binding
  Homolog annotation: Hit_ID=Q10F23; Match level="QueryCoverage=98%, HitCoverage=74%, E-value=6e-95, Identity=44%"; Hit description =Expressed protein
MAPGAPREYALEGGEAAQDEAPESPQEREEASQREEDGGVEEADDDEEAPTHLPFAPSSELLDDTTTVDPSYTISLIRQLLPQGSNVEKEFSKRDDSMILNSVKQCAPDEKDANSGNGESAQPDYKDPWEECGCILWDLAASKPQAELMMNNLVLEVLLANLHVTQSSRVKVKFLAAVLRTSVSVSWAEALLPDEILSRVLWIVGNTLNSTLLEKVIDFLSTIIDNQDVTAILLQPLIKVGLINHTISLLASEIEKLSNEGKLDRSDSLDLILNFVEELSAIDSCSGVMSESDQLIQVLESIVKLPDKFESGLMLLRLASLVIALFQYLPFMEGLFDILALVSDDNQARNALWCILPCLLAQAQQMDMNSSSLEQFVSLLLGRFTHIKDDLESHRVDKKEELTAEDAYLKHGVSASVSFLSH

SEQ ID NO: 58603 - protein, 209 aa, Zea mays
  Coding DNA Sequence Number=SeqID_16824
  Gene Ontology: Mol. function=DNA binding; Biological process =regulation of transcription, DNA-dependent
  Homolog annotation: Hit_ID=Q6Z1Z3; Match level="QueryCoverage=90%, HitCoverage=46%, E-value=5e-52, Identity=64%"; Hit description =Transcription factor viviparous 1-like
  Subcellular localization annotation: CTP_CleavageSite=59; ConfidenceScore=5.57e-01
MAQTNLNQPFTIPPPPQLVSSYSLETTGCAFSLGFDSFTTMSLGPNICANMTPMERSISAKEPENSEDLPTVVRSSDEMDTRNSGDVRRDTVDTLPESKQSHESCASVSNKFDSGEYQVILRKELTKSDVANSGRIVLPKKDAEAGLPPLVQGDPLILQMDDMVLPIIWKFKYRYALRLPYGIFEMKHQKKETILAKQQKQNVYSGSCR

SEQ ID NO: 58604 - protein, 320 aa, Zea mays
  Coding DNA Sequence Number=SeqID_16825
  Homolog annotation: Hit_ID=Q6K990; Match level="QueryCoverage=32%, HitCoverage=11%, E-value=6e-15, Identity=54%"; Hit description =Putative phragmoplast-associated kinesin
  Subcellular localization annotation: CTP_CleavageSite=52; ConfidenceScore=5.40e-01
MKNPNLHHPEVSSAPAACQPPPDLRPPASRPPLGSFHLNRRPASRPHPHPPSARAVAGPSPLVPPPTIPPSAARGAAAAPGTPHVDESGGTLQPRLCLSPSPAPAIAVVILRDPVAPPFLPLPSPPNGTSGSCRRGSLSLFPSLSRIRNLASGVSSTLEFAWGGTTVRVRGNAGGCRDCTIDGVSVSEEEDLEGFYRQRRRRWRYGRCDQRGSALERRERDDVEITGVLRSVAAERGARQTTIFSRFDLIFIVKDIRLYAQDKASTVVHHGSADRPPHPPRHQRPILLDLQRAATDRRPRIPQPPCPYAPSAPRKPPTAS

SEQ ID NO: 58605 - protein, 529 aa, Zea mays
  Coding DNA Sequence Number=SeqID_16826
  Gene Ontology: Mol. function=protein binding; Cellular component =intracellular; Biological process=small GTPase mediated signal transduction
  Homolog annotation: Hit_ID=Q6ZH85; Match level="QueryCoverage=99%, HitCoverage=99%, E-value=1e-178, Identity=65%"; Hit description =Putative leucine-rich protein
  Pfam annotation: Domain name=LRR_1; Domain location=221-245; Score =2.9; E_value=83; Accession=PF00560.23; Description=Leucine Rich Repeat
  Pfam annotation: Domain name=LRR_1; Domain location=266-287; Score =13.3; E_value=0.87; Accession=PF00560.23; Description=Leucine Rich Repeat
  Pfam annotation: Domain name=LRR_1; Domain location=289-310; Score =14.9; E_value=0.3; Accession=PF00560.23; Description=Leucine Rich Repeat
  Pfam annotation: Domain name=LRR_1; Domain location=312-334; Score =6.5; E_value=17; Accession=PF00560.23; Description=Leucine Rich Repeat
  Pfam annotation: Domain name=LRR_1; Domain location=336-357; Score =6.8; E_value=15; Accession=PF00560.23; Description=Leucine Rich Repeat
  Pfam annotation: Domain name=LRR_1; Domain location=359-380; Score =6.9; E_value=14; Accession=PF00560.23; Description=Leucine Rich Repeat
  Pfam annotation: Domain name=LRR_1; Domain location=382-405; Score =5.9; E_value=23; Accession=PF00560.23; Description=Leucine Rich Repeat
  Pfam annotation: Domain name=LRR_1; Domain location=407-428; Score =16.8; E_value=0.078; Accession=PF00560.23; Description=Leucine Rich Repeat
  Pfam annotation: Domain name=LRR_1; Domain location=430-448; Score =4.1; E_value=50; Accession=PF00560.23; Description=Leucine Rich Repeat
  Pfam module annotation: Pfam domain module=LRR_1::LRR_1::LRR_1::LRR _1::LRR_1::LRR_1::LRR_1::LRR_1::LRR_1; Domain location=221-245::266
  Subcellular localization annotation: CTP_CleavageSite=44; ConfidenceScore=5.15e-01
MDPTPQSHPILAYVLSRLPSLPAVRTPRSPRERDLEQPSPRTPSGAAEIDLVGRMPGLRHPSVLSAMTRAVADVSSARDAIRLLGPRPDHEQVDASRELLRLADAGKKADANADVKTKDLDEEKLAKCREVVRLEEDHEAYGALLRDAEGKLEHVYQMAMHGRDIKKVGGGDGKGEEGSGAVDEEVVRVLKDAGEGKVVERVNLADRQMRLLPEPIGRIRGLLALDVSRNQLKFSSRANSLFGAFNSDVPCLNSQVIPDAIGGLEHLEELRLASNDLVSLPDSIGLLSNLKILDVSGNRLRVLPDTISKCRSLVELDASYNALAYLPTGIGHELVDLQILRVHLNKLRSLPSSVCEMRSLRLLDAHFNELHGLPAAIGQLSALETLDLSSNFSDMRDLPPSFGDLAGLRELDLSNNQIRALPDCFGRLAKLERLRLDQNPLAVPPPEVVADGVVAVNEYMARRWAEAVAEEERRRANAAAVAESPRASTPREWLTRSVSSLSTWVSDVTVKVVGQEKVDDEDEFLQQQF

SEQ ID NO: 58606 - protein, 125 aa, Zea mays
  Coding DNA Sequence Number=SeqID_16827
MPAPDPARPNSEEAAIKRSRQIDNDKDESMSSPTPPLDVGAGALWVEVLQECLSSIIPIRISRPTVRECYLTMCPSCDLWFGLGWSTHMYLIDSTMNNAPPVPSPLLSSIRQIRPVPPDDGQGTP

SEQ ID NO: 58607 - protein, 192 aa, Zea mays
  Coding DNA Sequence Number=SeqID_16828
  Homolog annotation: Hit_ID=Q9XEA6; Match level="QueryCoverage=14%, HitCoverage=8%, E-value=9e-08, Identity=96%"; Hit description =Cysteine synthase (EC 2.5.1.47) (O-acetylserine sulfhydrylase) (O- acetylserine (Thiol)-lyase)
MAARSFPMQDNNNNWILHRELGADRNDKEYAPKGSVTHHAWRVGSGRAPSEPEALPILDAGAGLHGLELGGDAADAPIGHLVERTSENSDRKRTGSPQKILRDFEEWRFSSELELWKKPLEMAAAWLVAGFMHARLLSQRNSSGRLVQGGPCHCRITLLKNQFLELENHEAELYQTSPKGEAVVAYVPTLDS

SEQ ID NO: 58608 - protein, 154 aa, Zea mays
  Coding DNA Sequence Number=SeqID_16829
  Gene Ontology: Mol. function=DNA binding; Cellular component=nucleus; Biological process=regulation of transcription
  Homolog annotation: Hit_ID=Q67UM4; Match level="QueryCoverage=53%, HitCoverage=21%, E-value=5e-19, Identity=57%"; Hit description=Gt-2 -related-like
MERRGVQLPAVRPRPKWAAVSAYCRRHGVERGPMQCRKRWGNLSWDLKKIVAWEGKAIAGAGAGAAQHESFWDMRGDQRRARQLPSSFDREVYDALVCGASAGEDAAAAAVLPPDFGDGEPEGVYRQPPIMVMPISVRKYEPPPATSEHECSGP

SEQ ID NO: 58609 - protein, 446 aa, Zea mays
  Coding DNA Sequence Number=SeqID_16830
  Gene Ontology: Mol. function=histone-lysine N-methyltransferase activity; Cellular component=nucleus; Biological process=chromatin modification
  Homolog annotation: Hit_ID=Q8L821; Match level="QueryCoverage=78%, HitCoverage=49%, E-value=0.0, Identity=90%"; Hit description=SET domain-containing protein SET118
  Pfam annotation: Domain name=Pre-SET; Domain location=148-251; Score =124.3; E_value=3.5e-34; Accession=PF05033.6; Description=Pre-SET motif
  Pfam annotation: Domain name=SET; Domain location=263-423; Score =132.9; E_value=8.9e-37; Accession=PF00856.18; Description=SET domain
  Pfam module annotation: Pfam domain module=Pre-SET::SET; Domain location=148-251::263-423
  Subcellular localization annotation: CTP_CleavageSite=23; ConfidenceScore=5.47e-01
MVGVAAAMGSSPVPTTATTAGRRAAPERSAMVLEVVPEVVPGRSVMVPATGQVRRVSGHVERRDRATEGVSVVGMRRGWARGEGGGKSYGWGGVVDDWVQKGVQGHVVFKFKLKRLEGQPSLTTSEVRFTRAEAPTTISELPGLVCDDISGGQENIPIPATNLVDDPPVPPSGFKYLKSLQIPKDIKIPSSIIGCDCEGGCASNKKCLCAQRNGSDLPYVSYKNIGRLVEPKAVVFECGANCSCNHDCVNRTSQQGLQYRLEVGIPLSKSVEVFKTASKGWGVRTWDTILPGAPICEYTGVLRRTEDLDGSQNNYCFDIDCLQTMKGLDGREKRAGSEMHLPNLHPENDSDAQPAPEYCIDAHSIGNFARFINHSCQPNLFVQCVLSSHNDVKLAKVMLFAADTILPLQELSYDYGYRLDSVVGPDGKIVKLACHCGAPDCRKRLY

SEQ ID NO: 58610 - protein, 173 aa, Zea mays
  Coding DNA Sequence Number=SeqID_16831
  Subcellular localization annotation: CTP_CleavageSite=31; ConfidenceScore=5.30e-01
MWTDVVASPSASPPAPSALVAAIATIQAVVTASQERQRAASLTLEQECATGTALTTQMATAQRLLGRLSIAQEDPPQWPPMLHMPPGSTPTHRRPPCSGRQDPQQSMDNVVLSWLNGTIIVELQDIVRDQANTTPQGDLSVGEYCHQMKGMADSLRDFSEPIANPYLGDEPSV

SEQ ID NO: 58611 - protein, 119 aa, Zea mays
  Coding DNA Sequence Number=SeqID_16832
MTSFLIDPQVFIRPEMDNEHGGAHRCSRSKVHLTVGLDDWKGGFVIAIDIDGVLGRNDICMFLQRVRNYLQGDLCLQVLSVGRQPFGLWIFELWLALPTPLLLDARSRCYKKVKVAYRG

SEQ ID NO: 58612 - protein, 157 aa, Zea mays
  Coding DNA Sequence Number=SeqID_16833
  Gene Ontology: Mol. function=metal ion binding; Biological process =metal ion transport
  Pfam annotation: Domain name=HMA; Domain location=63-126; Score=19.2; E_value=0.013; Accession=PF00403.16; Description=Heavy-metal -associated domain
  Subcellular localization annotation: CTP_CleavageSite=66; ConfidenceScore=5.08e-01
MDMELEHGGNEDDRGSESSSSSSKRSFGASSDATVSSTPSKLQALRFAEDLSLPSTLKHVQVVVMSANMGCSHCRQRVADVVSKMNGLLDYMVDFGKKEVTVRGKVAHTKNKRKHRKALLGAPAGWDDARSAAAASSSSPGGHARTTLSWFLGCYGS

SEQ ID NO: 58613 - protein, 225 aa, Zea mays
  Coding DNA Sequence Number=SeqID_16834
  Homolog annotation: Hit_ID=Q94CW0; Match level="QueryCoverage=36%, HitCoverage=32%, E-value=3e-34, Identity=82%"; Hit description=NAC transcription factor-like protein
  Pfam annotation: Domain name=NAM; Domain location=71-181; Score=24.5; E_value=8.7e-10; Accession=PF02365.6; Description=No apical meristem (NAM) protein
MTELRALPQKGAHTPDVFKLAGDAAKDVLKDALQNLMIMCQHVRGTMDTAVASIFFVLPSCGLPPSPCPQSPPPSTAAAPAVLRSPPPSTAAAVSPRPQCDGGAGEGEPWFYFCPWQEREARGGRPSRTTLLGYWKAAGTLGAVYSADRRAIGVKKTMVFYYGRAPSGTKTKWKMNEYMAFQFETPGPGHDLAAARVAADRSSSSSAHHVADGPAPPPNVGPQVR

SEQ ID NO: 58614 - protein, 97 aa, Zea mays
  Coding DNA Sequence Number=SeqID_16835
MSAGRWVLTVGALTGGASGLSGGAPDRSNATNDSLSETAAAISHPLTHGITAGSFDADCTIIEVSVLKTRIQPNDEAQQEVQTRSIPDPRYILGIEM

SEQ ID NO: 58615 - protein, 142 aa, Zea mays
  Coding DNA Sequence Number=SeqID_16836
MDCGLVSPKSRGSFENERNERTRLGRKQGKEPRWSGRKARRDQINGGAVLPAEVVRGGARIGANREEKDGGAAHQGKRERVIAHDLLGGIGARGGTRQFIPRSSARSPTPRAQAEEAHVWQRQSRGGRCGSSAETGCRWGRV

SEQ ID NO: 58616 - protein, 339 aa, Zea mays
  Coding DNA Sequence Number=SeqID_16837
  Homolog annotation: Hit_ID=Q6QP51; Match level="QueryCoverage=64%, HitCoverage=99%, E-value=3e-24, Identity=37%"; Hit description =Putative growth-regulating factor 1
  Subcellular localization annotation: CTP_CleavageSite=46; ConfidenceScore=5.11e-01
MQAACNCTKGAHPFDFDAPSMEAQAHTSCDTFGRRSGRRFTFAIITASKKVCHVVRFRVLFLFLFLSLATRTRKGDAPKGILLREGSGPQALLLIRGSKAGPSEGFDSCLRALGLRALLLIRGSKAGPSEGFDSRLRALGLRAHYWSEVRRVAPRRGSTAASDHSGSAPTTDQGFVGWPPKGSTTASEHAERGMTLGTSDTWPRLGLCSRGTLGHFPDQKERFCNGIPSEGGIEPSDPIKRDREAPPRSTPGLGLNLDAGRQTPPRPTPGLGLSLDLGRQTPPRPTPGFGLILDLGRRTPPRPTPGLGLNLDLGGVTASPDLELGPTTSQGGHHYPTPS

SEQ ID NO: 58617 - protein, 204 aa, Zea mays
  Coding DNA Sequence Number=SeqID_16838
  Homolog annotation: Hit_ID=Q1SI74; Match level="QueryCoverage=65%, HitCoverage=63%, E-value=4e-56, Identity=77%"; Hit description =Ribulose bisphosphate carboxylase, large chain
  Pfam annotation: Domain name=DUF640; Domain location=26-158; Score =299.7; E_value=5.2e-87; Accession=PF04852.3; Description=Protein of unknown function (DUF640)
  Subcellular localization annotation: CTP_CleavageSite=73; ConfidenceScore=5.08e-01
MDLPPNPESPGGGGDGGGGGGAGGSSGGASSSAPGGGTPQTPSRYEAQKRRDWNTFGQYLRNHRPPLSLAQCSGAHVLEFLRYLDQFGKTKVHTAACPFFGHPSPPAPCPCPLRQAWGSLDALVGRLRAAFEENGGRPESNPFAARAVRLYLREVREHQARARGVSYEKKKRKKPQPADHASGSGGQGPHHPPPPAPPPAGAAC

SEQ ID NO: 58618 - protein, 116 aa, Zea mays
  Coding DNA Sequence Number=SeqID_16839
  Subcellular localization annotation: CTP_CleavageSite=29; ConfidenceScore=5.34e-01
MAEGPVLASVCIGQTVAVSLLPPSKAVVRCAVAVPRSRRRRRVQGREGQGDAGCSSLHDDRTTGHISKARPASNGLLPVKRWGPHVPVRMVTVRPHPQGQALGARNECGSLTCVSL

SEQ ID NO: 58619 - protein, 215 aa, Zea mays
  Coding DNA Sequence Number=SeqID_16840
MVSETNGASTGPGYEPLQGNGGGGGDDPPPPPPWRQDPPPLLQGGGNDGGQFSNPGLNLGQDTDDLCSSYCGVAVALSCDPTIVSSSHDFNPDDLRLRGRALLSARRLHGCSVFMAAAAARSCWDPGAWDDDDARTCAVSGAHLHCWWTSFGRTLRVGLLLFELSMPESIPMKRMEMPQETGRSMQAPQPNCRDGAGTVWGLVAVRVLSATPVAA

SEQ ID NO: 58620 - protein, 59 aa, Zea mays
  Coding DNA Sequence Number=SeqID_16841
MKKVCSNDDGLTKVEAKFDRKRQKVTDFEAYQYSVGVDIHHTMQCLINTTLGLGPSTTA

SEQ ID NO: 58621 - protein, 157 aa, Zea mays
  Coding DNA Sequence Number=SeqID_16842
  Gene Ontology: Mol. function=nucleic acid binding; Biological process= DNA integration
  Homolog annotation: Hit_ID=O24586; Match level="QueryCoverage=49%, HitCoverage=12%, E-value=5e-25, Identity=66%"; Hit description=Gag
MAGQESKGKGKVVNGHDEKEKIPIDYETKGEKPVDSGSSKKKEDKKKKCIKKIVYCKSDTSTSSTTSQKDDSSSFKQKTYNKVSGLENVKEIWDMLRIENERNLMTKITKMEAIEGELGRFTMKRGEGPDEMYNRLKFLVNQVRNYGSKRWTDHEVV

SEQ ID NO: 58622 - protein, 519 aa, Zea mays
  Coding DNA Sequence Number=SeqID_16843
  Gene Ontology: Mol. function=transcription regulator activity; Cellular component=nucleus; Biological process=regulation of transcription
  Homolog annotation: Hit_ID=Q10CH6; Match level="QueryCoverage=21%, HitCoverage=26%, E-value=1e-30, Identity=64%"; Hit description=Helix- loop-helix DNA-binding domain containing protein, expressed
  Pfam annotation: Domain name=HLH; Domain location=308-357; Score =58.8; E_value=1.8e-14; Accession=PF00010.16; Description=Helix-loop -helix DNA-binding domain
MELLWQNGQVVMQSQNQRSIKKSPPFKFQGADPSATKEIWSSSSHHHHQQQQQQQQQSLTDHHLFMQEDEMASWLHYPLSDASFDHDFCADLLYPSSAAPCLTSTTATTSAPPPLGKVTQVSASAVASASRPPIPPSRRNELESTRIQNFVHFSRHKAVRVEQFKQSNSKSVVRELTVVDSSDTPAMAPESGASQAMPCNTEAASGENDNINCANMSVAAGANTQSAGVSGSACKDNLAAYEVTVTSSPGGSGASAEPTAQKAAAAEDRKRKGRELEDTEYHSEDVESESADTKKQTRGSTSTKRSRAAEVHNLSERRRRDRINEKMRALQELIPRCNKSDKASMLDEAIEYLKSLQLQVQMMSMGCGMVPMMFPGVQQYMPTMGMGIGMGMGMDIGRPTMPFTNVLAGSPLPTPAAAAHLGPRFPMPPFHMPPPALAPAPDPSRIQPNNQSDTMLNRLGVQNPNQPCVPNFADPYQQYNIGLHPMQLSPPLNQAMAQPSSSKPSTSKGADNLENHPSE

SEQ ID NO: 58623 - protein, 168 aa, Zea mays
  Coding DNA Sequence Number=SeqID_16844
  Gene Ontology: Mol. function=carbon-sulfur lyase activity; Cellular component=vacuole
  Homolog annotation: Hit_ID=Q9FE98; Match level="QueryCoverage=94%, HitCoverage=42%, E-value=6e-43, Identity=49%"; Hit description =Alliinase, putative; 28821-30567
  Pfam annotation: Domain name=Alliinase_C; Domain location=1-168; Score=-43.8; E_value=3.1e-11; Accession=PF04864.4; Description =Allinase, C-terminal domain
MIEIVTSPNNPDGQLKKAIFHGPNVKTIYDHAYYWPHFTPIPAPSDEDVMVFTLSKLTGHAGTRLGWAVIKDETVFNRMMIHMQMNSMGVSKDAQLRGFKLLNAVLEEGTGIFDFAYQTMKSRKTILNIALFTTKSDNFPQFWRQLISLGVKEICSVQKTEGDGDKTM

SEQ ID NO: 58624 - protein, 126 aa, Zea mays
  Coding DNA Sequence Number=SeqID_16845
MVVCWPHHGTLPDKAARFPVKRKKGWPAGFSVGAWAEIWIAKPTPRRCSSFPANVRSVAGDYDPVSDRVAFPISNCTVTDGHCVVFPTCATISGTPNPQRADDPRKYEDFSGYVFFVLGFVFWISF

SEQ ID NO: 58625 - protein, 544 aa, Zea mays
  Coding DNA Sequence Number=SeqID_16846
  Homolog annotation: Hit_ID=Q2QXR0; Match level="QueryCoverage=96%, HitCoverage=95%, E-value=1e-56, Identity=45%"; Hit description =Expressed protein
  Pfam annotation: Domain name=DUF668; Domain location=377-464; Score =88.1; E_value=2.7e-23; Accession=PF05003.3; Description=Protein of unknown function (DUF668)
MRKLSAPRGGGEKLGVLGFEVAALMSRAAGLWRALDDHHLARLRGEAIRLEGVRRLVADDDAALLALALAEMAAACRDLSRAVARLSARCADPLLRRFDALFAALLKRRAADPHGLRYAARAKMDRKGAQDAAPRGRHGAPQQQQQAGTGAGTSNSRAERARRVARQRQEVERIRAASLWPRTFDYAVRLLARSLFTIVARIIEVFDLDYAVDDDEEEEEETASSRASRLSWGSSFVSGSMHMVYPSDVVVAGADAPRTALRRARSGKTAAAATGSKSHMSRSKSLRQQLRWPAAAGKHLIGCVVVTGSSRPQGRDGWIPQSFSYVSDSDDHSSGAGIMSFHSLGDGRQPPPPPPPTTTTSVFDASRDALAHPPEASLGGAGLALHYANLIMFIDRLAAAPHHIRADERDALYGMLTGSLRASVGARLRPSFAAAAPRADPALWADTVRRTLAWLAPLARNTARWQAERSFGQRSVAPCGSGGGGAAAVLLLQTLHFADRGKTEAAVTDLLVGLNYVWRDGAAELDAKLGLGSESAAGRRRRLR

SEQ ID NO: 58626 - protein, 80 aa, Zea mays
  Coding DNA Sequence Number=SeqID_16847
MELLAIWQRGFYQVRRRGRGPGAGDDGGGGCTAKGAWAAVVRYKGGDTGFKGKLPGIFWGKGSSQSEEKLHYPMHAEDWA

SEQ ID NO: 58627 - protein, 499 aa, Zea mays
  Coding DNA Sequence Number=SeqID_16848
  Gene Ontology: Mol. function=triacylglycerol lipase activity; Biological process=lipid metabolic process
  Homolog annotation: Hit_ID=Q6ZDM3; Match level="QueryCoverage=99%, HitCoverage=89%, E-value=1e-180, Identity=69%"; Hit description =Putative DEFECTIVE IN ANTHER DEHISCENCE1
  Pfam annotation: Domain name=Lipase_3; Domain location=229-385; Score= 169.1; E_value=1.1e-47; Accession=PF01764.16; Description=Lipase (class 3)
  Subcellular localization annotation: CTP_CleavageSite=78; ConfidenceScore=5.60e-01
MSTAAAPPSLSLHRPAVTATSTRVAAAPPPSNAAHLASLDKLFRNRGGVESAASPAVAAAAPQRRQQPLLRLPSFFTRTGARGQEPAPTLSPRRLERLLQPVAPDGPSPRGDIAAAWRRLHGEDGWRGLLDPLHPDLRREIVRYGEFVDAAYGAFLSRPDAEPGRRARVPLQDAAYRVTAPLFATSSVGLPTWLAAAAPCAGQRTSLVGYVAVCDSPAEIRRMGRRDIVVALRGTCTVLEWAENVRAGLVPATHCDTAAATAPDTSNAKVECGFWNLYKTAGDRSASLSEMVVSEVRRLLDMYKGEEVSITVTGHSLGAALAVLIADELSGGIAGRAGAPVAVFSFGGPRVGNRAFAARVEARGARVLRVVNAHDVVPRFPPGLPLPGYADVGRELRLDSRASPYLRPDADAACCHDLEAYIHLVDGFLGSHCPFRDNAKRSILRLVKNQGGNVKQLYMSKAKDMRIQLDGGGAADMAGSMLGRVDMPGAASTVVECVH

SEQ ID NO: 58628 - protein, 162 aa, Zea mays
  Coding DNA Sequence Number=SeqID_16849
MVDPELSEALDYILSLLDKLEQVDQLLVQSLHSTLCVLDGQVGLGCRGRFPKDNKVKTTLRLRPLSAVTHNSASPEPSLGQASQANRSDKTAVTSDFTNYDDICMSTTTTVPPCCLPTSNGTHIRQKCGLFLGRKLHLARSQPQPRDKLRLARVWPSATYSP

SEQ ID NO: 58629 - protein, 62 aa, Zea mays
  Coding DNA Sequence Number=SeqID_16850
MLSITDEQLDQSGGDREEVRAAEHSPESSQQEEDYHEEFEEFLAIAALVNLSVACFGDHRHH

SEQ ID NO: 58630 - protein, 143 aa, Zea mays
  Coding DNA Sequence Number=SeqID_16851
MAVPHWRCDLKHKACPEIFVEFPGVKLGPSWCELALWSGRIPRRRPVRATIPPHVVDWRSSCPTAGMKLSSELTFDFAAHSIKPGSIWGVEALDHLHSGEAPPYLAHVSLPGLREEFTIPLRRGYFLKETLYFLRTNPPSSRE

SEQ ID NO: 58631 - protein, 120 aa, Zea mays
  Coding DNA Sequence Number=SeqID_16852
MAVPHWRCDLKHKACREIFVEFPGVKLGLSWCELALWSGRIPRRRPVRATIPPHVVDWRSSCPTAGMKLSSELTFDFAAHSIKPGSIWGVEALDHLHSGEAPPYLAHVSLPELREVEDGP

SEQ ID NO: 58632 - protein, 107 aa, Zea mays
  Coding DNA Sequence Number=SeqID_16853
  Subcellular localization annotation: CTP_CleavageSite=43; ConfidenceScore=5.51e-01
MTSGAINTKRLSTRTLHATEPFAFQNFSSSFKQAPHPFHETPSSAKTMVPSTKKLTMQRSRVKKETTLGLYRTLLEWTGQDERGKLSLTAAWLVWMMMKPRKGVFGF

SEQ ID NO: 58633 - protein, 54 aa, Zea mays
  Coding DNA Sequence Number=SeqID_16854
MFDAGNEDKCPRKLNNKSLKKATCYRYPTLLSGIGYREKVGLQDHSTFVRHQLE

SEQ ID NO: 58634 - protein, 442 aa, Zea mays
  Coding DNA Sequence Number=SeqID_16855
  Gene Ontology: Mol. function=helicase activity; Biological process =protein amino acid phosphorylation
  Homolog annotation: Hit_ID=Q6YTQ6; Match level="QueryCoverage=66%, HitCoverage=20%, E-value=7e-88, Identity=54%"; Hit description =Helicase-like protein
  Pfam annotation: Domain name=DUF889; Domain location=187-400; Score =185.7; E_value=1.2e-52; Accession=PF05970.5; Description=Eukaryotic protein of unknown function (DUF889)
MPSQMRQAIHARRLALPSSQHGRLRTGGRGFLKLMGSDSEELSESSEEAAESSDSEGESHDVEGDGGGSRCSSEPMVVLTVEDADEGCSSKIIGDGVEGVASLLLPGGRTAHSRFKIPCDLDETAICDIRRGTMLAELIEAVSLVIWDEAFMTHRAAFEALDRTLRDLMSTNSHKAMTIPFGGKVVVLGGDPRQILPVIEGGTRTQITSAAITNSPLWHSVTILQLTENMRLSSPNLPDEVKNEIALFSKWTLDIGEGKIEASAKIGESEPSWIIIPSDFLLMPKDNNLSILVQSTYPNISENYNDSKYLKARAILTPTNDMVDSINEYIVSIIPGDNKEYRSCDTIIKGPNTNDEYDLLYPVEFLNSLHGNNFPQHLLVLKKGMEFTLIPDLVPQNRHAVIKEVPADKDKEIEPNLRSPPKRHKQEPLIIKDSTEPEHRQE

SEQ ID NO: 58635 - protein, 116 aa, Zea mays
  Coding DNA Sequence Number=SeqID_16856
MREEVILVHQLEEMIHMCGVKPHEDNECTTLVKESVDMKPIVEELMAAMVDLSLEAQLAETYTHKQYRHQFRSKAEVKLFVDSNGMTTGIFKGRKLQKKKIAGMDAQGAGTASSTK

SEQ ID NO: 58636 - protein, 138 aa, Zea mays
  Coding DNA Sequence Number=SeqID_16857
MGSAAQMCLRRGSTARDEFDAGKRRGEATTTEGLEYWSSQLNSRMFVSSRVVAGWGIRGVGWRGLREEDAVVVALWLCCCAAGGDRRMGEAVASALEAVGKLLVVMQGDCASTTSRMAGELLRAVRMERLPAVSLIWT

SEQ ID NO: 58637 - protein, 58 aa, Zea mays
  Coding DNA Sequence Number=SeqID_16858
MGTLPGGLFAECPEWHSAKKAALPSAARRTLGKDGDNLPHNVCTTYLINDNRIGLIDG

SEQ ID NO: 58638 - protein, 69 aa, Zea mays
  Coding DNA Sequence Number=SeqID_16859
  Gene Ontology: Mol. function=transferase activity; Cellular component= chloroplast; Biological process=biosynthetic process
  Homolog annotation: Hit_ID=P37273; Match level="QueryCoverage=60%, HitCoverage=13%, E-value=6e-10, Identity=73%"; Hit description =Phytoene synthase 2, chloroplast precursor
MAGETHNASRFQNPILDEIEANDYDNFTRRAYIPKTKKLMALPKAYLRSLVVPSSSPQAESRRHYSTLT

SEQ ID NO: 58639 - protein, 237 aa, Zea mays
  Coding DNA Sequence Number=SeqID_16860
MKVVSPERAWWSPRSSELRWATRPAAAESAEEEGSALAPEDRHEERGAHDAWVVRHGRRWKGTVGEDFGVAQRRRRCKEDARRFGSDIIVGRARLGRRRPGRARRGGGGRGFRRGAVEDFGAGKPGAAAGIEGGEGSPLSPLITGGGQMWGDDNDVDGGWCSGVAVGERGDMASDEGMEVGGVRLGVGLEMSRAELGSIVLRAQRSDLAKARSGSMPYAAQLQLYGAVAGIVASNIQ

SEQ ID NO: 58640 - protein, 446 aa, Zea mays
  Coding DNA Sequence Number=SeqID_16861
  Gene Ontology: Mol. function=sequence-specific DNA binding; Cellular component=nucleus; Biological process=regulation of transcription, DNA-dependent
  Pfam annotation: Domain name=Homeobox; Domain location=13-55; Score= -6.5; E_value=0.024; Accession=PF00046.19; Description=Homeobox domain
MEARLLQLNNGIPTRAVLQTLADKFSASPERAGKVAIQPKQVWNWFQNRRYSHRAKTPRAASSPPAKMTPSGADHHQHAANASAFRAAQLSSVAAAHHGSSSTGGMWAPMYVAAAVMDIVAVLPANEQLVLPAILVNQCWKNPVESVSVEFEAKSARDGAWYDVAAFLSHRLFESGDPEVRVRFSGFGAEEDEWINVRKCVRQRSLPCEATECVAVLPGDLILCFQEGKDQALYYDAHVLDAQRRRHDVRGCRCRFLVRYDHDSSEEIVPLRKVCRRPETDYRLQILHAARAAATNADVHTPPKEVKVELASTDKSPAEQKPHKQHKMMDVNTDEVTMVSTLEQDETPGKTVAPVPSATAETRNSSSDTVMKGAEASSVVEDDDEVQAVDKMKEGSRGLCEAHGEELHGDDIVDVELDTLRALILDGVSGELHGAEVITIDNGAPH

SEQ ID NO: 58641 - protein, 173 aa, Zea mays
  Coding DNA Sequence Number=SeqID_16862
  Homolog annotation: Hit_ID=Q6QP51; Match level="QueryCoverage=23%, HitCoverage=18%, E-value=1e-08, Identity=68%"; Hit description =Putative growth-regulating factor 1
  Subcellular localization annotation: CTP_CleavageSite=73; ConfidenceScore=5.42e-01
MQAACNRAKWMRFSDSRHAQHGGPGPRVMQPARRMLHASNCTATCATTSPPQLRNQYRDSRRSGRRFAFAVITAPKKGPGKGDTPKKILPREGTRLRASLLIRGSKAGPPKGFNSRLRSCGPYTHYWSEVRRPAPPKGSTAASGYSGSAPITDQGFEGWPPKGSQPPQTPSEG

SEQ ID NO: 58642 - protein, 108 aa, Zea mays
  Coding DNA Sequence Number=SeqID_16863
MPIKCETPMPKNPIPRKGKSASDDTSRIFTTSYGRNDGPKNLTCDGTVGRLRNWMWVRARCPIRPTPPASRGIFHAKFARYAVVSIRTVDLTLARTLPYHSVYDMSCV

SEQ ID NO: 58643 - protein, 106 aa, Zea mays
  Coding DNA Sequence Number=SeqID_16864
  Homolog annotation: Hit_ID=Q53LP7; Match level="QueryCoverage=68%, HitCoverage=21%, E-value=3e-07, Identity=43%"; Hit description =Expressed protein
MDYNSDGSGSVTPSPQLWASHPEHHQFDQHYSVGVAKHLAVVSVGHSGRGYCREMLELIRGLPQSAYELSLHDIVEHPSVTPVLAPHSSLSTAPAAPTPSAADCKR

SEQ ID NO: 58644 - protein, 54 aa, Zea mays
  Coding DNA Sequence Number=SeqID_16865
MPETARSRSVDSTPAAETGLRTGRRDNPVVGRIYKTPVAEDKQNSRTRAFLPYK

SEQ ID NO: 58645 - protein, 156 aa, Zea mays
  Coding DNA Sequence Number=SeqID_16866
  Gene Ontology: Mol. function=protein binding; Cellular component =mitochondrion; Biological process=cell proliferation
  Homolog annotation: Hit_ID=Q00XW7; Match level="QueryCoverage=54%, HitCoverage=47%, E-value=1e-24, Identity=54%"; Hit description =Chromosome 12 contig 1, DNA sequence
  Pfam annotation: Domain name=Evr1_Alr; Domain location=55-135; Score =86.5; E_value=8.2e-23; Accession=PF04777.3; Description=Erv1  Alr family
MPLTGWNPLAPVLQTVAAFSRHILIAPDAGLDDHRLRPLLALSLSPPSPAPPQPEFPDEPTRQQRRDAKELMHIISRLYPCKECADHFKEVLKANPVQAGSQADFSQWLCYVHNVVNRSLGKPIFPCQRVTARWGKLDCPERSCDLEGSIDIMPNR

SEQ ID NO: 58646 - protein, 80 aa, Zea mays
  Coding DNA Sequence Number=SeqID_16867
  Subcellular localization annotation: CTP_CleavageSite=49; ConfidenceScore=5.02e-01
MQVPRAPDSPAPLLLPLRPPLPVAGAFRIDDAPVRTRRSSELLCLTSAKCMETTASGKDMGRRQSSMIVLFSYGSGQPPY

SEQ ID NO: 58647 - protein, 72 aa, Zea mays
  Coding DNA Sequence Number=SeqID_16868
MSGFVLLYHVLPGGWGSLSDAEIHSVTVTVTMTTAFLDPLLGAIACGAEVTQLGAIGYGAESTPMLRGKANP

SEQ ID NO: 58648 - protein, 191 aa, Zea mays
  Coding DNA Sequence Number=SeqID_16869
MHMVHLLPGEAEDEEKRRVLWRSGLWQAQDGVCWPRLVFVLSRGKQAIKQQRMSRESWTREARSIIIHRLGKIPSALNFPTHDSRSRAACSSLTVFCVTIQTIQFTVNNVSYDYTSQKKRRPLRRILIVLHHFGERFTKYGRDQLLTVNMTSGGALSTPGRSPPSRSFSGASTSEGTARKAALLAAGFPDR

SEQ ID NO: 58649 - protein, 504 aa, Zea mays
  Coding DNA Sequence Number=SeqID_16870
  Homolog annotation: Hit_ID=Q10Q83; Match level="QueryCoverage=68%, HitCoverage=87%, E-value=7e-93, Identity=53%"; Hit description =Expressed protein
  Pfam annotation: Domain name=DUF566; Domain location=168-477; Score =95.1; E_value=2.1e-25; Accession=PF04484.3; Description=Family of unknown function (DUF566)
  Subcellular localization annotation: CTP_CleavageSite=2; ConfidenceScore=5.65e-01
MVAAAAAATAPDPDQSSRPPLTPALDKPNSAAARRNSRSNKPVSSRYLSAAASPASSTSSSTSSSSSSSSSRRSLSAQRTRTSTPPPQHSTSSTTTASAAAASATATTMRSLSVSFQGESFFYKTSRAPRASSPSSPAARRGPTPERRKSVSSVPEAENARPSGRWPAAKPKASDPLARSLECSLDRKDSILAAVHLLRRSMAFDSSTSLSPSDRAAAAAPDLSASSDTDSASSGSNSGAGDPPRRGISVPARFWQETNSRLRRLPEPGLPLPSSGRRSFSDSPMSPRLPGRSPSPCRGSRGAPSPSRGRSGEASPNGHTVQAPANAPSIISFAAEVRRAKKGEKRIEEAHRLRLLDNRHLQWRCINARTDATLLVQSFTAEMSYLEAWSHIEKHHSSALSAAIKALKASTLRLPVVDGAKADAQAVKEAVNSAVDVMHTMTSSICNLLSKSFDTFSFPWIISKYYINDKKSSVPNWKMVPNKYMLHPVLNWKCFQINTPLCFT

SEQ ID NO: 58650 - protein, 492 aa, Zea mays
  Coding DNA Sequence Number=SeqID_16871
  Gene Ontology: Mol. function=transporter activity; Cellular component= integral to membrane; Biological process=transport
  Homolog annotation: Hit_ID=Q6H4E6; Match level="QueryCoverage=92%, HitCoverage=91%, E-value=1e-169, Identity=68%"; Hit description =Transporter-like protein
  Pfam annotation: Domain name=MFS_1; Domain location=16-394; Score =112.7; E_value=1e-30; Accession=PF07690.6; Description=Major Facilitator Superfamily
  Pfam annotation: Domain name=Sugar_tr; Domain location=15-418; Score=- 136.0; E_value=0.013; Accession=PF00083.14; Description=Sugar (and other) transporter
  Pfam module annotation: Pfam domain module=MFS_1::Sugar_tr; Domain location=16-394::15-418
MAEQQGWRQRRSRRTTLLLAFAALAMERADAALLPAVYREIGTALQASPTALGSIALSRSVVQTACYPLAAYLAARHDRVTVIALGAFVWAVATFLIGFSTTFPQMAVTAALNGVGLALQIPAIYAFVADSVDGASRGMAFGWLAVAGKAGTVAGTSLGLLMAPTSFLGLPGWRLAFLLLGVLGAAVGVSIRAFAASDGAARGRVVVSPATSKPVRQEVQEFVREAKAVMRIPSFQVIIAQGLTGSFPWSALLFTAMWLELVGFSHGETAALMTLFKVATSLGALFGGKVGDVLARRFKNSGRIVLSQISSASAIPLSGILLLALPNDPSSTLKHGAALFILGIMASWNGTATNSPILAEIVPPRAMTTVFALDRTFEAVLASFAPPVVGLLAERLYGYKLARSASGGGVDERTAIDFQMERHNATSLARAIYTSIAIPMAMCCAIYSFLYCTYPRDREMARAEAARNRGDYGDEGFGSEDEDNGERKLLPQ

SEQ ID NO: 58651 - protein, 487 aa, Zea mays
  Coding DNA Sequence Number=SeqID_16872
  Gene Ontology: Mol. function=transporter activity; Cellular component= integral to membrane; Biological process=transport
  Homolog annotation: Hit_ID=Q6H4F0; Match level="QueryCoverage=90%, HitCoverage=85%, E-value=1e-165, Identity=68%"; Hit description =Membrane transport protein-like
  Pfam annotation: Domain name=MFS_1; Domain location=1-370; Score =118.3; E_value=2.1e-32; Accession=PF07690.6; Description=Major Facilitator Superfamily
  Pfam annotation: Domain name=Sugar_tr; Domain location=6-421; Score= -110.8; E_value=0.0021; Accession=PF00083.14; Description=Sugar (and other) transporter
  Pfam module annotation: Pfam domain module=MFS_1::Sugar_tr; Domain location=1-370::6-421
MERADEALLPAVYREVGAALHATPTGLGALTLYRSIVQAACYPVAAYAASRHNRAHVIALGAFLWAAATFLVAVSDTFLQVAISRGLNGIGLALVIPAVQSLVADSTDDDNRGTAFGWLQLTSSIGSVFGGFFALLLAQTTVLGIEGWRIAFHLVAIVSVIVGTLVWFFAVDPHFPTNDAAPPSSKKSALDEARELIMEARSIVQIPTFQVFVAQGVSGSFPWSALSFLSMWLELVGFSHEDTAVLTTTFAVATSVGGLLGGKMGDSLARRYPNAGRIVLSQISAGSAVPLAAVLLLGLPDNPSTSSGVAHGLVLFVMGLIISWNGAATNCPIFAEIVPEKQRTSIYALDRTFESILASFAPPVVGLLSQQVYGFKQDDGRGSSPGQDRENAASLAKALYTAISIPMVICTSIYTFMYRTYPRDRERARMQSVIQSELDQIELLGGPSLGGGGDGDGDKPDEVDGSYGSERSAEADAGTEKLLGRKP

SEQ ID NO: 58652 - protein, 48 aa, Zea mays
  Coding DNA Sequence Number=SeqID_16873
MTKYFAMTVELPPYKDMWGSFIIEEILGVGHLFLNVVNQEQGNTIVKD

SEQ ID NO: 58653 - protein, 83 aa, Zea mays
  Coding DNA Sequence Number=SeqID_16874
MVTPDSTPQQAPGNRFEQGYRKLKSRSYLPAWQAVRAGSIGDRARDRRRAQPRGGLVAHTTLPKTQPLLLGSRAAVIAAATLL

SEQ ID NO: 58654 - protein, 212 aa, Zea mays
  Coding DNA Sequence Number=SeqID_16875
MSSFFDTFEDEAEKDTAGTTLASKDSTLPDEERTGPSSLGFEQITTAMTPSIIMAAKDKGSSKPALAEEKGKGPAEFEEAKKAIEDDRPLVEGSFHQDLGGRRCNQVRAWTDPDFKVSADHVRRSTVKASEWFEKFLYEIWKRGEKELSIEESIKNREKVIIEVKHTAAEAKDATAETEAISNRAMKKAEDDAIMRIYEQVYDEAMRSNPRN

SEQ ID NO: 58655 - protein, 446 aa, Zea mays
  Coding DNA Sequence Number=SeqID_16876
  Gene Ontology: Mol. function=voltage-gated potassium channel activity; Cellular component=integral to membrane; Biological process=potassium ion transport
  Homolog annotation: Hit_ID=Q8VYX2; Match level="QueryCoverage=93%, HitCoverage=46%, E-value=4e-56, Identity=35%"; Hit description =Potassium channel AKT1
  Pfam annotation: Domain name=Ank; Domain location=124-156; Score =15.2; E_value=0.2; Accession=PF00023.20; Description=Ankyrin repeat
  Pfam annotation: Domain name=Ank; Domain location=189-221; Score =32.2; E_value=1.8e-06; Accession=PF00023.20; Description=Ankyrin repeat
  Pfam module annotation: Pfam domain module=Ank::Ank; Domain location =124-156::189-221
MRYVQVAGVARAGDVVGEIGVLCYKPQLFTARTRSLCHLLRMERTAFLRIVQANVGDGTIIINNLIQYLKEKRDSGAIAGVAEEIEYLLVASSGPARAPRHALLRRVQRRRLPHASAPQARDAQGRVPLWEALSRGHRGAAQLLADGGADLASGDAELYARAAVEAGDVALLEDVARHGGDVTVACCDDGGTALHRAVLQGDVGMARALLEHGADADREDGGGRTPRDLAGQLGHRDMHQLFGPPSQSQHREAVESPIRRQGSGTEDHGSSCRPAVAVAARPAVTRFKSAPAARVPVAVAQHDGAGLSPSPSPSSSRHSSPRRMVSFRNSLFGVLSSSQVNRHDGAAGGGGHSLHERHTHSRSRVRVTVSCPEQGVGARKLVFMPETMAQLVELAGSQFGFAPTRVVTTDGAQVDDARLVRDGDHLLVVTHQWQRVPDTKIVHTNQ

SEQ ID NO: 58656 - protein, 98 aa, Zea mays
  Coding DNA Sequence Number=SeqID_16877
MDASCTAWSAFVRPASLLLMESRLQLYICASSSIRLLKALPASQFKQRDDDAAALVPPPYRLFPEPEETAARDIQLRQFFSVDRRQPPQLEATSIDGQ

SEQ ID NO: 58657 - protein, 914 aa, Zea mays
  Coding DNA Sequence Number=SeqID_16878
  Gene Ontology: Mol. function=voltage-gated potassium channel activity; Cellular component=integral to membrane; Biological process=potassium ion transport
  Homolog annotation: Hit_ID=Q8H569; Match level="QueryCoverage=93%, HitCoverage=92%, E-value=0.0, Identity=54%"; Hit description =Putative AKT1-like potassium channel
  Pfam annotation: Domain name=Ank; Domain location=509-541; Score=3.7; E_value=9; Accession=PF00023.20; Description=Ankyrin repeat
  Pfam annotation: Domain name=Ank; Domain location=542-574; Score =36.7; E_value=8.2e-08; Accession=PF00023.20; Description=Ankyrin repeat
  Pfam annotation: Domain name=Ank; Domain location=594-626; Score =15.2; E_value=0.2; Accession=PF00023.20; Description=Ankyrin repeat
  Pfam annotation: Domain name=Ank; Domain location=659-691; Score =30.9; E_value=4.4e-06; Accession=PF00023.20; Description=Ankyrin repeat
  Pfam annotation: Domain name=Ion_trans; Domain location=90-290; Score= 122.2; E_value=1.5e-33; Accession=PF00520.21; Description=Ion transport protein
  Pfam annotation: Domain name=Ion_trans_2; Domain location=199-296; Score=63.5; E_value=6.8e-16; Accession=PF07885.6; Description=Ion channel
  Pfam annotation: Domain name=cNMP_binding; Domain location=392-470; Score=43.3; E_value=8.3e-10; Accession=PF00027.19; Description =Cyclic nucleotide-binding domain
  Pfam module annotation: Pfam domain module=Ank::Ank::Ank::Ank::Ion _trans::Ion_trans_2::cNMP_binding; Domain location=509-541::542 -574::594-626::659-691::90-290::199-296::392-470
  Subcellular localization annotation: CTP_CleavageSite=67; ConfidenceScore=5.33e-01
MPLSGRPWGGGGGSGGGSSGRLASSGALLPAALGGARSGRRPRLRRFIVSPHDPRYVAWEHSLVALVAYSAWVAPFEFGFVPDPRGALAVADNAVNAAFAVDIALTFFVAYADGGTYLLQDDPRRIAWRYARSWLALDVASTVPTEVYRRVLPRQARSYNFFGMLRLWRLHRVGTLFAQLEKDRKFRYFWVRCTRLICVTLFAVHCAGCFYYLLADRYPDPGHTWLSSSMPDFKQQSVWKRYAASMYWSITTLTTVGYGDMHAVNTGEMVFTTFYMLFNLGLTAYLIGNMTNLVVHGTSRTRKYRDAIKAATSFAVRHQLPPRLQEQMVSHLSLKFRTDSEGLQQQETLDALPKAIRSGISHYLFFALVQGVYLFQGVSNDLIFQLVSEMNAEYFAPREDVILQNEAPSDFYILVTGSVVAGVARAGDVVGEIGVLCYKPQLFTARTRSLCHLLRMERSAFLRIVQANVGDGTIIINNLIQYLKEKRDSGAIAGVAEEIEYLLARGQLELPVTLCYAASRGDDFLMHQLLKRGVDPNESDNYWHTALHVSASGGHEQCIKLLLEHGADPNASGACDWGHQPNLALIVIQCPDAQGRVPLWEALSRGHRGAAQLLADGGADLASGDAALYARAAVEAGDVALLEDVARHGGDVTVACCDDGGTALHRAVLQGDFGMARALLEHGADADREDGGGRTPRDLAGQLGHRDMHQLFGPPSQSQHREAVESPIRRQGSGTEDHGSSCRPAVAVAARPAVTRFKSAPAARVPVAVAQHDGAGSSPSPSSSRHSSPRRMVSFRNSLFGVLSSSQVNRHDGAAGGGGHSRHERHTHSRSRVRVTVSCPEQGVGARKLVFMPETMAQLVELAGSQFGFAPTRVVTTDGAQVDDARLVRDGDHLLVVTHQWQRVPDTKIVHTNQ

SEQ ID NO: 58658 - protein, 110 aa, Zea mays
  Coding DNA Sequence Number=SeqID_16879
MKNSEENKKEYRGRSGQNSKSKARWRPHPSCHVQGAGARGGRGQMGFVETLPPKKVLRAFHRGLLWKVRLMGTRPGSQCASLSPGVRLRGPQVVRQALPAPGQVQPVLDF

SEQ ID NO: 58659 - protein, 96 aa, Zea mays
  Coding DNA Sequence Number=SeqID_16880
MDPGSPIFVASPEFVSVFFFSFHGVPGEIEMDRRYCLFSFLDEMGSLYMVLSLSPGWITTTIVSVWSSRGDSEFCIDQRKALFGGERAGGERAVTN

SEQ ID NO: 58660 - protein, 68 aa, Zea mays
  Coding DNA Sequence Number=SeqID_16881
MADGETSSWRGTTTARLLHRDRARVETECAGYAGRAGAAQMSHAGSLRWAGWGAPPCGEKAECHRAGQ

SEQ ID NO: 58661 - protein, 153 aa, Zea mays
  Coding DNA Sequence Number=SeqID_16882
MGDITPIPPPPLTAGTMMYSHTRILLDVGVGQTENGFSGATALLAHKSDGPSCWPSRLTWSRKKWQVCAAWIAAIKREKPREKGVGLIAGERRKPRGGHGFFDVKAWGMAHDVSLIQSGGIVRNITETKKQNLTGGDEEAPSRHAAELRLNRQ

SEQ ID NO: 58662 - protein, 108 aa, Zea mays
  Coding DNA Sequence Number=SeqID_16883
MQGLAQCEFSYRGDNYKRMVKEISQAWNQVHRMKRLTMGSMTTPEYGEWRSKRINDNIPELNLEGVQPMEEYLQVIPSELEIIKQDFKKRNSELEKKNRAIWKKRRCI

SEQ ID NO: 58663 - protein, 53 aa, Zea mays
  Coding DNA Sequence Number=SeqID_16884
MGLENTVENKFKDERFDQVVFFVILKLTSVECGLASNQKNFYKITSGVILQFL

SEQ ID NO: 58664 - protein, 85 aa, Zea mays
  Coding DNA Sequence Number=SeqID_16885
MEARLCFRSASLLTQEGKICFFNQLHCNRWRKARSASLTSSTAIDGGKALFSICFAVNAGRKAIYAIFTNLFSGEHDLYNEPNYA

SEQ ID NO: 58665 - protein, 789 aa, Zea mays
  Coding DNA Sequence Number=SeqID_16886
  Gene Ontology: Mol. function=voltage-gated chloride channel activity; Cellular component=membrane; Biological process=chloride transport
  Homolog annotation: Hit_ID=Q9XF71; Match level="QueryCoverage=99%, HitCoverage=99%, E-value=0.0, Identity=75%"; Hit description=CLC-Nt2 protein
  Pfam annotation: Domain name=CBS; Domain location=604-776; Score =31.4; E_value=3.1e-06; Accession=PF00571.18; Description=CBS domain
  Pfam annotation: Domain name=Voltage_CLC; Domain location=145-571; Score=610.5; E_value=1.4e-180; Accession=PF00654.10; Description =Voltage gated chloride channel
  Pfam module annotation: Pfam domain module=CBS::Voltage_CLC; Domain location=604-776::145-571
MEEDSNHLANPETPHSLEAETYEEEEGRDPESNSLRQPLLKRNRTLSSTPLALVGAKVSHIESLDYEINENDLFKHDWRRRSKVQVLQYIFLKWSLAFLVGLLTGLIATLINLAIENIAGYKLLAIVGFIEEGRYISGLIFFTGINFFLTLIAAVLCVCFAPTAAGPGIPEIKAYLNGVDTPNMFGATTLLVKGCVLIVGSIGAVSAGLDLGKEGPLVHIGSCIASLLAQGGPDNYRIKWRWLRYFNNDRDRRDIITCGSSSGVCAAFRAPVGGVLFALEEVATWWRSALLWRTFFSTAVVVVVLRAFIEICNSGKCGLFGTGGLIMFDVSDVKVSYQAMDVIPIIIIGIIGGLLGSLYNHVLHKVLRVYNLINHKGKMHKLLLALGVSLFTSVCQYCLPFLAQCRACDPSFPETCPTNDRSGNFKQFNCPDGYYNDLATLLLTTNDDAVRNIFSTNTTNEFHVTSILIFFALYCILGLITFGIAVPSGLFLPIILMGSGYGRLLSMAMGSYTNLDEGLFAVLGAGSLMAGSMRMTVSLCVIFLELTNNLLLLPITMIVLLIAKTVGDCFNPSIYEIILELKGLPFLDANPEPWMRNLTVGELADVKPPVVTLCGVEKVSRIVDVLRNTTHNAFPIVDQGVPVPGMVATGATELHGLILRAHLVQALKKKWFLPEKRRTEEWEVREKFNWVELAEREIKIEQVAVTRDEMEMYVDLHPLTNTTPFTVVESLSVAKALVLFRQVGLRHLLIVPKYQGAGVAPVVGILTRQDLRAYNILSAFPHLERPKLS

SEQ ID NO: 58666 - protein, 228 aa, Zea mays
  Coding DNA Sequence Number=SeqID_16887
MGSCVSVHKSSQESAMKLGLSLEPKTDSLIIPPSPVKEKPAAANGDFALKSQSSSTFKDLGSKDETFFDSRAYLDSDCEDDFVSVNGDFTPSHSNTPVHQSFSVGTSQVNKVGDDGSPGSVSETSPSGKKKKLVELFQESIRDDHDTSESNTSSNQDTANEKIVKPTIQDILPPKSADGTPYVSGANSCCSSERTVNGDNPIFKEKPLSSFSERKKKMSPAIAANNKP

SEQ ID NO: 58667 - protein, 671 aa, Zea mays
  Coding DNA Sequence Number=SeqID_16888
  Gene Ontology: Mol. function=protein-tyrosine kinase activity; Cellular component=extracellular region; Biological process=protein amino acid phosphorylation
  Homolog annotation: Hit_ID=Q69TY6; Match level="QueryCoverage=89%, HitCoverage=91%, E-value=9e-59, Identity=28%"; Hit description =Putative receptor protein kinase PERK1
  Pfam annotation: Domain name=LysM; Domain location=185-232; Score =18.2; E_value=0.0067; Accession=PF01476.10; Description=LysM domain
  Pfam annotation: Domain name=Pkinase; Domain location=358-638; Score =80.6; E_value=5e-21; Accession=PF00069.15; Description=Protein kinase domain
  Pfam annotation: Domain name=Pkinase_Tyr; Domain location=366-638; Score=32.7; E_value=1.8e-14; Accession=PF07714.7; Description =Protein tyrosine kinase
  Pfam module annotation: Pfam domain module=LysM::Pkinase::Pkinase _Tyr; Domain location=185-232::358-638::366-638
MASVMSKIYLRALVLLIWLLISPLGQNLLSCNVTSPDALGYRCGINGSEDQCGTFAVLRATSYYSSLSNLSFYLGFNRVAIAEANGFSAQTEFLPRDQPLLLPIDCKCNNGFFHADLTKTTIKGESFYGIAESLQGLTTCKAIQDKNPGVSPWGLGDKVRLVVPLRCACPSPSEVTLKARLLLSYPVSPGDTISNLAAAFNTTSEAIISANNRSLETFEPESLATLTSLLIPLNGEPLPHFPETSIPIINPQKKKPRMWKAGVYIAVSGVVIGTIIAVAATFLVIRLKRKKKKQNLSKDDDLELQQLSLSVRTASEKKVSFAGSQDAGDGPLIDSVTPRKALLELYTIEELRKATEDFNPSTHIEGSVYHGHLNGKNMAIRRTRTENISKVETRFFTDATHHHPNIIRLLGTCVTEGSHPFLVFEYAKNGSLKDWLHGGLAMKNQFIASCYCFLTWKQRLKISFDIAVALQYMHQVMNPSYVHRNIKSRNIFLDEDLNAKIGNFGMARCVEDDTKYPDLSTNPSSWSLGYLAPEYLHQGVISPGIDIFAYGIVLLEILSGQTPISRPDKKGGGNVWLSEKIKAILQSESADELRAWMDSALGENYSFDTAVTLANLARACTEEDPCLRPSAGEIVDRLSRLVEESTEGEHTLIFESSSKPLVNTSSTTSNL

SEQ ID NO: 58668 - protein, 327 aa, Zea mays
  Coding DNA Sequence Number=SeqID_16889
  Gene Ontology: Mol. function=hydrolase activity; Cellular component =membrane; Biological process=intracellular signaling cascade
  Homolog annotation: Hit_ID=Q1S1N3; Match level="QueryCoverage=96%, HitCoverage=98%, E-value=3e-45, Identity=34%"; Hit description =Calcineurin-like phosphoesterase family protein, related
  Pfam annotation: Domain name=DUF1723; Domain location=61-110; Score =81.8; E_value=2.1e-21; Accession=PF08330.1; Description=Protein of unknown function (DUF1723)
MAGSLIRLDRNHISVEQLKMSEDRVLECTIRNMHGPPSPLVENYLWEAGFWHVATVGRGCKLEPKLISALIERWRPETHTFHLPCGECTITLKDVHLQLGLPVDGHPVTGSAQSSNWEAVCYELLGAVLDKMDGGKVEMGWLRATFPDPNANSTEIERIRYARSYILQIIGGYLMPDKSRSRVHLRWLLKLVNFRGAGEFSWGSAVLATLYREMCGATRPRRANIGGCLSLLHSWARFRFPFLCPRVNHPHTFPLVTRWNHPASYRGLPSELKDIRLLLEQRSEAEFQWTPYEDPAIRAVIPEEFLQNPNAWYAKVVLINYATVEPH

SEQ ID NO: 58669 - protein, 70 aa, Zea mays
  Coding DNA Sequence Number=SeqID_16890
  Homolog annotation: Hit_ID=O64459; Match level="QueryCoverage=62%, HitCoverage=9%, E-value=5e-16, Identity=95%"; Hit description=UTP- -glucose-1-phosphate uridylyltransferase
MNFVSGLPLTSTEKDSVWVIVDKLTKWVNLNAIKRLVEADALKMEIIPNPKEVNGIKVLQLETAAGAAIR

SEQ ID NO: 58670 - protein, 357 aa, Zea mays
  Coding DNA Sequence Number=SeqID_16891
  Gene Ontology: Mol. function=protein serine/threonine phosphatase activity; Cellular component=protein serine/threonine phosphatase complex; Biological process=protein amino acid dephosphorylation
  Homolog annotation: Hit_ID=Q6K3D4; Match level="QueryCoverage=85%, HitCoverage=28%, E-value=1e-100, Identity=57%"; Hit description =Putative PKG-Ib
  Pfam annotation: Domain name=PP2C; Domain location=57-331; Score =95.9; E_value=1.2e-25; Accession=PF00481.12; Description=Protein phosphatase 2C
MGCVNGKCCSRYPSSPDGGSDHCGELRPYKSKHILTQRSLEIVHVSSHKFTLQYSILTQLGYYQDTVERENQDSFCIKTQIQCNPNVHVFGVFDGHGQYGAQCSNFFNDRLVEILSSDSTLLDDPLKAYTSAFLAINSELHDSEIDDTMSGTTAITVLVVGDTLYVANDGDSRAVIAVKNGDQILAEDLSVDQTSFRKDEYERVKLCGAKVLSIDQVEGFKDPNIQNWGEEENEGSDPPRLWIPNGMYPGTAFTRSVGDSTAEKIGVIADPEISVVKLTPNHLFFVVASDGVFEFLPSRTVVNMVAAYTDPKDACAAIAGESYTLWLENEDRTDDIIIIIIQIKALWIPVVGWWCHR

SEQ ID NO: 58671 - protein, 85 aa, Zea mays
  Coding DNA Sequence Number=SeqID_16892
MAVGDLRFVFASNVVQYLHSWVAKFFSKVPVVLVDAHESLVRERGGLGYRISLVVRLGCLEDDRPKWVAYGAGRLRRSELGCDFF

SEQ ID NO: 58672 - protein, 80 aa, Zea mays
  Coding DNA Sequence Number=SeqID_16893
  Gene Ontology: Mol. function=endonuclease activity; Biological process=DNA repair
  Homolog annotation: Hit_ID=Q8W0T1; Match level="QueryCoverage=93%, HitCoverage=21%, E-value=7e-27, Identity=76%"; Hit description =Putative AP endonuclease
MWPLKVEINFSAYASRYRGKRMRIDYFLVSEQLKDRIVSCEMHGRGIELDGFYGSDHCPVSLELSEAVAEEAPGQPKPSI

SEQ ID NO: 58673 - protein, 59 aa, Zea mays
  Coding DNA Sequence Number=SeqID_16894
MATGLYRARVLTETAPPGAVHGDPMMAAMFRPLLGTEIPIGTGRKDTRWDHGERGKVIR

SEQ ID NO: 58674 - protein, 56 aa, Zea mays
  Coding DNA Sequence Number=SeqID_16895
MEGSKSVLLLMVILGSLMVPAHCGSCYSTMQDCAPACRCDKLSHAPLNVRDHESVL

SEQ ID NO: 58675 - protein, 115 aa, Zea mays
  Coding DNA Sequence Number=SeqID_16896
MDPNLDAVIIGAEPEPPCRPEPSSCPCHCSRVPESSLESKATPPLSHPAVDDYLLVPLRYCHAHTRVCHVPPNLLDPLPAPWAPSAPTPSSPVGLHRGREQHHRWWPESPAQASR

SEQ ID NO: 58676 - protein, 59 aa, Zea mays
  Coding DNA Sequence Number=SeqID_16897
MVMNGLPISVYASETLGFGTYTCGSCAVSCTLKWDVATVMEYKGIPLQQVVDYYVRGTM

SEQ ID NO: 58677 - protein, 455 aa, Zea mays
  Coding DNA Sequence Number=SeqID_16898
  Gene Ontology: Mol. function=RNA-directed DNA polymerase activity; Cellular component=mitochondrion; Biological process=RNA-dependent DNA replication
  Homolog annotation: Hit_ID=UPI00004C1731; Match level="QueryCoverage =99%, HitCoverage=29%, E-value=0.0, Identity=76%"; Hit description =UPI00004C1731 related cluster
  Pfam annotation: Domain name=RnaseH; Domain location=37-165; Score =15.0; E_value=2.3e-06; Accession=PF00075.14; Description=RNase H
  Pfam annotation: Domain name=rve; Domain location=260-419; Score =116.3; E_value=8.5e-32; Accession=PF00665.16; Description=Integrase core domain
  Pfam module annotation: Pfam domain module=RnaseH::rve; Domain location=37-165::260-419
MGETILFAPRKAIKSQVLADFMAEWVDTQLPAALIQPELWTMFFDGSLMKTGAGAGLLFISPLGKHLRYVLRLHFPVSNNVAEYEALVNGLRIAIELGVRRLDGRGDSQLVINQVMKNSHCRDRKMEAYCDEVRRLEDKFYGLELNHIARRYNETADELAKTASRRTTVPPDVFSRDIHQPSVKTNDTPELEKVSALPEAPSAQPEAPSAPEGEALRVKEERNGIPPNRNWQTPIVRTCQGCQFYARQTHLPAQALKTIPITWSFAVWVLDLVGPLQKAPGGYPHLLVAIDKFSKWIEVRPLNSIRSEQAVAFFTNIIHRFGVPNSIITDNGTQFIGRKFLDFCEDHHIRVDWAAVAHPMTNGQVERANDMILQGFKPRIYNDLNKFGRRWMKELPSVVWSLRTTPSRATGFTPFFLVYGAEAILPTDLEYGSSKTRTYDAGSNQTNREDSLDQL

SEQ ID NO: 58678 - protein, 196 aa, Zea mays
  Coding DNA Sequence Number=SeqID_16899
  Gene Ontology: Mol. function=kinase activity; Cellular component =ornithine carbamoyltransferase complex; Biological process=amino acid metabolic process
  Homolog annotation: Hit_ID=Q6QP54; Match level="QueryCoverage=70%, HitCoverage=43%, E-value=3e-29, Identity=54%"; Hit description =Putative kinase
MGHRSCSLRPESARGRVMMTLPVDVAGLCPRLGDVEAPPKPGSSLSSMAEAESEPLGRARWRSSAEAESEPLGRARRRSSAEARAVSEPWGRVKRSSSSSGAEPESEPWVGRSGVRRLLGLSPSPSPGSGGAEFAVFRGLSPSPSPGSGGAEFAVFRGLSPSPSPGSGGAEFAVFRGLARVRALGRAERSSPSSGA

SEQ ID NO: 58679 - protein, 154 aa, Zea mays
  Coding DNA Sequence Number=SeqID_16900
MDAPGALAAQAIGDVPGQGAASRAAARADREQAARGRLEQLRAEQHARPRATTKRKGGKGERRSRAHLDGDGMQTQQVRRAPVGNGLEARYHAVWGREAPGFCAAPGRRLGHAWRGGSRAARGESGWAAWGTGQVGREGGKKRVALGRVAAWSA

SEQ ID NO: 58680 - protein, 64 aa, Zea mays
  Coding DNA Sequence Number=SeqID_16901
MALSRRPAHHLCEAQPVTKLKEKGRMRQAKRQAAEGSRMRLMKRRATKTFNPELKLPRLMSAKN

SEQ ID NO: 58681 - protein, 66 aa, Zea mays
  Coding DNA Sequence Number=SeqID_16902
  Subcellular localization annotation: CTP_CleavageSite=24; ConfidenceScore=5.01e-01
MALFSQSQLSLGAPDCPVVHRTVRVVHRTVSGVPGWTQANLPLSGINYPAYGYNSPDCLGCTGTVQ

SEQ ID NO: 58682 - protein, 189 aa, Zea mays; identical to SEQ ID NO: 42477
  Coding DNA Sequence Number=SeqID_16903

SEQ ID NO: 58683 - protein, 207 aa, Zea mays
  Coding DNA Sequence Number=SeqID_16904
  Gene Ontology: Mol. function=carboxyl- and carbamoyltransferase activity; Cellular component=ornithine carbamoyltransferase complex; Biological process=amino acid metabolic process
  Homolog annotation: Hit_ID=Q8SA97; Match level="QueryCoverage=99%, HitCoverage=24%, E-value=2e-16, Identity=37%"; Hit description =Ornithine carbamoyltransferase
MALPVDVAGLCPRQGDVGAPPKPRLSLSSVAEAEPEPWGRARRKSFGRGQGGVRALGSGEAEFRRLPARVRALGSGGAEFAVFRVLARVRALGVGRSGPESEPWGSGGAEFAVFRVLARVRALGSGGAEFAVFRVLARVRALGSGGAEFAVALLARPDCLSDSLCRVAPQSEWRRRRCPSVRLLYADGGYQLRIRRLEGTPNYGPQQ

SEQ ID NO: 58684 - protein, 89 aa, Zea mays
  Coding DNA Sequence Number=SeqID_16905
MATKILALLALLALFFLPPVTSMGFEHLAVQAYMLQQALAASVLQQPIDQLQQQSLAHLTIQTIATQQQQQFLPALSQLAVVNPIAYLQ

SEQ ID NO: 58685 - protein, 467 aa, Zea mays
  Coding DNA Sequence Number=SeqID_16906
  Gene Ontology: Mol. function=oxidoreductase activity; Cellular component=integral to membrane; Biological process=electron transport
  Homolog annotation: Hit_ID=Q84LG7; Match level="QueryCoverage=91%, HitCoverage=92%, E-value=1e-143, Identity=56%"; Hit description =Putative taxane 10-beta-hydroxylase
  Pfam annotation: Domain name=p450; Domain location=41-464; Score =120.9; E_value=3.6e-33; Accession=PF00067.12; Description=Cytochrome P450
  Subcellular localization annotation: CTP_CleavageSite=23; ConfidenceScore=5.33e-01
MAFIVLLAAAAAAIALVLHHLLSAQKKRSSRSAGSTSYSLPPGDLGVPVIGQTFSLLHALRSNTDDQWFRARIKRYGPVSKMSVLGSPTVLLAGTEANHFIFTNQGLILTQTRALRSLLRRSILTLTGDDLKQVRSALQGYLRPEMVRGYVGKMDAEVRRQLKLNWVGRSTVNVLPMARSLTLGVICSVVFGEEAAAIVDALATDFQQLGDAILSFPVNIPFTRTKGAPPPTATATTSAATDFVTYMLLLRSRGAHSLSLADIVDNVMGIVIGAHGTTSTLITFMVRHLANEPDVLAKITQEQDEIAGRNGRDGALTWEDVSSMKYTWRAALETLRTVPPVFGSFRTATKDIEYQGYLIPKGWKVFASQSITHMDPRFFAEPTKFDPSRFEKRSSIPPYSFLPFGGGPRMCPGTEFSRVETMVAMHYLVTRFRWKLRFEDEAYNKDPKPTPVFGCPVELELRKTPAI

SEQ ID NO: 58686 - protein, 114 aa, Zea mays
  Coding DNA Sequence Number=SeqID_16907
  Subcellular localization annotation: CTP_CleavageSite=34; ConfidenceScore=5.03e-01
MPRPLSPPPPRVRNSLPPAHFRPALAHARQLALRALSLADEPSPPISRPLSTLARDHSHRQYGPAFDFTHVTGDPFSWEDLARNFHPFHVPAREMVSFNAELLPLTPGPLSVSG

SEQ ID NO: 58687 - protein, 52 aa, Zea mays
  Coding DNA Sequence Number=SeqID_16908
MATKILALLALLFPFTVENTAVYLQQRQQLLSPLVVANPLVAAFLQQQQFLP

SEQ ID NO: 58688 - protein, 84 aa, Zea mays
  Coding DNA Sequence Number=SeqID_16909
MKSHYMSPKFKWLYMKFEFHLTKVNSTTELRLHYAPDERRFVLNGKDRNVLDCPILFSDDLSVLMVDKKILVFDNACVSESIDR

SEQ ID NO: 58689 - protein, 218 aa, Zea mays
  Coding DNA Sequence Number=SeqID_16910
  Gene Ontology: Mol. function=protein kinase activity; Cellular component=membrane; Biological process=protein amino acid phosphorylation
  Homolog annotation: Hit_ID=Q1T053; Match level="QueryCoverage=98%, HitCoverage=57%, E-value=2e-81, Identity=74%"; Hit description =Protein kinase
  Pfam annotation: Domain name=Pkinase; Domain location=8-218; Score =43.2; E_value=3.9e-11; Accession=PF00069.15; Description=Protein kinase domain
  Pfam annotation: Domain name=Pkinase_Tyr; Domain location=8-218; Score=9.6; E_value=4.6e-13; Accession=PF07714.7; Description=Protein tyrosine kinase
  Pfam module annotation: Pfam domain module=Pkinase::Pkinase_Tyr; Domain location=8-218::8-218
MEVATCSFSDENLLGKGGFGGVYKGSLRSGEVVAIKKMELPSFKEAEGEDEFRVEVDILSRLDHPNLVSLIGYCADGKHRFLVYEYMQKGKLQDHLNGRFSTQICFQTSCSPIQHLSKLNCSIRGLAYLHSSSAVGVPIVHRDFKSTNVLLNANFEAKISDFGLAKLLPEGQETSVTARFLGTFGYFDPEYTSTGKLTLQSDVYAFRVVLLELLTAGI

SEQ ID NO: 58690 - protein, 52 aa, Zea mays
  Coding DNA Sequence Number=SeqID_16911
MSGTWRWYRDERSPVRPCLGHGMGTNMRTPMFLEIQMTSFNFITFLMKDDSI

SEQ ID NO: 58691 - protein, 145 aa, Zea mays
  Coding DNA Sequence Number=SeqID_16912
MEFDGEVVKFNVYEVMGQPSTMSNISSVDIIEPLSKLHFEYHEVDRLQTMLSRSLDHNIMYKLEELMTLGEPIHEAIIRMKASKLELKSLPGHLRISIEENANSNGEAQRRLNPPMIEKPKKCFKENGKMLKPFYKNFKVHFNLG

SEQ ID NO: 58692 - protein, 307 aa, Zea mays
  Coding DNA Sequence Number=SeqID_16913
  Homolog annotation: Hit_ID=O82347; Match level="QueryCoverage=55%, HitCoverage=63%, E-value=1e-39, Identity=44%"; Hit description =Expressed protein
  Subcellular localization annotation: CTP_CleavageSite=12; ConfidenceScore=5.43e-01
MAFLLPKLTTPSCKLPPSPLLKPQLVPPGHGGGKIQGSSVSGSGAAQVAAPGHLSLLLLLSASQQAAGPAAKSTATKNRGKGGGDPQRSDFYLNLGTAVRTLRDDLPDVFVRESNYDIYRWVKRAISPLSVAISVNFCEDITFVDPLNTFHGIDNYKTIFWALRFHGRLLFREIGLDVSRIWQLTENSIVVRWELWGTPRVPWESYGCFSGTSRYKVDRNGKIYEHRVDNLALDFPRSVARVGSIADMVVATPSPNLTFWNAVVTGDGCSWTKLYEAVVEAVEREEHSSTGIGPVGCSFGCGCGCSF

SEQ ID NO: 58693 - protein, 327 aa, Zea mays
  Coding DNA Sequence Number=SeqID_16914
  Gene Ontology: Mol. function=nucleotidyltransferase activity; Cellular component=cytoplasm; Biological process=metabolic process
  Homolog annotation: Hit_ID=Q6ZJ97; Match level="QueryCoverage=98%, HitCoverage=64%, E-value=1e-116, Identity=69%"; Hit description =Putative UDP-N-acetylglucosamine pyrophosphorylase
  Pfam annotation: Domain name=UDPGP; Domain location=61-326; Score= -168.6; E_value=8.3e-09; Accession=PF01704.8; Description=UTP- -glucose-1-phosphate uridylyltransferase
MKEEMVVGLSAPGPVGRWGAAPPQAMLERMKDYGQEGAFALWDDLSPEDRELLVRDIESLDLSRIDRIIRRSLGSQGIPLPAVEPVPESSVSKVEDRSPEDKERWWKKGLKAISEGKLAVVLLAGGQGTRLGSSDPKGCFSPSNTVLIHWYIMTSPFTDASTRKFFETRRYFGLDPDQVTFFQQGTLPCVSADGRFIMETPYRVAKAPDGNGGVYAALKSKKLMEDMAARGVKYVDCYGVDNALVRVADPTFLGYFIDKGVSSAAKVVRKVRSVQSHAPLVHASNWFATAVVAAHLADSQLNARPGLPARECRGVCSTRPRWTSLRG

SEQ ID NO: 58694 - protein, 64 aa, Zea mays
  Coding DNA Sequence Number=SeqID_16915
MWKLCFLGGEINVCYEENDPLRYYGPSESQLWTIWTFIEKEPPLRQVVDRLGRRPSAPPQGDAH

SEQ ID NO: 58695 - protein, 162 aa, Zea mays
  Coding DNA Sequence Number=SeqID_16916
  Homolog annotation: Hit_ID=Q6QP51; Match level="QueryCoverage=42%, HitCoverage=38%, E-value=9e-13, Identity=68%"; Hit description =Putative growth-regulating factor 1
MQAACPLFWYPRESGTGGRCWRTTGATDESQAHVGLENCRRHGCMRETTIAYYRVDPSLRSGEAAAPPRPRLGPRPRVGRGCDSSRGRGRALGSSEEEISSRGQALGSGEAELPVAPEAELDRCRFRPGGWHSSRSGAGDTVFLSDRSVKGRSDCSHFDLAD

SEQ ID NO: 58696 - protein, 116 aa, Zea mays
  Coding DNA Sequence Number=SeqID_16917
MSTYPPTIMILGYYAQPSYAISYNYSPIVSQTLTASLFYQGGSSLQPPSCRIEETRGKARMTPYLTTKEGDRDENKYRGRDEDEGRDEDEYESRGEDEDDDHDEEEEPAPKFVPYL

SEQ ID NO: 58697 - protein, 239 aa, Zea mays
  Coding DNA Sequence Number=SeqID_16918
  Pfam annotation: Domain name=zf-CCHC; Domain location=137-154; Score =16.6; E_value=0.0018; Accession=PF00098.13; Description=Zinc knuckle
MEFRKKYISQRFLDKKRKEFLKLKQVRMTVTEYELERACKAEELSKEKKKADSEAKDERKRSMSKHYQSSSKKFRESHSRSNASIGYMSRGRAKQYSYPKAQVSMESSVGSVRNNKLECRQCGRRHVGECWGKYNNRFCYKCGSRDHFIWDCSKLAKKDNVQCTRQSNTAARGRPPRNTGIVSGSQRGTTDTALRSEARAPARAYAIRARKEASSPDVITGTFTLYDTTVVALIDPVYS

SEQ ID NO: 58698 - protein, 990 aa, Zea mays
  Coding DNA Sequence Number=SeqID_16919
  Gene Ontology: Mol. function=porin activity; Cellular component =nuclear pore; Biological process=transport
  Homolog annotation: Hit_ID=UPI000016318A; Match level="QueryCoverage =81%, HitCoverage=80%, E-value=1e-137, Identity=49%"; Hit description= transporter
  Pfam annotation: Domain name=Nucleoporin2; Domain location=821-990; Score=123.1; E_value=8.1e-34; Accession=PF04096.4; Description =Nucleoporin autopeptidase
  Subcellular localization annotation: CTP_CleavageSite=56; ConfidenceScore=5.84e-01
MFGTTNPFGQPASSPFGQTNPSSNPFAPKSSFGSPTPFGSQTGGSLFGGTSTGVFGAAQPSSPFSSTTTFGASSSPAFGSSMPAFGSSSTPAFGNSSSSFGGPSGFGQKPAFGFGSTPTQSSPFGSSGQQSQPTFGSGIFGSSTPFGSTQSAFGATSTAAFGATSTPAFGATSTPAFGATSTPAFGATSTPAFGATSTPAFGATSTPAFGSTSSPAFGSTGSPFGSTGTAFGVSNAPAFGASSTPAFGTSSTPAFGASSTPSFSFGSSPAFGQSTAAFGSSPFGTTTVGAQSSPFGSQSSSPAFGSTTFGQSAFGGQRGGSRVAPYTPTTDADSGSGTQPAAKLESISAMHVYKDKSHEELRWEDYQLGDKGGPQPAAQPSGGIGFGVSAAPASPFGSSSTIGQTSANPFSGTSANPFSIKPPSFNSASFTTSTTTSNPFQSTSSSLFGPSSSTTPSIFSSSAPAFGTGSSLFSSSVTPSFSSSPSIFGTGAAPATTPTFATGLNFGSSQGSSLFTSTPAIGQASSTFGQNTSSFGPTSIFNTPSTGFSGNMFSSSLSLPPSSNPTAFGSTTPSFASPFQPAQTSGAFSFSNLGQTQMSGGSGIFGQSNVGLPSVTQNAAVVQPVTISNPYGTLPAMPQMSIGRAGTAPSVQYGISSMPVTDKPVPVRISPLLTSRYISQRRIRLPARKYHPNNGNPKVPFFNDDEETPSTPKADAVFIPRENPRALVIRPTENWPSRASVEKVLPLKDASSLVHENGKVSDDGFNAEDKDKNPAENGLVKEQIHHNQKANGVHDDHSVQKEDSFRTLSGHRAGEAAIVYEHGADVEALMPKLRRSDYYTEPRIQELAAKERAEPGYCRRVKDFVVGRHGYGSIKFLGETDVRCLDLESLVQFNNREVIVYMDDSKKPPVGQGLNKPAEVTLLNIKCFDKRTREQYTEGPKVEKYKEMLKKKAEDQGAEFLSYDPIKGEWRFRVNHFSKYKLEDEEEDVL

SEQ ID NO: 58699 - protein, 237 aa, Zea mays
  Coding DNA Sequence Number=SeqID_16920
  Gene Ontology: Mol. function=structural constituent of ribosome; Cellular component=ribonucleoprotein complex; Biological process =translation
  Homolog annotation: Hit_ID=P30707; Match level="QueryCoverage=67%, HitCoverage=82%, E-value=5e-72, Identity=85%"; Hit description=60S ribosomal protein L9
  Pfam annotation: Domain name=Ribosomal_L6; Domain location=3-81; Score=52.1; E_value=1.9e-12; Accession=PF00347.13; Description =Ribosomal protein L6
  Pfam annotation: Domain name=Ribosomal_L6; Domain location=93-165; Score=26.4; E_value=9.8e-05; Accession=PF00347.13; Description =Ribosomal protein L6
  Pfam module annotation: Pfam domain module=Ribosomal_L6::Ribosomal _L6; Domain location=3-81::93-165
MDIPDGVSVKIKAKVIEVEGPRGKLIRDFKHLNLDFHLIKDEETGKRKLRIEAWFGSRKTSAAIRTALSHVENLITGVTKGYRYKMRFVYAHFPINASITNANKSIEIRNFLGEKKVRKVDMLEGVSIVRSEKVKDEIVLDGNDIELVSRSAALINQHQHPDFDSQQNGKDWNVGASYSHTDYEFHWLLEMENVKIRSGSGGAKVSGTFWRGGFQLKGFVERPLINIYGTNGSESQE

SEQ ID NO: 58700 - protein, 418 aa, Zea mays
  Coding DNA Sequence Number=SeqID_16921
  Gene Ontology: Mol. function=structural molecule activity; Cellular component=cytoskeleton; Biological process=sperm individualization
  Homolog annotation: Hit_ID=P10987; Match level="QueryCoverage=89%, HitCoverage=99%, E-value=0.0, Identity=91%"; Hit description=Actin-5C
  Pfam annotation: Domain name=Actin; Domain location=45-418; Score =823.4; E_value=1.2e-244; Accession=PF00022.9; Description=Actin
MPVEPLRISLDMRVAHTRDNPDTKSIVTLSHFHSGIITSCDSPKDEDIQPLVVDNGTGMVKAGFAGDDAPRAVFPSIVGRPRHTGVMVGMGQKDAYVGDEAQSKRGILTLKYPIEHGIVSNWDDMEKIWHHTFYNELRVAPEEHPVLLTEAPLNPKANREKMTQIMFETFNVPAMYVAIQAVLSLYASGRTTGIVLDSGDGVSHTVPIYEGYALPHAILRLDLAGRDLTDALMKILTERGYSFTTTAEREIVRDIKEKLAYVALDFEQELETAKSSSSIEKSYELPDGQVITIGTERFRCPEVLFQPSLIGMEAPGIHETTYNSIMKCDVDIRKDLYGNIVLSGGSTMFPGIADRMSKEITALAPSSMKIKVVAPPERKYSVWIGGSILASLSTFQQMWISKAEYDESGPAIVHRKCF

SEQ ID NO: 58701 - protein, 123 aa, Zea mays
  Coding DNA Sequence Number=SeqID_16922
MDAEPMAYYSPQQAEPEQDPQPDPGQSQLNMDSPGYRPDSVGGEYYSSFAQGEYAYDFELFGSPRPQYGMPGPFDTYPQHYRTHDGSSSSAVNDQQDLSSTFSTSPPADDEDVSRRPGLIAYF

SEQ ID NO: 58702 - protein, 70 aa, Zea mays
  Coding DNA Sequence Number=SeqID_16923
  Subcellular localization annotation: CTP_CleavageSite=67; ConfidenceScore=5.06e-01
MDAQNSSSEPPSSLFVVDSSRVAFAIDLAFVYTPSQQRQHSSRDTPLHPALATLNKNAPSRSYTLVVAAR

SEQ ID NO: 58703 - protein, 46 aa, Zea mays
  Coding DNA Sequence Number=SeqID_16924
  Gene Ontology: Mol. function=electron carrier activity; Cellular component=integral to thylakoid membrane; Biological process =electron transport
  Homolog annotation: Hit_ID=P04658; Match level="QueryCoverage=74%, HitCoverage=11%, E-value=4e-09, Identity=85%"; Hit description =Apocytochrome f precursor
  Pfam annotation: Domain name=Apocytochr_F_C; Domain location=3-45; Score=-50.8; E_value=0.0016; Accession=PF01333.10; Description =Apocytochrome F, C-terminal
MAKSVDATDLIVLAKELLVSEGESIKLDQPLTSNPNVGGFGQGVQK

SEQ ID NO: 58704 - protein, 97 aa, Zea mays
  Coding DNA Sequence Number=SeqID_16925
MPPKSDPRGALQQGHEGEMKGRGLTKHGRCRGLRPRRRARAVHMRPFKYAGVDEEDDKWGPSDSVFMVDERQAGGPPMGPSAEANEPNWPRPSAGGK

SEQ ID NO: 58705 - protein, 57 aa, Zea mays
  Coding DNA Sequence Number=SeqID_16926
MACQMLPVWIHIYILSVLQLEGPHLSLTIAILAKGRVLETGISAELTVKSIHGILFD

SEQ ID NO: 58706 - protein, 191 aa, Zea mays
  Coding DNA Sequence Number=SeqID_16927
MDEPPHGVWRTRGGVRATVTNPEGSGRQFTAGRSLDQSPTHDETHRAGDGANSSLSALCSLLVAAAQIPPVVAWITPPSLSIVPHLMTWAAPDGLSRGGKHLRAVDFMGEGKSELVRATAVGASLPARRSRSVAGERARIQRDDPTKRGSRGSVGGGRALPTARKRCSDRRGEEEWVRQVETTRQRPKVTS

SEQ ID NO: 58707 - protein, 119 aa, Zea mays
  Coding DNA Sequence Number=SeqID_16928
MDPGPSISAVRFADPTVIYNRHEPATPVAPKSSVYHPATIHRDPRHIHPMVTRHAFGVLRPVDRMILATGTTTTLAGRSGLPKILGQAFRVFYILGFKQLNPNPYPNLRVPVIFGYGFG

SEQ ID NO: 58708 - protein, 67 aa, Zea mays
  Coding DNA Sequence Number=SeqID_16929
MAYGAEITRLGAIAYGAEKRQNNPEFGMEYNARSLQLKIGLCLACYRYSGYKFLNAVTFVENEHCGT

SEQ ID NO: 58709 - protein, 47 aa, Zea mays
  Coding DNA Sequence Number=SeqID_16930
MANCSAAAGKLIVAETFSNLREQGKGWIAGAMVADTQCWSRLVAGNT

SEQ ID NO: 58710 - protein, 124 aa, Zea mays
  Coding DNA Sequence Number=SeqID_16931
  Gene Ontology: Mol. function=oxidoreductase activity
  Homolog annotation: Hit_ID=UPI000038DD8A; Match level="QueryCoverage =64%, HitCoverage=35%, E-value=1e-08, Identity=39%"; Hit description =COG5413: Uncharacterized integral membrane protein
MYACDGAGLDLSPVLIHIYVTPIKRFLQVLWAIGALGSVGTYLVAARPLDEGLVQYVVDHPVVLWFVGPTFVVLTGLVFKEGQVEKPAERKTHRKSTLLYLEPSLVEKIRNLAAKQPYPYRRHR

SEQ ID NO: 58711 - protein, 93 aa, Zea mays
  Coding DNA Sequence Number=SeqID_16932
MCEAGAALPAGAVSVAPMPFIAAGSLERDEDENEFLATAKERSERNCECVTVCVCNELRPNQAEVEDRQSDGHLQILDELFGYSVALVNIADP

SEQ ID NO: 58712 - protein, 54 aa, Zea mays
  Coding DNA Sequence Number=SeqID_16933
GLDDLIFNTGHWAHRQTQAVCTQAPKCQVSLATAYSSVGSWGHLEWDGKVAQTA

SEQ ID NO: 58713 - protein, 447 aa, Zea mays
  Coding DNA Sequence Number=SeqID_16934
  Gene Ontology: Mol. function=nucleic acid binding; Cellular component= ribonucleoprotein complex
  Homolog annotation: Hit_ID=Q5ZDX8; Match level="QueryCoverage=66%, HitCoverage=67%, E-value=9e-99, Identity=66%"; Hit description =Heterogeneous nuclear ribonucleoprotein A2/B1-like
  Pfam annotation: Domain name=RRM_1; Domain location=178-248; Score =43.1; E_value=9.7e-10; Accession=PF00076.12; Description=RNA recognition motif. (a.k.a. RRM, RBD, or
  Pfam annotation: Domain name=RRM_1; Domain location=77-147; Score =80.2; E_value=6.5e-21; Accession=PF00076.12; Description=RNA recognition motif. (a.k.a. RRM, RBD, or
  Pfam module annotation: Pfam domain module=RRM_1::RRM_1; Domain location=178-248::77-147
MDPFSKKRKPDENGAVTASPAGGAATLGLTRDDVIRLLEPLSRDQLADIAAAAALVSSQALDAVRAAADRDPALRKLFVRGLGWETTSDSLRAIFSAYGDLEEAVVITDKPTGRSKGYGFVTFRHADSAVLALKEPSKKIDGRMTVTQLAAAGSAGGPAGGPAGSGGAPVSDVSLRKIFVGNVPADMASERLLAHFASYGEIEEGPLGFDKQTGKFRGFALFVYKTPEGAQASLVDTVKVIDGHQLVCKLALDGKKEKQGQSQQPGPGNHQQQQILPGGPQDIQGGLGLGSQMGAQYGVPGTGMPSFGFGGVGGGFGGPNPYGNMPSSMGGGGAGGLGSMGGQVPSGLASAGAGAFGPGGLGGGSFGVSSQFGAAGMGAYGGLGIGGGSMYRIQQGAGGLPAGTFGDGGSYPPPGSGFRGQDPQGGMSPPGPGGRAPPMYPNVPPYF

SEQ ID NO: 58714 - protein, 358 aa, Zea mays
  Coding DNA Sequence Number=SeqID_16935
  Gene Ontology: Mol. function=iron-sulfur cluster binding; Biological process=electron transport
  Homolog annotation: Hit_ID=Q6BKH6; Match level="QueryCoverage=77%, HitCoverage=85%, E-value=3e-27, Identity=41%"; Hit description =Similar to CA4587|IPF2223 Candida albicans IPF2223
  Pfam annotation: Domain name=UPF0052; Domain location=14-323; Score =177.4; E_value=3.5e-50; Accession=PF01933.9; Description =Uncharacterised protein family UPF0052
MGTSELPCIFEFDSGGTAFNGVVEELKKVTTRVAHVLPVSDDGGSTAEIVRVLGGPAVGDIRSRCLRLSDESTAEALSVRKLLGHRLPIDPSEAKLEWYQIVEGDHTLWEGVSRPYRETIRAFLVYFHSEILRRSAEMFCFTNGRMGLSFVAKMKYHIQAMDAEKLSTSTLPSRIKRVFYMSSEGSNLLHEVFPEVNHTVLEQLSKVDCIVYAMGSLFTSVCPSLVLRGIGETIASRSIPKILLLNGSHDRETAGLSASGFVTAITDSLNRTYGDPHKSLKNHTNDYVNAILVPEGGQVPLDIENLAAQGIFHVVTVKSIHDPKVGVIFDARSLIQALTILISEHMDMCVSKVQNVVM

SEQ ID NO: 58715 - protein, 553 aa, Zea mays
  Coding DNA Sequence Number=SeqID_16936
  Gene Ontology: Mol. function=catalytic activity; Cellular component =integral to membrane; Biological process=metabolic process
  Homolog annotation: Hit_ID=Q5ZDY7; Match level="QueryCoverage=97%, HitCoverage=98%, E-value=1e-172, Identity=58%"; Hit description =Conserved transmembrane protein-like
  Subcellular localization annotation: CTP_CleavageSite=84; ConfidenceScore=5.08e-01
MADWQDQAKPMMQTKFSSCRGVSFELNASPGSPFALQAVDYYPTQPPPDAPTPTIAGRWVWLPQTFSRASSRIFPSTFDRTLSRASSHFCDLDEEDADDEPVVNGADVEMAIATSAVAVGDDVPGKKANAPAPAKPPASSARSRLGVILLDQGLFTVYKRLFVLCVALNAVGLVLAATGHFPYARAHAAVFAMYNILALTVCRSEAVLRVVFWLAVALFGRPWVPVVVKTGVTAILQSLGAPAPGRDATRGRRRGRRPYSACSRSRAWPRSPLVRHLHHNVFERTHRFAGWTALALLWAFVVLSAGYDPATASYDRLTGSVLVKRQELWLTAAITFFTFLPWLTVRRVPVTVAARSNHASVINFQGGVKGGLLGRISRSPLSEWHAFGIISDNGHTHAMLAGAVGDFTRALISDPPTRLWVRGVHFAGLPYLLNMYRRATMVATGSGICVFMSFLMQPGPAELSLVWVAKGIDANYGEEMKSAAYSSERLRGRVIVHDTALLGRPNVAALAVDAARRWGSEVVVVTSNPEGSRDVVAGCNKAGIPAFGPIWDS

SEQ ID NO: 58716 - protein, 142 aa, Zea mays
  Coding DNA Sequence Number=SeqID_16937
  Gene Ontology: Mol. function=acyltransferase activity; Cellular component=mitochondrion; Biological process=photorespiration
  Homolog annotation: Hit_ID=Q6K2G7; Match level="QueryCoverage=87%, HitCoverage=48%, E-value=1e-63, Identity=96%"; Hit description =Putative mitochondrial NADH:ubiquinone oxidoreductase 29 kDa subunit
MVVDGGPDISDTIPKVRGLPAETLVDRYVTVGAYCLLRSCTIEPECIIGQHSILMEGSLVETNSILEAGSVLPPGRRIPTGELWAGSPARFVRKLTNEEIMDIPKLATAINDLMQSHFSEFLPYSNAYLEVEKLKKSFSIPL

SEQ ID NO: 58717 - protein, 61 aa, Zea mays
  Coding DNA Sequence Number=SeqID_16938
MEIILGGVASISDEISWFKNEGEKSAIIYRIAHIEYYKARSTPSNVSKDYTCLGTTVGSIS

SEQ ID NO: 58718 - protein, 423 aa, Zea mays
  Coding DNA Sequence Number=SeqID_16939
  Homolog annotation: Hit_ID=Q6YWQ4; Match level="QueryCoverage=22%, HitCoverage=11%, E-value=6e-18, Identity=55%"; Hit description =Putative potassium transporter HAK2p
MKTLCPKPGKGGKIHPSPAEDPTAAAFRLLPAAILVLVAGLCPEDQRVLAHLVTRSFLLGWDTITAPPPEQARGGPRRRRGHPPTVGCLCFQCYGSFWSRWDCSPQHDRIHAVLDAFEEHLNAADRRRGGSPESQEPPSEVAHEPSAPLLPSCPCTPPPPAPAACLSENKENVPEETGAEAKAEQCGGEVAAEADEERKRGWADVMGGGNAAGESSRATQLLAYQSLGVLYGGEGGTFALYSLICRHVRAGLLPGGGTRDELMEEEKTTGRHGERPVSRDRAVLEKYRVMQRLLLLFTLLGTCMVIGDDLLTRQSQVGPLATVLDLDGWSQSASPVAHDRVACPHPPASPPPQSTCAIPGSRRRTSRLDPDTGPCAPSLLTTSRGTQLHFKPPHKPPQKTPPTANVHAALAQQPTLVLPDAPH

SEQ ID NO: 58719 - protein, 102 aa, Zea mays
  Coding DNA Sequence Number=SeqID_16940
MSIGDVCPKEPKESSQAQDQPSSSIQASPRAQDEEMAQEEEDEDQDDEPPQEEDIDQGEMKMIMKRKMNKKFKIKYNRTQESTKQFNEIIPSTPFLVTSTRG

SEQ ID NO: 58720 - protein, 315 aa, Zea mays
  Coding DNA Sequence Number=SeqID_16941
  Gene Ontology: Mol. function=protein serine/threonine kinase activity; Cellular component=membrane; Biological process=protein amino acid phosphorylation
  Homolog annotation: Hit_ID=Q6H6V1; Match level="QueryCoverage=89%, HitCoverage=88%, E-value=9e-91, Identity=52%"; Hit description =Putative receptor protein kinase PERK
  Pfam annotation: Domain name=Pkinase; Domain location=40-261; Score =49.5; E_value=1.1e-11; Accession=PF00069.15; Description=Protein kinase domain
  Pfam annotation: Domain name=Pkinase_Tyr; Domain location=40-261; Score=-0.2; E_value=1.9e-12; Accession=PF07714.7; Description =Protein tyrosine kinase
  Pfam module annotation: Pfam domain module=Pkinase::Pkinase_Tyr; Domain location=40-261::40-261
KTLFSYGGAKVVFDQMGAMCVGYSPLSGAVSEMRKATHDFSGANKIGEGGFGSVFRGKLKDGTIVAVKVLSANSRQGSGRSNIRFNWRARVKIAVGVARGLAYLHDGIRPPIIHRDIKASNILLDKDLTPKISDFGLARLLPPNATHVSTRVAGTIGYLAPEYAVRGQVTKKSDIYSFGVLLLEIVAGRCNYNSRLPQGDQFLLEKTWAYYVQGKLEKVIDAEAGEDLNVEEACRFLKVGLLCAQDAMKLRPNMASVVLMLIGEKGISVDRITKPAVIGDPYLDRRPSNADSTTMKSFATTEALTSSEANTEWSL

SEQ ID NO: 58721 - protein, 106 aa, Zea mays
  Coding DNA Sequence Number=SeqID_16942
MAERVQADKGGTTERAENGTNEAVANPNVKAARVTPLHIAADSGNAIQLQGGSRAARLGKQLACICMASSTSPVVGMPALSPTMKMIKPLWSLKALNRGNAIDEVY

SEQ ID NO: 58722 - protein, 125 aa, Zea mays
  Coding DNA Sequence Number=SeqID_16943
MGSSYIIGADARVPNPVPKNLVPPQVEREKWGEEVCTTAGAVPGDLRWFVAAPRSGSSRVGINLGGGQPVSALVSSEPYFLLHGILVTDGTLWAIHGGKVGRGLGTWVQPVSFVGSSGTAWRVRR

SEQ ID NO: 58723 - protein, 106 aa, Zea mays
  Coding DNA Sequence Number=SeqID_16944
MCVGGALVLAAGVPTCRLSQGEPEKPSNGAGPNGRREKPRCHAGRLGRDAAAATLTWRLEQESHRRMPTVVAKMPQSFLMLLVTLVSAATTLPPEALNMRGQLLKF

SEQ ID NO: 58724 - protein, 343 aa, Zea mays
  Coding DNA Sequence Number=SeqID_16945
  Gene Ontology: Mol. function=rRNA N-glycosylase activity; Biological process=negative regulation of protein biosynthetic process
  Homolog annotation: Hit_ID=Q00531; Match level="QueryCoverage=86%, HitCoverage=50%, E-value=2e-77, Identity=57%"; Hit description=60 kDa jasmonate-induced protein
MALVIPTAAEENGSLSAPLGGENIVAIRPPRIQSIPVFSSHFPVPNRVLFLGDMAAATGYSDAPTDEQLLAYAELPKHGRDMAEVFAVRIPATVGGNLPPRGSIVFYGGHCCSDFIYSWSPLEEEEDTSKQICDSQGNLVLTGPSLATSAYSPIAFFLYLHDGSPQAGEATEDDEDIGRILCDCIGDDFSNYNRAIVETVQTGYGPAEVIYAVLSNGVQGRVAVKLARPPVSKAGEEDATTILGRIVARSKLFDVGCVLFYKEGDNGVNVRPGGLIQLAREALAVPLHMPLTIELDLHRCSGDEIVGGVLEFNPATNGQHTERLVGENGAELEVAISWSQYPW

SEQ ID NO: 58725 - protein, 98 aa, Zea mays
  Coding DNA Sequence Number=SeqID_16946
  Homolog annotation: Hit_ID=Q56TP8; Match level="QueryCoverage=45%, HitCoverage=16%, E-value=6e-13, Identity=75%"; Hit description=Beta -expansin TaEXPB4
MDSKRRLQGPFSLRITNESGETLVAYQVIPANWAPNSYYRSNIQYEAFGSAAGQATGSAVGLVVDVALWEMYTCIWCWIAGLSCLVLAVVGAHNFQLF

SEQ ID NO: 58726 - protein, 140 aa, Zea mays
  Coding DNA Sequence Number=SeqID_16947
MREGERAELRPRRNRGCAAIEAPRPSEERGWGKKIHGLEMQGTRLHAQGLHGELEGDERTRNRQSADDEQGAGRKESSRKPTRHRRARPAGNRRGKIRALTRGPLGRALGSRAEGERASCREEQSAGEHEQERGRPGARR

SEQ ID NO: 58727 - protein, 135 aa, Zea mays
  Coding DNA Sequence Number=SeqID_16948
  Homolog annotation: Hit_ID=Q56TP8; Match level="QueryCoverage=33%, HitCoverage=16%, E-value=6e-13, Identity=75%"; Hit description=Beta -expansin TaEXPB4
MDSKRRLQGPFSLRITNESGETLVAYQVIPANWAPNSYYRSNIQYEAFGSATGQATGSAVGLLISSATRLHTLKQYNTLTVDVGSYAPAVRTTLSLDVLVLLPTAGLEEHFNVPVNNYDLWINFLQTLVSGRIDL

SEQ ID NO: 58728 - protein, 83 aa, Zea mays
  Coding DNA Sequence Number=SeqID_16949
MSIKLKKMKMEIKTMSHLKRRTIIKGEMNMIKIKDALRDLDWVVAVQEELNNFTRNEMHISYSSCAKAKNNVLSRVSLVLVLD

SEQ ID NO: 58729 - protein, 96 aa, Zea mays
  Coding DNA Sequence Number=SeqID_16950
MFMTSYGEIGGWEHGNFSPGMWDAMDPICVVDGSACYVIDGHRGTGSPGAGGCAARRVAWATATGAKVEDEGALIWQWMVAIRCSYPFGPIKPVSS

SEQ ID NO: 58730 - protein, 101 aa, Zea mays
  Coding DNA Sequence Number=SeqID_16951
MVRHVCILLGAPLGAWQTIEESLQSPSNTSVTSYGEIGGWEHGNFSPGTWDAVDPICVMDGSACYIIDARVSVESGSSGDWVPWRQRVRRQEDCAGHCDGS

SEQ ID NO: 58731 - protein, 115 aa, Zea mays
  Coding DNA Sequence Number=SeqID_16952
MASGGGALQHGPNCTWALLVLRETWPHGLRGNGNSRTLPFHHLQQHGFENLKYGVYFRKSYPYKEKDSQGYAGFWESRRFRVYSTNVDVEVILSWRILRWSDNFFNYNLFLVFYT

SEQ ID NO: 58732 - protein, 140 aa, Zea mays
  Coding DNA Sequence Number=SeqID_16953
MAPKRATSKAGVSIDDTAKAALLAEKKGKALGDSTLQEAFEDDAVNSKRQRHDNPTLDGTMHTSSSEGARRAPPPGFAPLEGEDTIEDGEVIGISAKDQLELRALRIKNNHLQKQKEILEPKHQRVTMQAKVQQMIIDEE

SEQ ID NO: 58733 - protein, 63 aa, Zea mays
  Coding DNA Sequence Number=SeqID_16954
MAWKWFHHVLAGPRSESLRHQGKLPAGVAPAVAGSHFVEPLASALLELWEVVGEPARFVHDKV

SEQ ID NO: 58734 - protein, 124 aa, Zea mays
  Coding DNA Sequence Number=SeqID_16955
MCQCAGYHADSDEKKTDYFRRGLNTKLHERLKTEDCILAHRAEKKRKAPMTGSSAPPQRFRIVSNNQSRDPNSKQGDGSSGRLSSSKHPTVSPLPLQGIISLSDSNNSNSLKKEMGTNVSHVET

SEQ ID NO: 58735 - protein, 56 aa, Zea mays
  Coding DNA Sequence Number=SeqID_16956
MAGGGTLAGAKEGRLASEADPAMKATLETIRIAEEAVDEAVNKLLNEAAKKMLKED

SEQ ID NO: 58736 - protein, 1187 aa, Zea mays
  Coding DNA Sequence Number=SeqID_16957
  Gene Ontology: Mol. function=nucleoside-triphosphatase activity; Cellular component=integral to membrane; Biological process=transport
  Homolog annotation: Hit_ID=Q8GU90; Match level="QueryCoverage=99%, HitCoverage=79%, E-value=0.0, Identity=82%"; Hit description =Pleiotropic drug resistance protein 3
  Pfam annotation: Domain name=ABC2_membrane; Domain location=214-427; Score=205.8; E_value=1e-58; Accession=PF01061.14; Description=ABC-2 type transporter
  Pfam annotation: Domain name=ABC2_membrane; Domain location=884-1129; Score=215.6; E_value=1.1e-61; Accession=PF01061.14; Description=ABC-2 type transporter
  Pfam annotation: Domain name=ABC_tran; Domain location=597-787; Score= 110.3; E_value=5.7e-30; Accession=PF00005.17; Description=ABC transporter
  Pfam annotation: Domain name=PDR_assoc; Domain location=432-498; Score=155.5; E_value=1.4e-43; Accession=PF08370.2; Description=Plant PDR ABC transporter associated
  Pfam module annotation: Pfam domain module=ABC2_membrane::ABC2 _membrane::ABC_tran::PDR_assoc; Domain location=214-427::884 -1129::597-787::432-498
MGGQDANVVTDYILKILGLEICADTMVGDEMLRGISGGQRKRVTTGEMLVGPARALFMDEISTGLDSSTTFQIVNSLRQSIHILGGTAVISLLQPAPETYNLFDDIILLSDGQVVYQGPREEVLEFFESVGFRCPERKGVADFLQEVTSKKDQKQYWARPNEPYRFVAVKEFATAFKSSHTGRSITNELAVPFDKSKSHPAALTTTRYGVSGKELLKANIDREILLMKRNSFVYMFRTFQLMLMSIIAMTLFFRTKMKHGTVNDGGLYMGALFFGVLMIMFNGFSELALTVFKLPVFFKQRDLLFFPAWSYTIPSWILKVPITFIEVGGYVFLTYYVIGFDPNVGRFFKQYLLLLVVNQMAASLFRFIGGVSRNMIVANVFASFMLLVVMVLGGFILVRDKVKKWWIWGYWISPMMYAQNAISVNEMLGHSWDKILNSTASNETLGVQVLKSRGVFTEAKWYWIGFGAMVGFTILFNALFTVALTYLKPYGNSRPSVSEEELKEKHANIKGEVLDGNHLVSASSHRSTGVNPETDSAIMEDDSALTKRGMILPFVPLSLTFDNIKYSVDMPQEMKAQGVQEDRLELLKGVSGSFRPGVLTALMGVSGAGKTTLMDVLAGRKTGGYIEGDIRISGYPKKQDTFARVSGYCEQNDIHSPQVTVYESLLFSAWLRLPKDVDSNKRKIFIEEVMELVELKPLRNALVGLPGVNGLSTEQRKRLTIAVELVANPSIIFMDEPTSGLDARAAAIVMRTVRNTVDTGRTVVCTIHQPSIDIFEAFDELFLMKRGGEEIYAGPLGHHSSDLIKYFESLHGVSKIKDGYNPATWMLEVTTTSQEQILGVDFSDIYKKSELYQRNKALIKELSQPAPGSTDLHFPSKYAQSSITQCVACLWKQNLSYWRNPPYNTVRFFFTTIIALLLGTIFWDLGGKTYTSQDLMNAMGSMYSAVLFIGVMNCTSVQPVVAVERTVFYRERAAGMYSAFPYAFGQVVIELPYALAQDILYGVIVYSMIGFEWTAAKFFWYLFFGYFTLLYFTFYGMMAVGLTPNYHIAAIVSSAFYAIWNLFSGFIIPRPVRPPILMPLCNFSVRFPKAHSRSCLPLRYLQKVPIWWRWYCWICPVAWTLYGLVVSQFGDVMTPMDDGRAVKVFVEDYFDFKHSWLGWVAAVVVAFAVLFATLFGFAIMKLNFQKR

SEQ ID NO: 58737 - protein, 128 aa, Zea mays
  Coding DNA Sequence Number=SeqID_16958
  Gene Ontology: Mol. function=hydrogen ion transporting ATP synthase activity, rotational mechanism; Cellular component=proton -transporting two-sector ATPase complex; Biological process=ATP synthesis coupled proton transport
  Homolog annotation: Hit_ID=Q41898; Match level="QueryCoverage=48%, HitCoverage=88%, E-value=7e-30, Identity=100%"; Hit description=ATP synthase epsilon chain, mitochondrial
  Pfam annotation: Domain name=ATP-synt_Eps; Domain location=9-57; Score=88.9; E_value=1.6e-23; Accession=PF04627.3; Description =Mitochondrial ATP synthase epsilon chain
MSATTAAVPFWRAAGMTYIGYSNICAALVRNCLKEPFKSEAASREKVHFSISKWTDGKQEKPKYSVYRVEFVMGDRMGKAARDNLKNHIFRICASEYEPELCSVCIAFRYFFNANLVLSAAVRTESDE

SEQ ID NO: 58738 - protein, 1265 aa, Zea mays
  Coding DNA Sequence Number=SeqID_16959
  Gene Ontology: Mol. function=nucleoside-triphosphatase activity; Cellular component=integral to membrane; Biological process =proteolysis
  Homolog annotation: Hit_ID=Q8GU89; Match level="QueryCoverage=99%, HitCoverage=87%, E-value=0.0, Identity=83%"; Hit description =Pleiotropic drug resistance protein 4
  Pfam annotation: Domain name=ABC2_membrane; Domain location=324-536; Score=190.1; E_value=5.4e-54; Accession=PF01061.14; Description=ABC -2 type transporter
  Pfam annotation: Domain name=ABC2_membrane; Domain location=990-1204; Score=249.0; E_value=1e-71; Accession=PF01061.14; Description=ABC-2 type transporter
  Pfam annotation: Domain name=ABC_tran; Domain location=1-222; Score =67.4; E_value=4.4e-17; Accession=PF00005.17; Description=ABC transporter
  Pfam annotation: Domain name=ABC_tran; Domain location=703-893; Score= 103.6; E_value=5.7e-28; Accession=PF00005.17; Description=ABC transporter
  Pfam annotation: Domain name=PDR_assoc; Domain location=541-603; Score=108.9; E_value=1.4e-29; Accession=PF08370.2; Description=Plant PDR ABC transporter associated
  Pfam module annotation: Pfam domain module=ABC2_membrane::ABC2 _membrane::ABC_tran::ABC_tran::PDR_assoc; Domain location=324 -536::990-1204::1-222::703-893::541-603
MTLLLGPPGSGKTTLLLALAGKLDKDLRVSGKVTYNGHGMNEFVPERTAAYISQHDLHIGEMTVRETLAFSARCQGVGTRYEMLTELARREKAANIKPDHDIDVYMKASAMGGQESSIVTDYTLKILGLEVCADTLVGNEMMRGISGGQRKRVTTGEMLVGPARALFMDEISTGLDSSTTYQIVNSLRQTIHILGGTAVISLLQPAPETYNLFDDIILLSDGHVVYQGPREHVLEFFEFMGFRCPARKGVADFLQEVTSRKDQGQYWYRQDRPYRFVPVKKFADAFSIFHVGRSTQNELSEPFDRTRSHPAALATSKFGASRMELLKATIDRELLLMKRNAFMYIFKAVNLTVMSFIVMTTFFRTNMKRDASYGNIYMGALFFALDTIMFNGFAELAMTVMKLPVFFKQRDLFFFPAWAYTIPSWIVQIPITFLEVGVYVFTTYYVIGFDPNVFRFLKQYLLLLALNQMSSALFRFIAGIGRDMVVSHTFGPLALLAFQALGGFILARPDVKKWWIWGYWISPLSYAQNAISTNEFLGHSWSKIQNGTTVGIGVLQSRGVFTEAKWYWIGLGVLVGYALLFNLLYTVALAVLSPFTDSHGSMSEEELKEKHANLTGEVIEVRKEKTSRRQELELSHSVGQNSVHSSEDSSQNRKGMALPFPPLSLTFNDIRYSVDMPEAMKAQGVTEDRLLLLKGVSGSFRPGVLTALMGVSGAGKTTLMDVLAGRKTGGYIEGDITISGYPKKQETFARISGYCEQNDIHSPHVTVYESLLFSAWLRLPSGINLETRKMFIEEVMDLVELTSLRGALVGLPGVSGLSTEQRKRLTIAVELVANPSIIFMDEPTSGLDARAAAIVMRTVRNTVNTGRTVVCTIHQPSIDIFEAFDELFLMKRGGEEIYVGPVGQNSSKLIEYFEGIEGISQIKDGYNPATWMLEVSSSSQEEILGVDFSEIYRQSELYQRNKALIEELSTPPPGSSDLNFPTQYSRSFFTQCLACFWKQKKSYWRNPTYTAVRLLFTVVIALMFGTMFWDLGRKTNKQQDLFNAMGSMYAAVVYIGMQNSGSVQPVVVVERTVFYRERAAGMYSAFPYAFGQVAIEIPYIFVQTLLYGVLVYSMIGFEWTVAKFLWYLFFMYFTLLYFTFYGMMAVGLTPNETIAVITSSAFYNVWNLFSGYLIPRPKLPVWWRWYSWICPVAWTLYGLVASQFGDIAHPLEDSPTGQTVAQFITDYFGFHHDFLWVVAGVHVGLTVLFAFLFSFAIMKFNFQNR

SEQ ID NO: 58739 - protein, 76 aa, Zea mays
  Coding DNA Sequence Number=SeqID_16960
MCTSTGLPPICVGGCCCPRSFCAKMPSKQGVEKDEGVNFVMTTRKRRQRINKAKRRCPYNSMAESLNIEDNITLTL

SEQ ID NO: 58740 - protein, 69 aa, Zea mays
  Coding DNA Sequence Number=SeqID_16961
MHITAKDNPKDVEFDDWFSSHEDKPMEDSKLEDPNMFDWVVQVREDEQLEYFKLGDYLIMSTHKNGRHE

SEQ ID NO: 58741 - protein, 91 aa, Zea mays
  Coding DNA Sequence Number=SeqID_16962
  Gene Ontology: Mol. function=endonuclease activity
  Homolog annotation: Hit_ID=Q5ZE24; Match level="QueryCoverage=80%, HitCoverage=8%, E-value=2e-32, Identity=89%"; Hit description =Endonuclease/exonuclease/phosphatase family protein-like
MRSEILRYDSNGKRVGVDFEGTKDASKEPLVTSYNRKFMGTVDYIWASEGLHTVKVLDTFPIEILKKTTGFPTKKWGSDHIALACELAFTK

SEQ ID NO: 58742 - protein, 121 aa, Zea mays
  Coding DNA Sequence Number=SeqID_16963
MSKPSQQVFLRSYIKRWHNVKTDISIMPEETAIYVLKVLRDWELPQKLVHKALTTLASLFQVTYKYAMSKEVLQHMSSSRKDKKKKEQKVGPEKAMNQKRKTDRHFTATVEWELRDDPKCN

SEQ ID NO: 58743 - protein, 229 aa, Zea mays
  Coding DNA Sequence Number=SeqID_16964
MAPLCRGRSEPWARRRLLRGRGRVRAPGRVRRRPSSEAKTESELWGRARRTEAESEPWGRARRSFLWRPKPDLAAVSLTLSSGTAVGATQAALSSCQAGQWSGEATLALNAPAIRSVGVAIWPRLLLGEDWASGEPKDAVVEGVAPTEAEIAANARAKEDTVVEGVAPTEAEIAANARAKEVVMLIHLPAVASQDAVVEVVAPTEAEIAANARAKEVAMLIHRPAGSAS

SEQ ID NO: 58744 - protein, 85 aa, Zea mays
  Coding DNA Sequence Number=SeqID_16965
MSGDHAKKEMVIDGNKPTSPAKATSHGKAPSRESGNKKKEGSPSRIRMHKDGEMKKKMKKVVYYETDSLSPSTSGSDAASITSKR

SEQ ID NO: 58745 - protein, 229 aa, Zea mays
  Coding DNA Sequence Number=SeqID_16966
  Gene Ontology: Mol. function=phosphoglycolate phosphatase activity; Cellular component=mitochondrion; Biological process=metabolic process
  Homolog annotation: Hit_ID=Q655Y3; Match level="QueryCoverage=92%, HitCoverage=96%, E-value=2e-98, Identity=70%"; Hit description=Dreg -2 like protein
MSLLSKLRLITVDVTGTLIAYKGHLGDYYCMAAKSAGMPCPDYNRMHEGFKLAYTEMARQYPCFGFAAKMPNIEWWRTCVKNSFVKAGYDYDEETFEKVFRRIYSAFGSSAPYSAFPDSQPFLRWAREKGLTVGIVSNAKYRYKDVILPALGLNQVTACGRTTPQARSIGMHALLLDRFKTADAESWRQSGATVLPDLVATQEWLTKDQNDEQEETVAARVLKRMSEKL

SEQ ID NO: 58746 - protein, 214 aa, Zea mays
  Coding DNA Sequence Number=SeqID_16967
MPSTPMPQSSAFAEVIDRQATSVIDLLEDDSSHGLAGANSNAKETSKRACFVATPHQTTTVEGTRSPPINKKSTNAKHASWLVRPPSISSRRSATPSCKSSTTSTAMLSESLYQNLRNIVERATVQRAEIDRHFTLGIESYNLQTTLSWSRGAQPAPSTRTRVPMKDHIRDIHDAYSTTGVGSRRKLRNHARGGVPKVHNKPIKRPKMGSNKES

SEQ ID NO: 58747 - protein, 433 aa, Zea mays
  Coding DNA Sequence Number=SeqID_16968
  Gene Ontology: Mol. function=protein binding; Cellular component =nucleus; Biological process=regulation of transcription, DNA -dependent
  Homolog annotation: Hit_ID=Q655Y0; Match level="QueryCoverage=94%, HitCoverage=94%, E-value=1e-156, Identity=72%"; Hit description =Putative stamina pistilloidia
  Pfam annotation: Domain name=F-box; Domain location=29-76; Score =36.0; E_value=1.3e-07; Accession=PF00646.23; Description=F-box domain
MMHQHHPHHLPRFHSPLSSSSEAVDMDPRVWGRLPQPLVDRVLACLPTPSFLRLRATCRRFCSLIYSSPFLHSHLLLSPHLPFFAFAVPSAGYLLLLDPTRQAPSWSRLPLPLPAPGAGQGFSPAAASAGLLAFLSDASGHKTLLLANPITRLLAPLPLCPTARLSPTVGLAAGPTSFIAVIAGDDLVSPFAVKNISADTFVADAASVPPSGFWAPSSILPRLSSLDPRAGMAFASGRFYCMSSSPFAVLVFDVAANVWSKVQPPMRRFLRSPALVEFGGGREREARVALVSAVEKSRLSVPRSVRMWTLRGGGHGVAGGSSGSGAWTEVARMPADVHAHFAAAEGGRGFECAAHGDFVVLAPRGPASPVLVFDSRRDEWRWAPPCPYNPYVGGIAAGGPGFRVFAYEPRLATPAIGLLDATAPAAFLHGMQG

SEQ ID NO: 58748 - protein, 103 aa, Zea mays
  Coding DNA Sequence Number=SeqID_16969
QKETREPATHGIDSARDLTFGHPGVPPGRAPGGRIPGSAVACSNRVAAHLAGHHEHAAPGAKTTSRKPPQGLAARIGLPGRRERTLLPARAAPMGETRSFSAI

SEQ ID NO: 58749 - protein, 162 aa, Zea mays
  Coding DNA Sequence Number=SeqID_16970
MGLSVCGSLCQGGDEDDGFGYAYGNAQCDDVQLYNCYVRELLILMARLRHTTRKSVIPFLPSRLAERPLRHPVTGQSSHLERLHHRLHEEQERRRQELEQQGSSFSLQQEIESVRSCSPVLPLEAPPAPPLSAPAAGVAAGGDPDDGGGDSSSSHSTDLLEE

SEQ ID NO: 58750 - protein, 125 aa, Zea mays
  Coding DNA Sequence Number=SeqID_16971
MTALEPTIASMGDPVSGQGIHPTQLHSGTKLWVLNDKDETRRVTCTGRESPSKSIKDCVDVGLMIENLLMSHASSWVSFASGRLIPERPTHNGSGEMARLACTLRGKRLDGGVSEFSVGVNSVWS

SEQ ID NO: 58751 - protein, 148 aa, Zea mays
  Coding DNA Sequence Number=SeqID_16972
  Subcellular localization annotation: CTP_CleavageSite=55; ConfidenceScore=5.38e-01
MVTRRLPNPKQRWCPYASASTQYSPFPASTSLVPRPLIPLQATPPVPPLLVGQAAAAAAGGTYRLALRIQRRLIPPNHPRIRDFVYRYCLRRAPLSCVRAQDAVGHCQPNRISASSQCRHISYSYAPFPSVTARRKGVFREDIAQLMV

SEQ ID NO: 58752 - protein, 156 aa, Zea mays
  Coding DNA Sequence Number=SeqID_16973
  Subcellular localization annotation: CTP_CleavageSite=73; ConfidenceScore=5.65e-01
MAPSPVSSALLHHRAPLAAPAHRSAVVFVSPSTILFLRTTRLSPAQRRLQPLALLPQALFQQLAPRILVAGLQSSSVADVQHASVSCSPSLDREKGPRNWLEKKVVAHGSPSVRSKTSIKGYRRSGKYQIKLRCGEPIRYFYYWFYDREIRRFVCA

SEQ ID NO: 58753 - protein, 116 aa, Zea mays
  Coding DNA Sequence Number=SeqID_16974
MVDNEGESHADGPGVVKDKHWDLTEGLEKPWNLNVITRQDDDTPRRQPLAHTPTLFTTTTVWAASPSGTRVYGQTLGLGSLQKVSRHESTAWFVITLQGVALPPTYVAQSRSGPVD

SEQ ID NO: 58754 - protein, 67 aa, Zea mays
  Coding DNA Sequence Number=SeqID_16975
MAEGNKGKKGRRPADGKRKHPTRPPLEDFGDFEYSKEVSFKYDRSPAPYKESSSLISCEKQTIRIGF

SEQ ID NO: 58755 - protein, 125 aa, Zea mays
  Coding DNA Sequence Number=SeqID_16976
MGDGGRYRRLEPATGGAQRRGGAGDGTALGRGLGNGIGEESAREFRLGELWSTMEAGRREARAGAATRAAELESGAIRAGRAGRAADWSSARAEGREGTGLGRRRGRRPAGEMTVGEKNGEGACG

SEQ ID NO: 58756 - protein, 171 aa, Zea mays
  Coding DNA Sequence Number=SeqID_16977
MRDEEIEDLARLESLVTTQDAGAEADVEEQSSHVPVIGPTQANFGFLDKGKEIVGAVECVTPLSFRSPMGLSDEGYEFDSWSSSSEGRLGPFAKMDEESSEEDLDFFIVLDVSATESRMGKSSSRAPMTVAKSDFAPLGDFAHFLCISSCTLGQLLTRIDIASVRRLRTIR

SEQ ID NO: 58757 - protein, 122 aa, Zea mays
  Coding DNA Sequence Number=SeqID_16978
MATSSDPWVRFCAVADGGEEVTSTSVAEGVATTIARHLRYAVVFADQVAFGALVNVVTSPLRSERKRLEDKIESLQMLNTEAIMDKSAAKIKSRNLLEKVGSLEKENESLSRRLSKEKDATN

SEQ ID NO: 58758 - protein, 577 aa, Zea mays
  Coding DNA Sequence Number=SeqID_16979
  Gene Ontology: Mol. function=protein binding; Biological process =embryo sac morphogenesis
  Homolog annotation: Hit_ID=Q5CV72; Match level="QueryCoverage=53%, HitCoverage=18%, E-value=3e-14, Identity=25%"; Hit description=Large protein with central conserved domain, possible BCRT domain
  Pfam annotation: Domain name=BRCA2; Domain location=140-174; Score =29.9; E_value=8.7e-06; Accession=PF00634.9; Description=BRCA2 repeat
  Pfam annotation: Domain name=BRCA2; Domain location=177-211; Score =20.3; E_value=0.0031; Accession=PF00634.9; Description=BRCA2 repeat
  Pfam annotation: Domain name=BRCA2; Domain location=238-272; Score =20.0; E_value=0.0034; Accession=PF00634.9; Description=BRCA2 repeat
  Pfam annotation: Domain name=BRCA2; Domain location=281-315; Score =7.1; E_value=0.24; Accession=PF00634.9; Description=BRCA2 repeat
  Pfam annotation: Domain name=BRCA2; Domain location=415-449; Score =33.8; E_value=6.2e-07; Accession=PF00634.9; Description=BRCA2 repeat
  Pfam annotation: Domain name=BRCA2; Domain location=69-103; Score =12.6; E_value=0.04; Accession=PF00634.9; Description=BRCA2 repeat
  Pfam module annotation: Pfam domain module=BRCA2::BRCA2::BRCA2::BRCA2: :BRCA2::BRCA2; Domain location=140-174::177-211::238-272::281 -315::415-449::69-103
MPSKWQVWGQPDGSIVWLPVSDAPPNPPRPETLCPDTAGGCRISSMADLLLQAREQLIEGDAMDGLAQSVNTAGLFSTGSGRPLAVSQRAVRRASALVGEEVDEATDNNNKKRKKPFGCDAGLEGELANLHVPFGGGVHKDNFFPMFQSGSGKAVLLNKDSIQKARAVLEENVENAAGAKQPMFHTSTGRSVLVSKSSIDKARAVLGGRMIAHEGDVGGVDGMEQFPVSQAGSGQWDTGCQLPIFQTGLGRPVAVKHSSIKKASTILGDGDVKRSEKCFNDDGQLPLFQTGSGRSVTASKGSFKRASSVLEPRNIAKELEDESHLNDGYATSIFKTGLGKSILPTENSRERAQFVLEAKEAVKQAVISDIGAGFGENPMFHSGKQQFSPENDTSRPRASTPMEQGKFATKGYEDCGSPLPMFQTGSGKSVLVCESSMQKARAVLEEEGDAAGVAFSLAAQASRESRNVSDLTGAPLRHQRRCRAREWGGRAAEQEGLTPGGVMSGPSQPPEVLPVLVPVDVVETVEDHCILDWSAEIAQAEDALRNAFFVNIIRHQLGVSAEDVALDFRRRFNHSDA

SEQ ID NO: 58759 - protein, 118 aa, Zea mays
  Coding DNA Sequence Number=SeqID_16980
MGADKRAKGVGRACAKWYPRSRPCDQDRAEGIRPREVNSCGAALLLSMAVKSSELRQARARVVPGSPGLGREGENATANSVAGKRPRIRGLKGENGGEKASSGPKELRRGIPAPKEGA

SEQ ID NO: 58760 - protein, 424 aa, Zea mays
  Coding DNA Sequence Number=SeqID_16981
  Gene Ontology: Mol. function=protein serine/threonine kinase activity; Cellular component=cell surface; Biological process =protein amino acid phosphorylation
  Homolog annotation: Hit_ID=Q6YWI8; Match level="QueryCoverage=98%, HitCoverage=62%, E-value=1e-134, Identity=59%"; Hit description =Putative receptor-type protein kinase LRK1
  Pfam annotation: Domain name=Lectin_legB; Domain location=34-271; Score=378.9; E_value=7.7e-111; Accession=PF00139.10; Description =Legume lectin domain
MAVFDMKSAPLMILELLLVSLGLTIAPFSAEENNDHWFVYSGFANASLTLDNTASITPSGLLELTNGTVMSMGHAFYPTPLRLRDSPNSTVQSFSASFVFGIISIYDDLSSHGLAMLIAPSRTLSALPVQYLGLLSGSNDGNKSNHIFAVELDTYQNSEFKDINNNHIGIDINSMTSVQSNPAGFFHDQDGTFENLTLSSKEAMRVWVEYDRENTQIDVTMAPLAIVKPKRPTVSTIQNLSDVLTDVAYVGFSSSTGKIHTQHYVLGWSFAMNGPAPSIDLSMLPKLPRHHHKSRRSWVLETVLPIATAALLLSLGVVAFLLVRRHVRYAEIREDWELEFGPHRFSYKDLFHATGGFENKNLLGIGGFGRVYKGELPRSRLKIAVKRVSHDSKQGMKEFIAEIVSIGRLQNRNLVQLLGYCRRK

SEQ ID NO: 58761 - protein, 466 aa, Zea mays
  Coding DNA Sequence Number=SeqID_16982
  Gene Ontology: Mol. function=oxidoreductase activity; Cellular component=chloroplast; Biological process=electron transport
  Homolog annotation: Hit_ID=Q84PW3; Match level="QueryCoverage=99%, HitCoverage=100%, E-value=0.0, Identity=74%"; Hit description =Putative monodehydroascorbate reductase
  Pfam annotation: Domain name=Pyr_redox; Domain location=227-318; Score=49.3; E_value=1.3e-11; Accession=PF00070.17; Description =Pyridine nucleotide-disulphide oxidor
  Pfam annotation: Domain name=Pyr_redox_2; Domain location=71-325; Score=138.2; E_value=2.2e-38; Accession=PF07992.4; Description =Pyridine nucleotide-disulphide oxidore
  Pfam module annotation: Pfam domain module=Pyr_redox::Pyr_redox_2; Domain location=227-318::71-325
  Subcellular localization annotation: CTP_CleavageSite=41; ConfidenceScore=5.72e-01
MASAATQCFSYSSLPATWALRQRGGGASVLRLSSRRTFSVSAAAGRVPGGVREVKRMLMDGWLVGGSPDCRYVIVGGGNAAGYAARTFVEHGMADGRLCIVSKEPVPPYERPALTKGYLFPPDKKPARLPGFHTCVGSGGQRQTAEWYKENGIEVLYEDPVVAFDGKTQTLKTSSGKVLKYGSLIISTGCEASRLPEKIGGKLPGVHYIRDVADADALVSSLGSAKKVVVIGGGYIGMEVAAAACGWNLDTTIIFPEDHIMPRLFTPSLAKKYEELYQQNGAKPVVSPFEAVGVNPKVGGIEVDSLFRTSVPGIFAIGDVAAFPLKMYNRIARVEHVDHARKSAHHCVETLLTSQTKAYDYLPYFYSRVFEYEGSSRKVWWQFYGDNVGEAVEVGNFDPKVATFWIDSDSRLKGVFLESGTSEEFSLLPQLAKSQPVVDKSKLQAATSVEDALEIARSSLRSSAMV

SEQ ID NO: 58762 - protein, 297 aa, Zea mays
  Coding DNA Sequence Number=SeqID_16983
  Gene Ontology: Mol. function=transporter activity; Cellular component= integral to membrane; Biological process=transport
  Homolog annotation: Hit_ID=Q7EYH8; Match level="QueryCoverage=96%, HitCoverage=95%, E-value=4e-41, Identity=39%"; Hit description =Putative nodulin
  Pfam annotation: Domain name=MIP; Domain location=55-292; Score =107.9; E_value=3e-29; Accession=PF00230.10; Description=Major intrinsic protein
MAEHATTGVEEQRQVAISMCSAPTPSKLVAVESSSLQKLMLKSPPQADAHGDEQQGREVPLAKKVAAEFVGTFILMFAVVSTVVADAQHGGAEGLVGVAAAAGLAVVAVVLAVVSVSGSHLNPAVSLAMGVFGYLPRAHVLPYAAAQTAGSAAAAFLAKAMYRPADPAVMATVPRVGAAQAFFLELVLTFVLMFVIAAVATDPTSAKQRAGGHRDRGGDNDERSHRRKSIRMNWGSDPTDERCVCMRCRPSTGPSMNPARTIGAALATGKYKDIWVYLLAPPLGAIAGAATYTLIKP

SEQ ID NO: 58763 - protein, 577 aa, Zea mays
  Coding DNA Sequence Number=SeqID_16984
  Gene Ontology: Mol. function=peptidase activity
  Homolog annotation: Hit_ID=Q7EYI0; Match level="QueryCoverage=99%, HitCoverage=99%, E-value=1e-177, Identity=57%"; Hit description =Putative potyviral helper component protease-interacting protein 1
  Pfam annotation: Domain name=C1_1; Domain location=1-51; Score=-2.5; E_value=0.052; Accession=PF00130.12; Description=Phorbol estersdiacylglycerol binding
  Pfam annotation: Domain name=zf-C3HC4; Domain location=11-60; Score =22.3; E_value=0.00078; Accession=PF00097.15; Description=Zinc finger, C3HC4 type (RING finger)
  Pfam module annotation: Pfam domain module=C1_1::zf-C3HC4; Domain location=1-51::11-60
MTVTAAAWPVCTICYEDLRPLSDQHLHCLPACGHVFHALCLEQWLEYCPGGKKKRTCPVCKQPCGAAHPPTRLYFSSTGTCPIQACPSPGSASGGADPEALAAEVARLEQKAASLGKAAWLREQAEAGDFMLQAAKKDKESVQILLNAKTEELSRKTSECGRLQEKSLALAKELAALKLSADMNLQEEEIMKFASLGNQGNLQNAVDVLKRSLAIRNKSYKELMVQCNVLGRSESRMQQKLEKAKEILKKLKARVQELEKELEDKENGLLRDLRSSKKFKADHIKSGNVTANSAFTSSSPGYENQTNKLDEVMQDPCNDKTHFDRLKSEAGSVLNAQDNLDNKDVDVIDLEANDSVFGDEQKAQFSAKPFGTDDSTPNSENKSSLCQNDDRHSVASECTTAHAANGGPFLKHREATVKSTFMANIRAKLHIPRESPSVRTNATSSTLESETLTIDGISKQATRLASGTGPQQIHNFNSFSGEIFCCSDDFQAPGIPGTDGARRSIGKWCKGPADPSSASGSRGNLIAVGPDGRGGKVKILRDLGRPQDSKSQALWPKAQKVAGRGGQSQIHQFFGKR

SEQ ID NO: 58764 - protein, 140 aa, Zea mays
  Coding DNA Sequence Number=SeqID_16985
MAMCRIFMRETQDPIPNVDGSHGDNPIPPTQVEIHTIDTNTSDDDNIVNGDQDKILSKKRPMKVGGARGQQPHALGRGPEPVKASSISCFLLHNHLCNLSYSSTRIDEDITEYDYTSSTSTSSATSFISWANHSGPCQRS

SEQ ID NO: 58765 - protein, 173 aa, Zea mays
  Coding DNA Sequence Number=SeqID_16986
  Gene Ontology: Mol. function=structural constituent of ribosome; Cellular component=ribonucleoprotein complex; Biological process =translation
  Homolog annotation: Hit_ID=Q943F3; Match level="QueryCoverage=66%, HitCoverage=73%, E-value=4e-29, Identity=59%"; Hit description=60S ribosomal protein L18a
  Pfam annotation: Domain name=Ribosomal_L18ae; Domain location=60-173; Score=29.9; E_value=2.7e-10; Accession=PF01775.7; Description =Ribosomal L18ae protein family
MGVGATTLGVGLPSCEPRSGRGMRARPRWATGRGSPACSPAYLKFDHLLIRVTAECLALQFHQYQAAGRALPVPADEHPKIYRMELALPTRYYLRKLKSQEGLRATIFECNPTTIKSCGIWLCYQCRTGYHDLHKEYRNTTLNGAMEQMYNETASCHRVVTLHTDHQDGNNQL

SEQ ID NO: 58766 - protein, 141 aa, Zea mays
  Coding DNA Sequence Number=SeqID_16987
MDQAVSLAARSRRFESSFYPCKIRAHRLGVQCLTDPDCRHAVTALVPTITGMGDHVSGRVRGYVHCQVRTLRCSSANHALDLRLGRRDSLRNLRRLGSPIVLVSLPVNATPATLASPQASGARTVEQGRELVAVAAPSLGR

SEQ ID NO: 58767 - protein, 119 aa, Zea mays
  Coding DNA Sequence Number=SeqID_16988
  Subcellular localization annotation: CTP_CleavageSite=66; ConfidenceScore=5.37e-01
MVRVGRAGGGISATFRTARGRIRPGASPCAAHFTGDVVGVFTPSAVRILFRAPFPFSMIARGTSIRALLGWEAGRWGRRVDLGGKVDDGLGARSGKTMTGGTRPYFDERPTLKGKEDEG

SEQ ID NO: 58768 - protein, 93 aa, Zea mays
  Coding DNA Sequence Number=SeqID_16989
MWLSRHLFPEPKDDRSTTVDATVPRFLPTCMDRASSSTIRKSEGTIEFVVNCRYSLTPASTRPIARSQEEVPVEIVEELPGILVEEGEPKVEA

SEQ ID NO: 58769 - protein, 52 aa, Zea mays
  Coding DNA Sequence Number=SeqID_16990
MAGGKELVGAKEGWLAGDDLQSSKVSLAHQFSELVILEELSGFLQISPIHTF

SEQ ID NO: 58770 - protein, 91 aa, Zea mays
  Coding DNA Sequence Number=SeqID_16991
MAGRARPRVALGMSASGYAHSGEGVYHGEMEKGERKEEDSPVSAPPGDGNTTQGEEGAEPGGHGAVLGARCPVFSLRQLEKNVASRVGPMG

SEQ ID NO: 58771 - protein, 123 aa, Zea mays
  Coding DNA Sequence Number=SeqID_16992
  Gene Ontology: Mol. function=microtubule motor activity; Cellular component=microtubule associated complex; Biological process =microtubule-based movement
  Homolog annotation: Hit_ID=Q10SR0; Match level="QueryCoverage=57%, HitCoverage=11%, E-value=3e-25, Identity=81%"; Hit description =Kinesin motor protein, putative, expressed
  Pfam annotation: Domain name=Kinesin; Domain location=5-122; Score= -191.4; E_value=0.024; Accession=PF00225.13; Description=Kinesin motor domain
MSCHQARMQMAEQLKRPLSLIVFTPKDDQDGYNVCIFAYGQTRTRTFTIEGTESNRGVNYRTLEELFNIAEERKGIVTYDLSVSVLEVYNEQIRDLFPCSICAVLYAVQFNHLSYFFVQEIHF

SEQ ID NO: 58772 - protein, 162 aa, Zea mays
  Coding DNA Sequence Number=SeqID_16993
  Homolog annotation: Hit_ID=Q2QM87; Match level="QueryCoverage=53%, HitCoverage=19%, E-value=7e-27, Identity=65%"; Hit description=SRP40, C-terminal domain containing protein, expressed
  Pfam annotation: Domain name=SRP40_C; Domain location=17-112; Score =87.1; E_value=5.4e-23; Accession=PF05022.3; Description=SRP40, C -terminal domain
  Subcellular localization annotation: CTP_CleavageSite=23; ConfidenceScore=5.09e-01
MPGPPQKKATQNQATGRNIHLRNASTITNDLSLPKTMSPFQRIKVDNVRFADERLHDNSYWAKDDTDTGYDAKAHEILGQVRRSGFRHKKTKKKRGTYRGEQIDHQTHSIKFENSDDEANALSFPKRQKQRFSSRPISIALVGPWEGEAMDGAFKATWYQRD

SEQ ID NO: 58773 - protein, 224 aa, Zea mays
  Coding DNA Sequence Number=SeqID_16994
  Gene Ontology: Mol. function=protein serine/threonine kinase activity; Cellular component=integral to membrane; Biological process=protein amino acid phosphorylation
  Homolog annotation: Hit_ID=Q6S7F1; Match level="QueryCoverage=81%, HitCoverage=28%, E-value=2e-56, Identity=65%"; Hit description =Benzothiadiazole-induced somatic embryogenesis receptor kinase 1
  Pfam annotation: Domain name=LRR_1; Domain location=107-130; Score =14.8; E_value=0.31; Accession=PF00560.23; Description=Leucine Rich Repeat
  Pfam annotation: Domain name=LRR_1; Domain location=53-75; Score =16.4; E_value=0.1; Accession=PF00560.23; Description=Leucine Rich Repeat
  Pfam module annotation: Pfam domain module=LRR_1::LRR_1; Domain location=107-130::53-75
MAEAEPRRRWAVWALLLLLHPAALVLANTEGARELYSNNISGIIPSGFGNLTNLVSLDLYLNNFTGPIPDSLGKLLKLRFFYFVNKRRLNNNSLSGSIPKSLTAITALQVLDLSNNNLSGEVPSTGSFSLFTPISFANNPNLCGPGTTKPCPGAPPFSPPPYNPTPPVQSPGSSSSSTGAIAGGVAAGTALLFAVPAISFAYWQRRKPQEHFFEVPGRYSTAGE

SEQ ID NO: 58774 - protein, 57 aa, Zea mays
  Coding DNA Sequence Number=SeqID_16995
MRVVWDALGHAYVMAPIFSQRDLGTGIVPWLFPEGRGKEEGVEADLQEFQDFDEFEY

SEQ ID NO: 58775 - protein, 143 aa, Zea mays
  Coding DNA Sequence Number=SeqID_16996
MRKASRATAVCARTWKRKARRSAGLLARLLGGAALPRADAGLGGRRGRGCWAPGRTGRQPSERCAGRCRAYCLLVLAAGLLCWARAVPHAAAAPLLGLGLGACCLLGGAGCCSWPAAIGTAAEPDGVAMTGWSEQHGYDLAHH

SEQ ID NO: 58776 - protein, 257 aa, Zea mays
  Coding DNA Sequence Number=SeqID_16997
  Homolog annotation: Hit_ID=Q8SA97; Match level="QueryCoverage=46%, HitCoverage=18%, E-value=5e-08, Identity=53%"; Hit description =Ornithine carbamoyltransferase
MAGSLWSLELVGKPLWAGVNVVAVSVADHYVNCNMENHPGKQCYHKGVLTLSFGKPYTSHELSPLSRSDRRHSTAPLTSLTEEQRRLRHSDCSATQQSESDRQSGLAKGAIGNSALPDPRARTRAKTRKTANSAPPDPRARTRAKTRKTANSAPPDPRARTWAKTWKTANSAPPDPRARTWAKTRKTANSAPPDPRARTRARPQKTTNSASPDPRARTPPWPRPNDLRLARPEGSASASAQKTDSTPASEEPPRRPT

SEQ ID NO: 58777 - protein, 511 aa, Zea mays
  Coding DNA Sequence Number=SeqID_16998
  Gene Ontology: Mol. function=oxidoreductase activity; Cellular component=membrane; Biological process=electron transport
  Homolog annotation: Hit_ID=O48957; Match level="QueryCoverage=90%, HitCoverage=92%, E-value=0.0, Identity=73%"; Hit description =Cytochrome P450 CYP99A1
  Pfam annotation: Domain name=p450; Domain location=39-502; Score =219.7; E_value=6.8e-63; Accession=PF00067.12; Description=Cytochrome P450
MELNSDTLLFLTTIISAAILVVCSLSRRKPSPGPKKKRPPGPWRLPLIGNLLHLATSQPHVALRDLARKHGPVMYLRLGQIDAVVISSPAAAQEVLRDKDVAFASRPNLLVADIILYGSMDMSFAPYGAYWRMLRKLCMSELLSTHKVRQLLAVRDSETISLVRKLCGDELMSVVDVAVLYGGGFCAGDLFPSLSFVDVVTGLTRRLWRARRHLDGIFDKIIAECEARQRQAKTTTGTTNGDGDGLLSVLLRIRDEGETGISMTSIKAILFVSAVKYIYGAAESCLSSSKSQFLLIDHQDMLAGGTETTSSAAEWIMSELMRNPEAMAKAQAEVRRVLDGKSPQDHEGQMDKLSYTRMVVKEGLRLHPVFPLLLPRLCRETCDVGGFEVAQGTKVIVNAWALARSPEHWKHPEEFWPERFADDTSVAAAADYVGSQFEYIPFGSGRRMCPGNTFGLAALELMVARLLYYFDWSLPDGMRPDELDMDTVVGSTMRRRNHLHLVASPCKEIES

SEQ ID NO: 58778 - protein, 89 aa, Zea mays
  Coding DNA Sequence Number=SeqID_16999
  Subcellular localization annotation: CTP_CleavageSite=67; ConfidenceScore=5.42e-01
MAPKKATTRANSPTGKIVKAALTAKKCKITFVDNTLSPQVRTIELKQKASSTLTPNTRPRHKVALTLAASKDSYQVMSHHPSSHPWDTP

SEQ ID NO: 58779 - protein, 468 aa, Zea mays
  Coding DNA Sequence Number=SeqID_17000
  Gene Ontology: Mol. function=binding; Cellular component=COPI vesicle coat; Biological process=protein targeting
  Homolog annotation: Hit_ID=Q76LD1; Match level="QueryCoverage=34%, HitCoverage=17%, E-value=3e-13, Identity=28%"; Hit description =Coatomer subunit beta
MENTAPCGDFGKIVADLESENLVANVSAVNQASALIAGGKIPEPQLLCRLIAGLASNLEKPDHDSAIKRCVSFTLKAIRVAVIKNRMNMDSSARGEALHAIWCCFMDQGLRRIQRDSNMVRLWTVQDQLSAVKIICTFFRLSPDFHLPLQEPIAICLQQCHPQSPLEVSSMVAMLGRLKQVSTTMVHHPGFSDLAVDVLAALSNCNLAVRKNLLNLMVRLLTPRNISAVLLLLDNELNRAANIHIEYHKMLEEAIRECHAAFPGCIVEFTLDPKYSVFIDSILYIIDIMNPDQSLRGPLLKGLLRALRHVKSPLVCAAAVWAISMFSGSLEEVSDAIVALSCFFKDLLDRRKIEKLILGGEAENQYKLSTDYYGVTAGDATQGKHQQPWLMEMEELLFVRIGLTRQAGGSYAIPSSSKSSASSSNAYLPEPLGNTDNLIFLVHSGDALLADFVEIMLSNLKKKVKELE

SEQ ID NO: 58780 - protein, 132 aa, Zea mays
  Coding DNA Sequence Number=SeqID_17001
  Subcellular localization annotation: CTP_CleavageSite=54; ConfidenceScore=5.16e-01
MKGRVGKETPTTSFLDFLLLFLFFLTASYLFYTLHLLLISASSAASNCEPDVVSVSQVSANLTTTVATEKPLPPFVATQLSTRKRILIKIDLHVLEKEKDKASKARLVEVLVLDRQSGITNFYRKQQFLQGN

SEQ ID NO: 58781 - protein, 788 aa, Zea mays
  Coding DNA Sequence Number=SeqID_17002
  Gene Ontology: Cellular component=mitochondrion
  Homolog annotation: Hit_ID=Q6K624; Match level="QueryCoverage=98%, HitCoverage=99%, E-value=2e-94, Identity=51%"; Hit description=BRI1 -KD interacting protein 135
MAEDPAAEQETRQLEDRLREVGERLQAPPDDAEDLLNLLIEVEECLLKVEQSPPESTSNALQLATAALVKKELLAHADSNIRLAVASCISEITRITAPDAPYDDDAMKDVFSLIVEAFKHLDDIESPFFGRRTSILDTVAKVRSCVVMLDLECDDLINDMFHHFLRTVNSGHSEAVICCMETIMRLVIEESEDVQPQIASCLLQNVRKEEKESSSASFELAEKVIGTCREKLKPVFLQSLKGTSLSEYSQIVASVCEDVSDDREDNNADPSGKDTVDDGKLSERTISDELPQESSKAEQDVSRPEQDGTCMNGNTGTAISSGATLPDTSESDQGPPKEKTEQPCYADDITDTDQLKSDHNEGAEFDTAKPEKKAAVDSDKSAKLKLSDKCEAPVHSDADTKKEASAEGTDGAADDTSTAADCTPKPKRGRPPGPKSSQKKAAGKDQSSGSDLKKVNEAGDSAGKLAKRSAKDEKSTKKAGEGESSKKTQKYNSKQQKDENLSEDPAKDLSLKPPRSRKSKGLDKSLVGARIKVWWPDDKMFYNGVVESFDSVSKRHKVAYDDGDVEVLLLRDEKWEFISEEKGASVASETVILIRTEHWLWFLVCYVHSTVVGVAKPGGRKRKADAVKEENTETPKSDAVDHPKKRGRPKGVRSSNGTPSNSATPSTKGKTAGKNTKETPKTGPNLIKELEKSSKDKASVSTETKDELPKDDRSASRPKEAISKGKDSKDEGKSTEGKARPGRKLKNAGTPAGDADKEKGKEKEVKAAEIEQEAPGNASTGKKRRRKA

SEQ ID NO: 58782 - protein, 148 aa, Zea mays
  Coding DNA Sequence Number=SeqID_17003
MTRRQPEAAPQPPTNDEDLSALLCQLDRRRRSPVLLLFLQRISASLLSSVGSLSLTGIHGQWPLSMAILSALSAGRHLCSESNTTEKYRRLAVKGGSSSRASRALVRRSSSWLVPEPVIRRETGSSPSPSCYALLVLALVLAAAADRD

SEQ ID NO: 58783 - protein, 222 aa, Zea mays
  Coding DNA Sequence Number=SeqID_17004
  Homolog annotation: Hit_ID=Q6K625; Match level="QueryCoverage=18%, HitCoverage=10%, E-value=2e-08, Identity=66%"; Hit description =Potassium channel tetramerisation domain-containing protein-like
  Pfam annotation: Domain name=K_tetra; Domain location=172-222; Score=- 20.1; E_value=0.038; Accession=PF02214.13; Description=K+ channel tetramerisation domain
MATASEPERREPRRLRLRVNSRGNQASKLGQDTKHDVIVSMGLVVRWGQATKHTLPVPLPVSRQRNNRRGVDVCAVTSCARRPNPLGSWTWPTCRCPLPRPRLLFSVPAQPARQLRTMLPRRYIRQLRDPGHPARLIPHDSKRPCAPTITCDSGSFCDPSAMCTPAACRGRVRINVGGRVFETTAATLSSAGRDTMLGAMVDASWNAFPDGAAEYFIDRDPA

SEQ ID NO: 58784 - protein, 273 aa, Zea mays
  Coding DNA Sequence Number=SeqID_17005
  Gene Ontology: Mol. function=voltage-gated potassium channel activity; Cellular component=voltage-gated potassium channel complex; Biological process=potassium ion transport
  Homolog annotation: Hit_ID=Q6K625; Match level="QueryCoverage=96%, HitCoverage=57%, E-value=1e-106, Identity=72%"; Hit description =Potassium channel tetramerisation domain-containing protein-like
  Subcellular localization annotation: CTP_CleavageSite=27; ConfidenceScore=5.04e-01
RPDRRDGHDGGVAAFSALTGGLRHRFRVAHARQPRSFTAGALAFDGGGGSGCAVFASCKGRLNEYGVGVWDRNTGEQADFLYEPPGCALGDADRLQWLDGTGALMVATMFPRADSSSISLLDFRDRSVVWSWSDVGTPASLEDKHAVHAVAMEDGRSVCVINQYDDLGFLDLRSSAGGVRWRSRSKLAAGGKAKALGEEVCYPKLATYGGQLFASTGDAISVFSGPDHVLTSTLRRSEGGAICDFSIGGDRIFALHSDENVFDVWETPPPAII

SEQ ID NO: 58785 - protein, 65 aa, Zea mays
  Coding DNA Sequence Number=SeqID_17006
MAVLPRRASSWRSVFLIAIRARRRGDSHKTTTDFLYVGTMEERIWRGAHARWNLSYSVTSSDLRR

SEQ ID NO: 58786 - protein, 126 aa, Zea mays
  Coding DNA Sequence Number=SeqID_17007
  Homolog annotation: Hit_ID=Q3E0G9; Match level="QueryCoverage=68%, HitCoverage=11%, E-value=6e-08, Identity=39%"; Hit description=Ig -like, group 1
MDMRKATTRTTLHLHLGQERKLRLARPQGSGSTSTLDDGLPLRPDPQGSDTVSGLRKTVSASPDPGARAQPRPRKTDSALPDPRARTQPRPRKTVSASPDPRARTQPRPWKTDSTSTSEEPLPCPT

SEQ ID NO: 58787 - protein, 98 aa, Zea mays
  Coding DNA Sequence Number=SeqID_17008
MERTGRREVGDKKACGAGGDGQLRGSFVVDVVQAIFRLRLPARLALAGLYTSPSVSVLAKRLRLLRGLWCLFGHLCVRRVGNTRTRQYGDADGGVARK

SEQ ID NO: 58788 - protein, 1008 aa, Zea mays
  Coding DNA Sequence Number=SeqID_17009
  Gene Ontology: Mol. function=RNA binding
  Homolog annotation: Hit_ID=Q2R2Q1; Match level="QueryCoverage=75%, HitCoverage=99%, E-value=6e-99, Identity=33%"; Hit description =Expressed protein
  Pfam annotation: Domain name=Agenet; Domain location=215-282; Score =34.9; E_value=2.8e-07; Accession=PF05641.3; Description=Agenet domain
  Pfam annotation: Domain name=Agenet; Domain location=63-136; Score =38.4; E_value=2.5e-08; Accession=PF05641.3; Description=Agenet domain
  Pfam annotation: Domain name=DUF724; Domain location=794-982; Score= -13.2; E_value=1e-06; Accession=PF05266.4; Description=Protein of unknown function (DUF724)
  Pfam module annotation: Pfam domain module=Agenet::Agenet::DUF724; Domain location=215-282::63-136::794-982
  Subcellular localization annotation: CTP_CleavageSite=45; ConfidenceScore=5.73e-01
MVASSANAPPGAGARRPRSRPRGSVRSRSLRWSTPPRSPLPSSLSASPRRHCSLPALDPITPLPVGTEVEVRVDDDGFYGSWFEATVLDFAPARGYRHPARYTVKYVHLLAEADDEGVLAEPFAPSHIRPRPPLPSSPPRFRPHHIVEAFHNEGWWSGIVVSAAGAGVTVAFPVTREVIEFPSGLVRPRCDYVDGDWIPSRVAMVVRPSRTVRVYEVGDKVEVVRNRDVYGDSWFPATVKVVIDNLSYVVEYFDLEEEEGGLEKATEYLHWRFIRPAFEHTPGEGEFQLQPGDAVEAYCDGAWSPGVVHRVVSEGEYDISIVGKKAELLVTKVVELLKPRYKWNGNRWRIATAKDMSESYVKHAMNLDHLQSPSAFLNLGVENADFTASVLKYKRQTNLRWHSKSGESPISPVDLTSSDEEHSHDPDSSSIKKSRKKLKQLDATLAEGSEHASVSEMDIPLSAMCKSPESTHSPNSLLSEKSSPQGHSAPVDNQAILSDMGVFDGELHESVSGRSVDAYDMLPIAELRKKMASARRNCAVQHTEEQHVKSLRVKKCISNSKDKKTRPIQELMGEIQLKGNKNFSRDFVLALGVSRDGPTTLSPDRLVSIGPKRCSSTKVLACKKLAKRRGSKELCSPNSSLDVTRTDQQGGRKEVAEAMKECSLALECPKSDAQGQLDRTLEDAKNITELSNQENLLSMLPPGFKSVSNRKGTNIHDAQLGEEPAVMTNNSLIEPNGNDDMCTDHAATTKLAENYNVMETAIMSIDCPAQQPCGEVDERSVLGLKNAGSTQCIIDSSPSSESLLPSPQALFVKSSPVWHIVEAMHVFKELPQQPHFIPLQEVPPTLREGMALGMMVSFADLVKVTMEASIGNDMEWFEDKIRTISHLEANGFSVQSIQSAMTEMVKVKTEHTSYHCEIGKLSSKLVENMASSSRAGALLDEKDEAAARLEEELVSIRQESQKIAKEKEKIDAEVVSIKTACSGYEDLCSGVERKFKEVLAGLQRKRLT

SEQ ID NO: 58789 - protein, 102 aa, Zea mays
  Coding DNA Sequence Number=SeqID_17010
MQCLGYFRNGVGRVLGAEDVPELEDGVEPAFTIDLRGWDVTTFVREVESEAIKIVGKYAPKMEMLRSWDICDSNVRLNWVFELNSLRYGLYPEGDSAEDGDD

SEQ ID NO: 58790 - protein, 165 aa, Zea mays
  Coding DNA Sequence Number=SeqID_17011
MSKVCHSTVVLARLGRGSGVNRSNKTTVLSSFTNYDDACDYCSRTPSAKPRWDVQYDKSAGWPSGANPTLPKVDSGLGTNATLPRPGLGYLLPANPTGGHSFNCGVHVFESWNELDRDLGQTSASPKPSSNLDIRNKKVPNVTIYCRADQKSSGHKSNSKYKTML

SEQ ID NO: 58791 - protein, 120 aa, Zea mays
  Coding DNA Sequence Number=SeqID_17012
MVPPVIDTGWHNNIQPRLRVAQSQISPKNKACSVPPEASPPSNVLAEAKVIDILEFKTFLAGTGYLMDKNTRAGTGMSKILYPRAYMGNPTGKFFYGYGYGRILPDGYVPVAIPKCSISR

SEQ ID NO: 58792 - protein, 396 aa, Zea mays
  Coding DNA Sequence Number=SeqID_17013
  Gene Ontology: Mol. function=transferase activity, transferring nitrogenous groups; Cellular component=cellular_component; Biological process=amino acid and derivative metabolic process
  Homolog annotation: Hit_ID=Q6K5U4; Match level="QueryCoverage=97%, HitCoverage=86%, E-value=1e-146, Identity=62%"; Hit description =Putative nicotianamine aminotransferase A
  Pfam annotation: Domain name=Aminotran_1_2; Domain location=10-384; Score=160.7; E_value=3.7e-45; Accession=PF00155.11; Description =Aminotransferase class I and II
  Pfam annotation: Domain name=Beta_elim_lyase; Domain location=30-291; Score=-131.6; E_value=0.078; Accession=PF01212.11; Description=Beta -eliminating lyase
  Pfam module annotation: Pfam domain module=Aminotran_1_2::Beta_elim _lyase; Domain location=10-384::30-291
MAGMLPDGGRAVVRLGSGDPTAFPCFRTVPEAVDAVASAVQSGQYNSYSTSVGLELARRSIAQYLSCDLPYKLSPDDVYLTSGCTQAIEILCSALARPGANILLPRPGFMFYEARAIFNGMEARYFNLLPGNGWEVDIDGVQALADKNTVAMVIVNPGNPCGNVYSYEHLAKASSDMLLLVAETARKLGIFVIADEVYAHLTFGERKFVPMGVFGAVAPVLTLGSISKRWMVPGWRLGWIVTNDPNGVFQRTKVVHSIKSYLDISSDPATFVQGAIPKLVENTKEEFFEKTIEILKRCVDICCEKLKGINAITCPSKPEGSMFVMVKLDLSCLEGIKDDMDFCCRLAKEELVVVLPGCAVGYKDWLRITFAIDPSSLEEGLDRLKSFCLRYRKPTK

SEQ ID NO: 58793 - protein, 393 aa, Zea mays
  Coding DNA Sequence Number=SeqID_17014
MKSKKSVHGSSCKKAKLFDGLIGRHGSEIDPCYKLFLEHLSKDRNTYVLDVPKGDHGLPFSVRYEEDYTSYGNTKSRSSPNFPNHSRRTSWGIPDGKQPDVKAVKAASRNMCCSFSPKRSYVKKKTTTSLVDESYELFLSLVKFKDGFMVIEPEPGVTIVYEREEDMPAGYDEWRTGSSTNELSLVSPLENTEGDYTMQRYDYGLAPANKISSEHEMAAPSSENIAGQDIICTDEHGLVLYAEPSDLNACEDEQATPLAISYGGSSTFDEKLNAVLSQPYDQNEYEELWRKATDRKPVSRQRHLRSASKRYVTEAIGLSYLDYYPDLAVQIKSSDRDKRLSLLRRFFFWLEWFENKSSIICWFSGLPASWCCVREVRRTCAMREPTCPGSPNL

SEQ ID NO: 58794 - protein, 125 aa, Zea mays
  Coding DNA Sequence Number=SeqID_17015
  Gene Ontology: Mol. function=protein serine/threonine kinase activity; Biological process=protein amino acid phosphorylation
  Homolog annotation: Hit_ID=Q5Z601; Match level="QueryCoverage=65%, HitCoverage=10%, E-value=3e-20, Identity=73%"; Hit description =Putative receptor-like protein kinase
MRRLTLDFLDSHNPLVPITVLAVVEQTSSKSESKFLYFYGFQRSKELEATWRRNGFLASRSQRVDVYSFGVVLQELQLEGARVSDMEDNEGEEVEMVLGRMVNDNLQLDGSTEQSWIPDFVDTLG

SEQ ID NO: 58795 - protein, 153 aa, Zea mays
  Coding DNA Sequence Number=SeqID_17016
MGKRNEKKKKKRVFLLAGPGGILAHPGAREGVAGGLDGPKARETAGDSTVARAHTSVREGGLTVRGSDGGGEVDRSSTTGEIPRRFSAVGPVLWWGSGGEARAGAGDHGVGVNLTGGGLGWSVHDAVAGARGGEVAGEAAEHKRRWGEVPCER

SEQ ID NO: 58796 - protein, 121 aa, Zea mays
  Coding DNA Sequence Number=SeqID_17017
MELDQDQTKLEQYSKEPLLCWKDGDHFDILSWWKAHGTKDMTKKREKGWKKEWLSKPNQRSLWCTALFGAPDWPDDELAALKIGGAMWLKIIGLSGESSAPAPKYIGDELIALGKRRKRRN

SEQ ID NO: 58797 - protein, 367 aa, Zea mays
  Coding DNA Sequence Number=SeqID_17018
MEREMCPWAISINVLVIRCPTHGFKLICAKWLRSAKSRIKEHSQEKWKRIGEVLAEFSQTSISLWYTKLSGAQAGPVTNSSLSGKSEGAAAKNHQTVRCAPDCPGERLQFVEIPRKREKTAKEEIRVLPPQPAVPAHGRSREPTDARRRGYEMYHWNVRRMSKDVGILKLRTRSVLRMHKQMNNKKITGGATGSYKSDPQGSEEAPDTEVVYRSSSGAPMSQVEVKTKVDSKERKGWSLIEPDEVKVLKRIGYIDSKDLNKFASDETTSKLKDDGIVVMSFFRASLCLSKHWMVVEVLRKYVVFMHQLTPNMIVVMKKRDELKDIVIKPLRISFDFKRPICNMSKAAKTAYVAFNNVVDKIGTRDLV

SEQ ID NO: 58798 - protein, 41 aa, Zea mays
  Coding DNA Sequence Number=SeqID_17019
MAPPHHGGRDPRRLKNQPAVPCYSPLSLGDLFSLAPGLSCN

SEQ ID NO: 58799 - protein, 91 aa, Zea mays
  Coding DNA Sequence Number=SeqID_17020
METRELGEGPRRWSWRNRGHGGHGRELGEKLGRAPELEAEQGADALARRRELRELREREWEVVVGKRYRYHCARVDEGEEDCNAKGCNGGG

SEQ ID NO: 58800 - protein, 98 aa, Zea mays
  Coding DNA Sequence Number=SeqID_17021
  Subcellular localization annotation: CTP_CleavageSite=35; ConfidenceScore=5.26e-01
MTDVERSGAPFVPRLWPGDKRSPPCLQRRLRQNVRNRATGGAPRPVNVPTQTNDADSLARDLSHVGFRPEASTPAHVAPASIPLDGPYTMNTYISLYE

SEQ ID NO: 58801 - protein, 176 aa, Zea mays
  Coding DNA Sequence Number=SeqID_17022
MTGTMSTSTVWIIPCQGAQVDVTIRFRSHELMPLNFGYGMTLLPPGYPTNIVYHFYQLGRAQSHLLPWPIVGYLNTMIWFRRARPSLLPRSEDVHPDFRPRTSYCRRLRQNVRNRATGGAPRPVNVPRQTNDADSLARDLSHVGFRPEASTPAHVAPASIPLDGPYTMNTYISLYE

SEQ ID NO: 58802 - protein, 140 aa, Zea mays
  Coding DNA Sequence Number=SeqID_17023
MAKNFGSKTVQIAMNVVVTSHLLVCLYSTAAFENKSPTDLLSLCAELKDEVVATCGRVVPLQEEVRLLNERVALLDQEAMKSLRERVVPLEEEVRRLKESLLAVAGERDESRRQAIDAFLRADSLARDLETERSAQSLRA

SEQ ID NO: 58803 - protein, 152 aa, Zea mays
  Coding DNA Sequence Number=SeqID_17024
MGKNNKRKREPTPSSEDFGDSEYSEEEFSSKSEGSPAPVSPPASSDDSDDSQGIAAEVWTYIRAVERSGLEGSDESEYSSDEDDSDDGGEDEDDDGDDGDDDDDGDGDSGGGGRGSNSGSGGGNGGSRSGNGGSSRGSGDGGSSKGSNKASG

SEQ ID NO: 58804 - protein, 173 aa, Zea mays
  Coding DNA Sequence Number=SeqID_17025
MAASVARAFFEGVVRLHDFPTFIVSAHDPIFTSRMAAQMEAVDALTCDYDGFLAEGASGSRRCRACLPKAQVHPSPGQEGPGRSGCLGRGARGVADGVAFGAIVAFATPLVAPTRGVGGADARRRGRQLMGQVGVHVLINGSLSSLDDGLFGLGALRLEGSYAEVGHGADWIC

SEQ ID NO: 58805 - protein, 543 aa, Zea mays
  Coding DNA Sequence Number=SeqID_17026
  Homolog annotation: Hit_ID=Q2QQA6; Match level="QueryCoverage=24%, HitCoverage=62%, E-value=2e-10, Identity=31%"; Hit description =Universal stress protein family protein, expressed
  Pfam annotation: Domain name=Usp; Domain location=396-536; Score =44.5; E_value=3.7e-10; Accession=PF00582.16; Description=Universal stress protein family
  Subcellular localization annotation: CTP_CleavageSite=70; ConfidenceScore=5.25e-01
MACAGTRLRSGTRAGVSEIPGVHSSPLSGPGAVAGSAPLGTAGRTLPSLSRLLLSYSYTTPVPSDSDMVSCMQRAMVPGAGELSTGTSNRTGLPLVAWYYYCAAHGRASAGIGCAPSVGTGKPTAGRAQARRRAGAALSSRGDSAEQGRRGGSGDRRARARTQGAAVRGYFGRAVAVALELGASWPPGRLRRRLDGDGTRPHGTGARGLGILGFLGNGPRLRPIRRGQVRRRPAAAEAVEAAISGLFVPVNGPFRVCLNGSGSCPPVGLDIGPSTARYIGPGRPGPARNDFVPCRAWAVLFFVLRVSPLSPAQITKTKLWYMASSAEERFLRQLSASNGGDEGVCGGQQLGHKEYCAERRGSRRWSRKRAAAARGYCGGYDDYDVKQQAEAASAAARKRVIVVVDDTSGSKHAMMWALTHVASKGDFLTLLHVLLPHSASGGGCSRGEEASSLANSLGTLCKASRPEVEVEALVIQGPKLGTVLSQVKKLEASVLVLGQGRPSPCYRWLSCFLRSSSEEFVEQCIDQAECLTLAVRKQSKAVG

SEQ ID NO: 58806 - protein, 98 aa, Zea mays
  Coding DNA Sequence Number=SeqID_17027
MASAPWRACRGWTGGVPGFLERQRGLAGLTGGAARLSAAHSRKKDLWPFAACVARPRPRLHPIADRPPGRRCSSWRSGRWELPMDRIDRRQPSRRIMV

SEQ ID NO: 58807 - protein, 166 aa, Zea mays
  Coding DNA Sequence Number=SeqID_17028
MRCGRWEYRIGVMRRSGGRTWTGNRPETVSVGVVAIGTGGRTRARDGRQADWLRHVGPGPSWSWATENEDSAACIAPTVVPLDRVRLTAAKSGLGRHRKLRLARPQGSDSGSAPEDNELRLARPPGSDSGSAPEDDELRFARPQGSDSGSDSGSAPEDDELRLARP

SEQ ID NO: 58808 - protein, 410 aa, Zea mays
  Coding DNA Sequence Number=SeqID_17029
  Homolog annotation: Hit_ID=Q2RA18; Match level="QueryCoverage=86%, HitCoverage=86%, E-value=3e-92, Identity=53%"; Hit description =Expressed protein
  Subcellular localization annotation: CTP_CleavageSite=50; ConfidenceScore=5.60e-01
MPPSPSSAAGSASPSGSASASASDPTPSWWESVSQARSRILALSSILPAPASHDVAALADADRPARALLRSPAAYAALSDALRAGGGADDPACHWLYDTLLSADPDLRLAALAFLPLLAALYLRHLPPELRSSLSGFEAVLLAVYSSEAKNRQGKPVLVQMPDLSVPSLYHTPAMASSLSSKSPRWSQPPQSPPIPPPQATPVVGVLSPPLEPQAAMLAASKVDACNAAAAWAGQYCKCRFELDEKELEEEEADSLGSVSPVSSEAENGKELVDELARLRINGDNNCSEEDMEARVPLPWDLLQPVMRVLGHCLLAPLNLAEVHDAAAEAVRVVYARACHDLVPQAILAARSLIELDKSTRKVAKAAAVVASGQIVTVGTAGSNTSSSRPSSKPNTPSKQRKPDTLLMSK

SEQ ID NO: 58809 - protein, 77 aa, Zea mays
  Coding DNA Sequence Number=SeqID_17030
MADGGAMGEGVGGRRGAMADGGAMADGGAMADGGAWARAWATARGKDGGGRENESERVCDKNLKKFGESCNALCVET

SEQ ID NO: 58810 - protein, 116 aa, Zea mays
  Coding DNA Sequence Number=SeqID_17031
MAQQQLRLLIRHLASHLQEIQSRMRSLPAHSASYRGAPTILCVSVDGAATPPTPEQTSLPQHEQADVATWRMTRNTRRWSTLNRCTVDDEDIGTDIAERIRPWKLFRKDALWSWMP

SEQ ID NO: 58811 - protein, 233 aa, Zea mays
  Coding DNA Sequence Number=SeqID_17032
MQSRSLERGAARKGADDVDPTETTATADGEARRAITKQSGSELRMEQPWNQNQQREAGGFGFGVAMGESSCHAAADLGQGGAGLCEVDGALLLMELMQEQDPPSSDLLLLDGDGDGDRRLSHVIRSLEAEIGGGEAVAMVADDDGGVSMDRIEDALSSDGTDGYDYEGACASSSSFGYWPPSSLLLAGGYDDAEGWCVYANGYEGPGGHVVGYDDYCCCAEGSAELMYLPLWE

SEQ ID NO: 58812 - protein, 94 aa, Zea mays
  Coding DNA Sequence Number=SeqID_17033
MTGDKTIEWVLPAFAVLTLGDSSSPQPRVSPPACGALVTAASQDKRGSGEEDKPIADQVGFGNETLSAGLDRPHRDDLTSVAVSASPSAMMVSG

SEQ ID NO: 58813 - protein, 211 aa, Zea mays
  Coding DNA Sequence Number=SeqID_17034
MEYSDLDKDLNNEAAQPEQEICSTWISKVHNSSRLSAQYLSAFATELEKHSLKKLRDEYPHNAAYSSPGYQDGGLALAAPATWHHPSAPTIYVLHLVELLVFEVAPVLTSTSPRSAPTAPSRCCRAGYVAWLSASPFRVHISDPHARRFVLRFEQNLHSPELLIIFSSRDQRHLSSRMDSSQGTSRSYSTLIARRKLNSLTYGILTKLQLP

SEQ ID NO: 58814 - protein, 148 aa, Zea mays
  Coding DNA Sequence Number=SeqID_17035
MAAAAAAASKACAPGMRDEQVKGLLLGLPPNARAEDIEYVLGDVQRTLSRLDSKRIVLQDEIAAASRGKRRASRRAPAAAPVPAAANGSGALYTRNGAGAVRRRLRTAAGDVKKEKKRLEAAWGDLEEALVDARERLALQPGPGERTA

SEQ ID NO: 58815 - protein, 340 aa, Zea mays
  Coding DNA Sequence Number=SeqID_17036
  Homolog annotation: Hit_ID=Q8SA97; Match level="QueryCoverage=30%, HitCoverage=21%, E-value=3e-09, Identity=44%"; Hit description =Ornithine carbamoyltransferase
MAPPVDVAGPRPRLGDVEAPPKSRSSLSSVAEVESEPLGRVRRRPSAEARAESEPWGRAKRSSSSSGAEPKSEPWVGRSKPESEPWVGRSGVRRLPGLSRSPSPGSGEAELPMVPAARPDCLSALLCQVTLQSERRRRRYLSVRPATFALNAPAIWSVGAAIWSGLLLGEDRASGEPEVYSSLEEGLGRDGDPPGPSQLYADGGYQLRIRRLEGSGQGLGIGRGMRHGQAGPSSSERRRSQARDGGREETEKAPREEVACGFMAIKTPIMASVSIDEERKWGREWKRRNRPFPARRESNGRGLGACWARSEKRRRSAPMCSGGDADNMENFEEFKDYDEF

SEQ ID NO: 58816 - protein, 223 aa, Zea mays
  Coding DNA Sequence Number=SeqID_17037
MASRQALHIFTPSRRAMHILTSSRGIASTPHLSSFGWFDKIKSTITGKKPEEASEASSFTLIQFADTMEKARKLGTFKNFVAGRASEATVVNVFEKHSAVLRYLGAIDPTGECSLFGGGDRLIVCTVIFIQNLRNTDKINATKHCNCTIADVEHILAKYTWAKEAQKKIAKLKEEGKPLPKSFNEIIIEILYHNLEDKFMLMARLVGSVSQLMSRGEPTSQDL

SEQ ID NO: 58817 - protein, 140 aa, Zea mays
  Coding DNA Sequence Number=SeqID_17038
  Homolog annotation: Hit_ID=Q338W3; Match level="QueryCoverage=53%, HitCoverage=10%, E-value=5e-25, Identity=73%"; Hit description =Expressed protein
MENKAILTTYSIYDNIFENLNLLATIPLCKLLGLMSQFLALHLKATTFSRPGLKVQTTLMQMCKDRFEHLFKIDSLKEVDPTLGSHHMSKVLTDECANGSSQTITCSSGKVLEKVVALKSSKVACDENAIVKIMANTLLI

SEQ ID NO: 58818 - protein, 160 aa, Zea mays
  Coding DNA Sequence Number=SeqID_17039
  Subcellular localization annotation: CTP_CleavageSite=58; ConfidenceScore=5.66e-01
MGCTTSHDAVATAHLPTSARSPPSDTLRRFVASAPATPESSPVLTLPPSPAKPVAAASASLPPSPSSTVSPLSHSLSDDDLHLHDLDDTPSPSTSTRHYHHFMRRSPTVPTVVYEDVAAAGGLPHRWRERGELSGVVLHRQIVTGSSGHGRRRLQRHGRQ

SEQ ID NO: 58819 - protein, 117 aa, Zea mays
  Coding DNA Sequence Number=SeqID_17040
MGTERAALGEDARSEQEPWLGAAGWTPWEGAPRAGGSRGGAELEDGGDEIRAWREGRWSREGKALREGELDSRARGEEAPGSLGKTTARWEMGGGKRSGRGGRKAGRLRLEAENEGA

SEQ ID NO: 58820 - protein, 90 aa, Zea mays
  Coding DNA Sequence Number=SeqID_17041
MVVTGEGERERVGRRLAQRSRFYFGRNGGPEEQPSRWSGGLQMALAVGNGMRRDIGPLSFMAPSGRLRCMALGLALITYKGLVENLEVIC

SEQ ID NO: 58821 - protein, 324 aa, Zea mays
  Coding DNA Sequence Number=SeqID_17042
  Homolog annotation: Hit_ID=Q67V39; Match level="QueryCoverage=95%, HitCoverage=95%, E-value=1e-39, Identity=68%"; Hit description =Phosphatase-like
  Pfam annotation: Domain name=UBX; Domain location=253-324; Score =60.4; E_value=5.9e-15; Accession=PF00789.11; Description=UBX domain
MAAGDAGRAPTAAAAQSLVESFCGVTSATPQEAAFYLESHNWALESAVRSYYDSVDGEADAVAADPVPPPPAAPAGGGEDTEDEDCVVGGGGGGDDDEDDEDYVDGDGSDDEDAALAAEAAEEEERRRPFKRLKRTHDARGGSGSSAKARGNVRTLADLDSGKGTAGSDENSEDDDEWTPPPEYETSIKDSDCPTELVPADEKSIVNEPVKRAAPFEGERRNLMEPSDNNTSNAAAAAAASSSATASRTITVDDSLPSTSLQIRFADGSRLVARFNTSHRISDVRAFIDATRPGASDYTLQAGFPPKPLEDTAKTIEEAGVANS

SEQ ID NO: 58822 - protein, 663 aa, Zea mays
  Coding DNA Sequence Number=SeqID_17043
  Gene Ontology: Mol. function=protein kinase activity; Cellular component=integral to membrane; Biological process=protein amino acid phosphorylation
  Homolog annotation: Hit_ID=Q6YUU3; Match level="QueryCoverage=76%, HitCoverage=73%, E-value=1e-175, Identity=63%"; Hit description =Putative leucine-rich repeat transmembrane protein kinase
  Pfam annotation: Domain name=Pkinase; Domain location=196-479; Score =114.8; E_value=2.4e-31; Accession=PF00069.15; Description=Protein kinase domain
  Pfam annotation: Domain name=Pkinase_Tyr; Domain location=196-479; Score=73.6; E_value=6.3e-19; Accession=PF07714.7; Description =Protein tyrosine kinase
  Pfam module annotation: Pfam domain module=Pkinase::Pkinase_Tyr; Domain location=196-479::196-479
  Subcellular localization annotation: CTP_CleavageSite=67; ConfidenceScore=5.44e-01
MGSLSKLSSLYMQNNQLSGTVDVISNISLATLVAGNSFVNMPASPPQALTPPPNPRGRPDDRRGPTSAPTVPETPIDPDDKKMQTGPLVGIAVGSIAAASCVLFALVLCLHNARKKPDDGSSEAKASSREVMDSSHDNAAVATSDLQLIQPAGKMTPDDRAHGPNGCTAKRPKQQVTVTTVSSYTVAALQVATNSFCQDSLLGEGSLGRVYKAVFPNGKVLAVKKIDSASLSLYEEDNFLAVVSNVSRLRHPNIVPLAGYCVEHGQRLLAYEYVGNGTLHDMLHFSDDDGMTMPGKTTRLAWNTRARIALGTARALEYLHEVCLPPVVHRAFKSSNILLDDEYSPRLSDCGLAALSPNPETEREAFAGVVGSFGYSAPEFAMSGTYTAKSDVYSFGVVMLELLTGRKPLDSSRERSEQSLVRWATPQLHDIDLLAKMVDPALDGLYPAKSLSRFADIIAICVQSEPEFRPPMSEVVQQLVRLMQRASIVRRQSDDQLGYSYRVPERDGGGTFFDHTRQPQTVTSAALLCGERQGSFLRFAMRQFSGRLVAYRMERNGLRNTWREGGREAGVERGVVSCGIRRCRRIWKTLGWRGVVTISAGCPVLCTVRVISTGKMLVYCSCSSDPANGLGWIGMTLADGRAVGRTTVDRLLMVVTSPLLARE

SEQ ID NO: 58823 - protein, 74 aa, Zea mays
  Coding DNA Sequence Number=SeqID_17044
MCDVTRDGTYLAVAVWCVEATTMRSTSSEDATAPGSFSVSAGHSPLLALSHVGDGVAYYCALDRHVLGSTMEIE

SEQ ID NO: 58824 - protein, 93 aa, Zea mays
  Coding DNA Sequence Number=SeqID_17045
MGLVVMSVENTACKRYHLELELSRVRLPYHARPLCGSSAGGWGSRRVHRPTAKVLGAQICNQPAEIQALRITKTIGGRGPLTQGMRKVRQERQ

SEQ ID NO: 58825 - protein, 109 aa, Zea mays
  Coding DNA Sequence Number=SeqID_17046
MATAPRAAHRQVGPRGQLLLLDECVGLLRVFRRPPPHPTPIVSLPRTFSCDYKARPRPPPSYRMNFVLPILCCHVHREWEIEDPLTTPFPTLAVGRDLLGGQGQSSWEC

SEQ ID NO: 58826 - protein, 109 aa, Zea mays
  Coding DNA Sequence Number=SeqID_17047
MATAPRAAHRQVGPRGQLLLLDECVGLLRVFRRPPPHPTPIVSLPRTFSCDYKARPRPPPSYCMNFVLPILCYHVHREREIEDPLTTPFPTLAVGRDLLGGQGQSSWEC

SEQ ID NO: 58827 - protein, 331 aa, Zea mays
  Coding DNA Sequence Number=SeqID_17048
  Gene Ontology: Mol. function=acyltransferase activity; Cellular component=nucleus; Biological process=cell cycle
  Homolog annotation: Hit_ID=UPI0000E4987F; Match level="QueryCoverage =87%, HitCoverage=28%, E-value=3e-32, Identity=32%"; Hit description =PREDICTED: similar to N-acetyltransferase ESCO1 (Establishment of cohesion 1 ...
  Homolog annotation: Hit description=homolog 1) (ECO1 homolog 1)
MQPKISAFFERQETDPDPISGDGEGNGQGNVGAATEAKRKANGCRLDGLVSKKRNYAQLHLELGQPDFVLHTCSVCGMMYARGNDEDEKVHRAYHKSYSEGVPFKVKLTDELQGWKKETVIARSEGGDRVVLATDENSCMSKSKVREVITVVEKELGFGEGKLLHKLCKVYLYISAQRIVGCLVTEPIKTGHRVIPSSTEGSPNDLPVSSTERGKNGHTLEFGSISFKREIIRRHSRSVKNKEECQDPGAILCETEAVPALCGFRAIWVAPSCRRKRIASKLMDVARKTFCEGRTLGISQFAFSPPTSSGKGLACRYCKTSAFLVYKDGPV

SEQ ID NO: 58828 - protein, 114 aa, Zea mays
  Coding DNA Sequence Number=SeqID_17049
MTSKAKHQKSFVKWVIKEGNQIQGRTAQGTAALESWALDTEQGAPRRGARNSREGAAGELATGHRNPSSSLLRETVLGKKGAGSSGEKISIGEEKSSNGVARIRKEERSAEEKG

SEQ ID NO: 58829 - protein, 76 aa, Zea mays
  Coding DNA Sequence Number=SeqID_17050
MESHDLWAERESRLVGKVHNLCRVFETDISAVLAVTMRLMVPGFDSGNGCPHCNHCSGEDEAVEGDFQEFQDYDEF

SEQ ID NO: 58830 - protein, 86 aa, Zea mays
  Coding DNA Sequence Number=SeqID_17051
MATTAGGTLGAAASNRGRKKISLGRGSVANDGDLMMGVAPVWMVCVIDHEMGGLDRCALTSLRHLIRIIDLQSTVPVAYRFRAGGF

SEQ ID NO: 58831 - protein, 152 aa, Zea mays
  Coding DNA Sequence Number=SeqID_17052
MAINDIDVSAQRFPFDEDNGMMTFKHHADSGHQKGEDKVEQGRTGFDGLDGTHGRSELENSEQGGRHGWCLRRETTEGRSQTPWRTPKTGSDPKSEQPGETKLSSLLASRGGKTAPKGCERVEATKCKTEIGEARRLDKDAEAKRGKPERDQ

SEQ ID NO: 58832 - protein, 88 aa, Zea mays
  Coding DNA Sequence Number=SeqID_17053
MAVRQGILALELPRNCNSIAGHFSMYHHKEKSNWKRDGFVQPKTARSGCTGQCPVRQAGSSGLDVLGTSTAVYGYKSPDCPVVHRTVR

SEQ ID NO: 58833 - protein, 697 aa, Zea mays
  Coding DNA Sequence Number=SeqID_17054
  Gene Ontology: Mol. function=protein serine/threonine kinase activity; Cellular component=mitochondrion; Biological process =protein amino acid phosphorylation
  Homolog annotation: Hit_ID=Q8W0A6; Match level="QueryCoverage=90%, HitCoverage=100%, E-value=0.0, Identity=64%"; Hit description =Putative leaf protein
  Pfam annotation: Domain name=PPR; Domain location=128-162; Score=2.9; E_value=3.3; Accession=PF01535.11; Description=PPR repeat
  Pfam annotation: Domain name=PPR; Domain location=163-197; Score =22.1; E_value=0.002; Accession=PF01535.11; Description=PPR repeat
  Pfam annotation: Domain name=PPR; Domain location=198-232; Score =33.4; E_value=7.8e-07; Accession=PF01535.11; Description=PPR repeat
  Pfam annotation: Domain name=PPR; Domain location=233-267; Score =28.7; E_value=2.1e-05; Accession=PF01535.11; Description=PPR repeat
  Pfam annotation: Domain name=PPR; Domain location=269-303; Score =37.8; E_value=3.8e-08; Accession=PF01535.11; Description=PPR repeat
  Pfam annotation: Domain name=PPR; Domain location=304-337; Score =11.5; E_value=0.32; Accession=PF01535.11; Description=PPR repeat
  Pfam annotation: Domain name=PPR; Domain location=338-372; Score =45.9; E_value=1.4e-10; Accession=PF01535.11; Description=PPR repeat
  Pfam annotation: Domain name=PPR; Domain location=373-407; Score =29.5; E_value=1.2e-05; Accession=PF01535.11; Description=PPR repeat
  Pfam annotation: Domain name=PPR; Domain location=408-442; Score =30.0; E_value=8.4e-06; Accession=PF01535.11; Description=PPR repeat
  Pfam annotation: Domain name=PPR; Domain location=443-477; Score =27.5; E_value=4.6e-05; Accession=PF01535.11; Description=PPR repeat
  Pfam annotation: Domain name=PPR; Domain location=478-512; Score =39.9; E_value=8.9e-09; Accession=PF01535.11; Description=PPR repeat
  Pfam annotation: Domain name=PPR; Domain location=513-547; Score =29.1; E_value=1.5e-05; Accession=PF01535.11; Description=PPR repeat
  Pfam module annotation: Pfam domain module=PPR::PPR::PPR::PPR::PPR::PP R::PPR::PPR::PPR::PPR::PPR::PPR; Domain location=128-162::163 -197::198-232::233-267::269-303::304-337::338-372::373-407::408
MALVRTICRRSECRRRGSRRVDELMGDEKARCAAAGGLGHRLTGQSMTEETRLVLYEHVIMGENGVQLTLTSTLKSTGKPRINADGLNNGSHTTKEKHEHGGTFQPSKGQKQQLCTTCAKGHTCQSVINRTRQMRALIDSKKPYQAHSVFKHLMDEGHKPSLVTYTILLTALTNQRMFESIPSLLAEVELAGVRPDSIFFNALINAFVEAKRMGEAINTFWKMKHSGCHPTTSTFNTLIKGYGIVGKPEESQRVFDMMGVEGSVRPNLTTYNILVKAWCDHRNLEEAWGVVGKMQAGGFEPDIVTYNTIASAYANNDETWRAEELIVEIQTRVRTSERTWGIIIGGYCREGRLEEALRCVQQMKDAGSVPNVVIFNTLLKGFLDANDMAAVNKILGLMEKFGIKPDIVTYSHQLNTFSSLGHMAKCMHVFDKMIEAGIEPDPQVYSILAKGFVRAQQPEKAEDLLLQMSHLGLCPNVVTFTTVISGWCSVADMESAMRVYDKMCKSGVYPNLRTFETLIWGYSEQKQPWKAEEVLQMMRETGVKPKQSTYCLIADAWKAVGLTENINNSNGSPNGPYAIEKLDHSNDNCNVRISEDNNNKLQFFDESNGRAMNGRSRSSFLQITNALGSSGIVSAKVMKAGEFPSERLKAIKNTSFPQGFQLLHLEFCRKQLRKNGGFCSQSINSFKMGFSSRGCIY

SEQ ID NO: 58834 - protein, 281 aa, Zea mays
  Coding DNA Sequence Number=SeqID_17055
MDYMVFEVAELDRATMIYHTNSKMKVYLLVLNSIVVNSLLIAHFIGRVEIFFMDNLHGYCSQEATIFIACIEKMGTLKTPNSQLVTPISVKLQRPDGLTEGQRRLRHSDCGATRQSESDRQSGLAKGATANSAPPDPRARTRAKTRKTANSAPPDPRARTRAKTRKTANSAPPDPRARTRAKTRKTANSAPPDPGLGLGLRPGRRRTLLRPTPGLGLGLRPGDDETPPRPTPWLGLGLRPGRRRILRLARPQGSYSALALGRTTSAFARPHCSELGLGKQK

SEQ ID NO: 58835 - protein, 47 aa, Zea mays
  Coding DNA Sequence Number=SeqID_17056
MTGHPIALVHQSRPKKSPFTAPGRSTRAYLDSITCVKATRPRGCIGL

SEQ ID NO: 58836 - protein, 161 aa, Zea mays
  Coding DNA Sequence Number=SeqID_17057
MVGKDVDMVRPPRTTIHFWSLDFIASSKETLDKAPKALVPLASNSLDFIESLGHLRLGSLRGGDQRRRAPQPAFVEVVGTVGPVRGPFCGLLPSSGINHEWAQECLMVTTTGGSSAHVENLDGALASVAVYAATSAPSRFDLPSQELLAGARPQPRSVEAP

SEQ ID NO: 58837 - protein, 391 aa, Zea mays
  Coding DNA Sequence Number=SeqID_17058
  Gene Ontology: Mol. function=protein binding; Cellular component =clathrin vesicle coat; Biological process=intracellular protein transport
  Homolog annotation: Hit_ID=Q6DF04; Match level="QueryCoverage=52%, HitCoverage=47%, E-value=5e-80, Identity=70%"; Hit description =Adaptor-related protein complex 1, mu 1 subunit
  Pfam annotation: Domain name=Adap_comp_sub; Domain location=1-213; Score=293.3; E_value=4.6e-85; Accession=PF00928.11; Description =Adaptor complexes medium subunit family
MPECKLGLNDRVLLEAQGRATKGKAIDLDDIKFHQCVRLARFENDRTISFIPPDGSFDLMTYRLSTQVKPLIWVEAQIEKHSRSRIELMVKARSQFKERSTATNVEIEVPVPSDATNPNIRTSMGSAAYAPERDAMVWKIKSFPGGKEYMCRAEFSLPSITAEEGAPEKKAPIRVKFEIPYFTVSGIQVRYLKIIEKSGYQALPWSKTFSPALSISIAKKLDEGVCQRFGCRLARLLDGQFDRQPYLVELLDNVVWRVDRQPRLAGSLDNVVRRAGWSTVPPYRVARRAGWLVSGPSLGGLLGLLRALGSQVLDYTQWTDNPISQGPTPPKSLKPLPTQNFVNEIIKLKRITIKNVGTKYQLADIFTKPLDEARCYKLRINLNILDFSNMS

SEQ ID NO: 58838 - protein, 799 aa, Zea mays
  Coding DNA Sequence Number=SeqID_17059
  Gene Ontology: Mol. function=RNA-directed DNA polymerase activity; Cellular component=mitochondrion; Biological process=RNA-dependent DNA replication
  Homolog annotation: Hit_ID=Q8S463; Match level="QueryCoverage=99%, HitCoverage=40%, E-value=0.0, Identity=86%"; Hit description =Putative prpol
  Pfam annotation: Domain name=RnaseH; Domain location=237-364; Score= -6.2; E_value=0.00022; Accession=PF00075.14; Description=RNase H
  Pfam annotation: Domain name=rve; Domain location=590-749; Score =117.6; E_value=3.5e-32; Accession=PF00665.16; Description=Integrase core domain
  Pfam module annotation: Pfam domain module=RnaseH::rve; Domain location=237-364::590-749
MLLGFIVSERGIEANPEKIAAITSMGPIKDLKDVQRVTGCLAALSRFISRLGERGLPLYRLLRKAECFTWTPEAEEALGNLKALLTNAPILVPPAAGEALLIYVVVTTQVVSAAIVVERREEGHALPVQRPVYFISEVLSETKIRYPQVQKLLYAVILTRRKLRHYFESHPVTVVSSFPLGEIIQCREASGRIAKWAVEIMGEMISFAPRKAIKSQVLADFVAEWVDTQPPTAPIQPELWTMFFDGSLMKTGAGIGLLFISPLGKHLFYVLRLHFPASNNVAEYEALVNGLRIAIELGVRRLDARGDSQLIIDQVMKNSHCRDPKMEAYCDEVRRLEDKFYGLELNHIARRYKETADELAKIASGRTTVPQDVFSRDLHQPSVKTDDTPEPEKALVEPEAPSAQSEVPSSQSEVPSARPEAPSAQPEAPSAQPEAPSVRPEVPSAPEGEALRIEEGRSGVTPNRNWQTPYLQYLHRGELPLDRAEARRLARRANSFVLLGDGKELYHRSPSCVLQRCISIAEGQELLQEIHSGACGHHAAPRALVGNAFRQGFYWPTAVADATRIVRTCEGCQFYARQTHLPAQALQTIPITWPFAVWGLDLVGPLQKAPGGYTHLLVAIDKFSKWIEVRPLNSIRSEQAVAFFTNIIHHFGVPNSIIIDNGTQFTGRKFLDFCEDHHIRVDWAAVAHPMTNGQVERANGMILQGLKPRIYNDLNKFGKRWMKELPSVVWSLRTTPSRATGFTPFFLVYGAEVILPTDLEYGSPRTRAYADQSNQANREDSLDQLEEARDMALLHSARY

SEQ ID NO: 58839 - protein, 152 aa, Zea mays
  Coding DNA Sequence Number=SeqID_17060
  Gene Ontology: Mol. function=GPI anchor binding; Cellular component =membrane
  Homolog annotation: Hit_ID=P59833; Match level="QueryCoverage=53%, HitCoverage=41%, E-value=5e-17, Identity=50%"; Hit description =Putative GPI-anchored protein At5g19250 precursor
  Subcellular localization annotation: CTP_CleavageSite=14; ConfidenceScore=5.56e-01
MPRPPPSPPHESSLASEISSRPRNSRPATAPKPRLPPTQRRSHPLPPGRRPPFRRAPPVPPAPLAHRRYLDRCHLNASVTEDGQVMPACVLGLVPVVVLANYTKSQYNRFLNDSQFSGAGIASEGDWVVVVLSTSTGSGDYSPALSGSNWAD

SEQ ID NO: 58840 - protein, 233 aa, Zea mays
  Coding DNA Sequence Number=SeqID_17061
MAYTRQLFVLEIWEDNCGEFPLIDLDGGAAMVNKTHMVPPKLKSFLVISVPNICQEISVGLQHFGQCKKARSHCCQHCDRQAQISKRGRQGRGVVADVVIGEVDGGDAVDAGVALVLDVGVEADVITNAFISRQLPGSAQGDTCLILMSIHVFVVPYVSISHNPIKACVDAKELFYCGLKTNQIFIISLFPEITTYKRLLRSFPNAQTYHGIKVGSLEKNVAHFFEVAKGIRY

SEQ ID NO: 58841 - protein, 36 aa, Zea mays
  Coding DNA Sequence Number=SeqID_17062
MRTTRRSTGKELTVDVVRRKLQPRHRVACSGAMPMI

SEQ ID NO: 58842 - protein, 909 aa, Zea mays
  Coding DNA Sequence Number=SeqID_17063
  Gene Ontology: Mol. function=protein binding; Cellular component =membrane; Biological process=defense response
  Homolog annotation: Hit_ID=Q8W5N5; Match level="QueryCoverage=73%, HitCoverage=30%, E-value=3e-29, Identity=32%"; Hit description =Putative disease resistant protein
  Pfam annotation: Domain name=LRR_1; Domain location=625-648; Score =8.5; E_value=7.5; Accession=PF00560.23; Description=Leucine Rich Repeat
  Pfam annotation: Domain name=LRR_1; Domain location=651-672; Score =16.3; E_value=0.11; Accession=PF00560.23; Description=Leucine Rich Repeat
  Pfam annotation: Domain name=LRR_1; Domain location=674-695; Score =12.0; E_value=1.6; Accession=PF00560.23; Description=Leucine Rich Repeat
  Pfam annotation: Domain name=LRR_1; Domain location=697-719; Score =10.9; E_value=2.6; Accession=PF00560.23; Description=Leucine Rich Repeat
  Pfam annotation: Domain name=LRR_1; Domain location=721-745; Score =5.7; E_value=25; Accession=PF00560.23; Description=Leucine Rich Repeat
  Pfam annotation: Domain name=LRR_1; Domain location=799-822; Score =7.8; E_value=9.9; Accession=PF00560.23; Description=Leucine Rich Repeat
  Pfam annotation: Domain name=LRR_1; Domain location=856-878; Score =0.1; E_value=2.7e+02; Accession=PF00560.23; Description=Leucine Rich Repeat
  Pfam annotation: Domain name=NB-ARC; Domain location=149-435; Score= -2.9; E_value=4.2e-10; Accession=PF00931.13; Description=NB-ARC domain
  Pfam module annotation: Pfam domain module=LRR_1::LRR_1::LRR_1::LRR _1::LRR_1::LRR_1::LRR_1::NB-ARC; Domain location=625-648::651 -672::674-695::697-719::721-745::799-822::856-878::149-435
MAVSASAFGGHVVGALKGLLLNGPLPRKAGAELHEKLKQEVRYAADAENRVLEDDRARRWLAELRRVLYRADDRILQAYDAQEQQRTTASVLSLPIMRRFTMDMYIKREISSLLKDIDLLSENRPPALTSSDTATYQHDGRSSSCDGLDDDLVRHGSSLVEAEKIEMRILPLVDKLTEHHEPPREFLIFAIYGPGGASFKGPKRKADALQTQLADRIEGRRVFLVFNVHNGGGPSSHHHQGGSTGAEIFGNLVEVLKLFRAAQGSRALVTTTDENVGNEIRSAQIQKGAAEGFGLQTDRLWQLPVEDGWALLLRAAGLEPAKVTPELKKVGVAIVQRCNCLPLAIEAVGGLLRRKGYAQEEWERVRDSEAFELKDPATGTQGGAGSSVYLSYQHAPPRLKQCFHYLSLFPADVEIERRRVTQLWISEGLVDPGSSEEGSSTSSRSRRHHNNNTQETAAGEQQSGASQEGSSRSSRHNNNNNNTQSGASTEIAAAAAADDDDREDSTSSSQGPPRELPRLSSSRHHSPRTSLPDTMPSHRSDQEEVADCYLTELAGTGLLQRTNRRGQYKMHDQVRKIAESLTENEVCAGDPRYAATTTLPENLIRLSFLNKGLAALPENVARMTGLRTLLLSGNPLGETDVDTVCKNLGGSLRVLDLSETEIRSVPKSLGNLARLRHLDLSRTKITAVHESVGRLRRLRFLGLRGCGDLTSLPRSIHKLAKLEYLDFRDSGVANSTRSLHSLRHLTLLHGFVVDSVSSSNAVLLEDLKHMSRLSDLQINITKTVAGKNADDKMLKEKGSLRNLELRWCPVSSAVDPKTLETMLTQLHPHQCLVSLKIDGYHGAAYPEWLCSSDLPNLQRLSLENCWSWERLPPDLASPEAEVSQNGQPPQAAKNRYATATSGGGGGGVS

SEQ ID NO: 58843 - protein, 163 aa, Zea mays
  Coding DNA Sequence Number=SeqID_17064
  Subcellular localization annotation: CTP_CleavageSite=42; ConfidenceScore=5.30e-01
MQSLKAAVSSPSATIRTMVDGLSKLGSIYDRIDAPTLLQSTSSQRESSSTPSFSARESFVELKVSVQDMQLALKRGDGADLRTWVQCYTRLVKKAQKMFKKANRKTASDVEGCRAIDLVAEAREVAVSILESTLHLLSKQIVLPSSSMWSLVSKSSFHKKSLV

SEQ ID NO: 58844 - protein, 326 aa, Zea mays
  Coding DNA Sequence Number=SeqID_17065
  Homolog annotation: Hit_ID=Q9SLP6; Match level="QueryCoverage=17%, HitCoverage=16%, E-value=5e-23, Identity=94%"; Hit description =Ferredoxin
  Pfam annotation: Domain name=HEAT; Domain location=210-246; Score =22.5; E_value=0.0015; Accession=PF02985.12; Description=HEAT repeat
MPRTPERWPALPRTPEYALPGVNASRKEMVPTVYIEGGKCIMLYELMREGQSIGVIADGIDKNDKPHKVRLYSIASSAIGNFGDSKTVSLCVKRLIYTNDAGEIKHMYEQQKKKIQHKRSIGGPVVDLGKIVQVILANEIGLGKTVQVLSAYSFFLDACRFFEHILFCIAIASIVLIGEIGGMTEEDVATFIQVRRTACKSLGVLAKFSTQYTEKALDLLMDMMNDDTEAVRLQALEALFRMATYGCLSVQEKHMHMVLTMNILRSQMHDWSFQIDNYHRSGMVPLADLYEAEGVILLQEEKEGVILLEVEEDEVVIDFKPTPSAM

SEQ ID NO: 58845 - protein, 1007 aa, Zea mays
  Coding DNA Sequence Number=SeqID_17066
  Gene Ontology: Mol. function=nucleoside-triphosphatase activity; Cellular component=membrane; Biological process=defense response
  Homolog annotation: Hit_ID=Q69PR5; Match level="QueryCoverage=88%, HitCoverage=74%, E-value=1e-115, Identity=31%"; Hit description =Putative nucleotide-binding leucine-rich-repeat protein 1
  Pfam annotation: Domain name=LRR_1; Domain location=581-603; Score =3.2; E_value=72; Accession=PF00560.23; Description=Leucine Rich Repeat
  Pfam annotation: Domain name=LRR_1; Domain location=605-626; Score =10.8; E_value=2.7; Accession=PF00560.23; Description=Leucine Rich Repeat
  Pfam annotation: Domain name=LRR_1; Domain location=628-650; Score =8.2; E_value=8.3; Accession=PF00560.23; Description=Leucine Rich Repeat
  Pfam annotation: Domain name=LRR_1; Domain location=652-673; Score =5.6; E_value=26; Accession=PF00560.23; Description=Leucine Rich Repeat
  Pfam annotation: Domain name=LRR_1; Domain location=793-814; Score =6.5; E_value=18; Accession=PF00560.23; Description=Leucine Rich Repeat
  Pfam annotation: Domain name=LRR_1; Domain location=875-897; Score =4.6; E_value=39; Accession=PF00560.23; Description=Leucine Rich Repeat
  Pfam annotation: Domain name=NACHT; Domain location=133-321; Score= -25.5; E_value=0.0056; Accession=PF05729.3; Description=NACHT domain
  Pfam annotation: Domain name=NB-ARC; Domain location=97-429; Score =88.6; E_value=1.9e-23; Accession=PF00931.13; Description=NB-ARC domain
  Pfam module annotation: Pfam domain module=LRR_1::LRR_1::LRR_1::LRR _1::LRR_1::LRR_1::NACHT::NB-ARC; Domain location=581-603::605 -626::628-650::652-673::793-814::875-897::133-321::97-429
MASAERRVALDDQAATYWLKRVTDHMYQVQIVVDQWVIKNEKMHREGSLKRTISCGDHSGVMKLAAAMKELNADFDSILELSAETNKTRQPAAVRSYGKTAPGYNADIVGDYVDSDARGIIELLHSSKRRSCRLIAIVGPVGIGKTTLARRIYHSVDAQRFETKLWIRFSNDLSSLIIWPEPGWSSDRYKEGPTKSHWPDSDSRSSDRRKEGPTRSHWPDSECWSSDRRWEGPTKSQLMHLGAEIASKRFLLVVDSVWTEDVWEALLEGPLQQGDLEGSRVIVTTRNKHVARRIGAGLIHHVRRMSNADALRLLFRRASVSESDEAELQDVGRRIVEKCDGLPLAVRSVGRTLRGQEPTRHDWETACRAAFQDLSPEEQYTIGLSFRNLPPHMRQCFLYCSVFPEGFFIEKQYVEQQWISEGFILNKRRVTMEEAAERCFDELVGRGLLRLAVGSDGATGARMPIVIRSFAKDVSDHVNFCTESVSAANNLFEVRRLSIVENNEADDRIGDGDDSGNGEIAGGGDGNGSMEDEHGNRGEARIAGEDVPLHGLGRMKCLRTLVLRKSTVSQKSIRAVRQLNLLRVLDLRGVQGISALPIAVGSLEHLRYLNISETEIERVPGSISYLTMLQYLLLRNCSKVKTLPTGIQQLRYLRCLDIAGTGIKAVDWSFSAMEELVSMQGFPVTRGDGVVGSLRALNLKFPKKLAALRLDMLQEILEPLPRDRWPVREYQQLRDLELCYANADSPLVQGGTIENRMLVLDRFVPEKRLVRLKIENYLGKQYPSWIAAATLPNLQRLHLQSCAWCEELPPLGELPQLKLLAVTGFDSLRSLGAEFRGGNGPPVRTTAFRRLQQLFIGDMKALHTWSGLQSQDLPQLQVLRLLGCINLVAIPLVLQESATLTRLEVDTRTKTVIEDKLRGFTGGIVVNVDNTWEQEPPQHEADVAPQDAQPPGPGQDEAVEAEVEETVGALQKEVPKAFELGAVKLVLTIFAITAICSVLYLLFVPRC

SEQ ID NO: 58846 - protein, 376 aa, Zea mays
  Coding DNA Sequence Number=SeqID_17067
MDDQVYMQPEENRMWRLSEDTLLCDSEESLTKRKLDFSQPIGGDNSTATLIPYPTITGNEDFVPSSSDVAQVGDGDDDVTNFCLTRREPPTCDVAQVGDGDDDVTNFCLIRREPPTSPFIDSCVDTTELAEDYSSFPCALPSAVNFSDIDSFLDGCDQLFENQTLDIISPVEIRPSMDTVATLEDLFLKTTRQALANVLDGLNAHTLRDPVRCASLRLASSCLTGQFASIARIKAMLDKLITISEQLKRTFFNFEVARKQDEQSTAKIKQALDVQREALHTVDEELASAEKQRAETMMTIEKLNQILMEVEQKRVRLEEMRSTSDLEVRKLEQDLCDAIGDASKKAIDVFQKETTKLNQQAEQLLIDLNSYRSSSN

SEQ ID NO: 58847 - protein, 250 aa, Zea mays
  Coding DNA Sequence Number=SeqID_17068
MAIDDIGVSARRFPFDEDDGMTIRLGFLSSTNAGCWDGADARPQTKDDALAMKAEQGTQPSAVRTTTGQAKELACAQGRTEELTATCKQIDASEGAGIRDRGAANRAGRVRSEMEQRRPGVMAEGRTELGVGGWGTMGTSLRRRGCGELPTAQQGQGPTSGSGGGPLELDAGQARQREGLGERSSKARSRSGELESHGWEEQRPSWGRDQGRTHQRRRAAAASKGARAGAPNRRRESRAGRDRGSSRAHG

SEQ ID NO: 58848 - protein, 195 aa, Zea mays
  Coding DNA Sequence Number=SeqID_17069
MAKGYWMILVVQIRSHDQPKAGRDASAATAPWLERQPARPGTQFPNKNNVIPNWGHGEAAEKALTGIHREILDGHGALGIVDEVKQQRAILATPAIPGVGNSFAQVLGSLVIPLVPSVKDIRPREQIAMTAGCPLSFLFLRHGDAQLGTGVTARPIYASREGESEPRRSVARSMSCCNRTPRKRGGSYGVARARL

SEQ ID NO: 58849 - protein, 378 aa, Zea mays
  Coding DNA Sequence Number=SeqID_17070
MDDQVYMQPEDNRMRRLSEDTLLCDSEESLTKRKLDFSQPIGGDNSTATLIPYPTITGNEDFVPSSSDVAQVGDGDDDVTNFCLTRREPPTCDVAQVGDGDDDVTNFCLIRREPPTSPFIDSCVDTTELAEDYSSFPCALPSVVNFSDIDSFLDGCDQLFENQTLDIISPVEIHPSMDTVATLEDLFLKTTRQALANVLDGLNAHTLRDPVRCASLRLASSCLTGQFASIARIKAMLDKLITISEQLQRTYSNFEVARKQDEQSTAKIKQALDVQREALRTVDDELASAEKQRAETMTTIEKLNQILMEVEQKRARLEEMRSTSDLEVRKLEQDLCDAIADASKKAIDVFQKETTELNQQAEQLLIDLNSCRCRSSSN

SEQ ID NO: 58850 - protein, 67 aa, Zea mays
  Coding DNA Sequence Number=SeqID_17071
  Subcellular localization annotation: CTP_CleavageSite=40; ConfidenceScore=5.03e-01
MAARFSVIWNMASTAEGPSPSFICARKSQRIPRVRDEGCCANSGERPGSRCFYRELEDDPGVWGPPG

SEQ ID NO: 58851 - protein, 119 aa, Zea mays
  Coding DNA Sequence Number=SeqID_17072
MEERVRFVQQLDQTKKALTELCLEQMVRDMESVESMHNGRYRGEAPPSPLVAPPGPNRRQLGSMEEYKKAFDEARYATSVHNHDLDDSMQLSAFTTEELGMTLSEQTLTQIELEEKEEE

SEQ ID NO: 58852 - protein, 138 aa, Zea mays
  Coding DNA Sequence Number=SeqID_17073
MAASRGYDGGIPSAAPREVDLHDDSTNDSVSTTSNITLLFVDISKGRTLDYREWRKEGSAPSSIGLIVASRTTTGVWICAPKPGETSLNQFASSGRSCRNYLLANWISWAPGWGARRHGLSGVGSMLRVPETNVEDEW

SEQ ID NO: 58853 - protein, 127 aa, Zea mays
  Coding DNA Sequence Number=SeqID_17074
MESHTKKPINDVFLKIGLLEGQTSCSHSLVHGVGAESSVPMAGPPPLLVPCADTQRVRLDKLRWIEILVVKRLTKSLWSNPTRRSGRQSLCRATLRGRADDQVSVEQPCEADWPIMSLSINPARRRP

SEQ ID NO: 58854 - protein, 113 aa, Zea mays
  Coding DNA Sequence Number=SeqID_17075
MAAEQQPLSLKLSLVACRRKIEMISNYKCTFGLKEGLALASNSFASGVLLVELVGGVASQHPGDPTEYLVEAWETTNRAVDDGGGSWAEKEASAQDAGFEFDTSSPMHNKTPT

SEQ ID NO: 58855 - protein, 81 aa, Zea mays
  Coding DNA Sequence Number=SeqID_17076
  Subcellular localization annotation: CTP_CleavageSite=38; ConfidenceScore=5.03e-01
MDDSGELTSPTAKGAQRTTGNATTCRELSMGVAHRKQRAQRASTMEIRPEARLLGKPGVRRHLDRNSQIFLTPDFSEKWVE

SEQ ID NO: 58856 - protein, 87 aa, Zea mays
  Coding DNA Sequence Number=SeqID_17077
MATSAAAPLLRPHIKLSVASNSVPRGAKHSVEHGEHDSGLTSDLRSSDRPPTVHGGISSPGNKLDVPSSLIVDLSVAEASTCAHDPS

SEQ ID NO: 58857 - protein, 146 aa, Zea mays
  Coding DNA Sequence Number=SeqID_17078
MDRADLGRSVRAQGAGTGEGDQGQCVAAAMEKIGARKLQGLDGGHGELEQGRSPMETECRGTRRPGEASPRLGKGLDLVKSKQGRAPWEVRGELVAANRGAACAAMEQLHGEGAQRKREREAGDLGADQEHGRDEVGRELRAMEES

SEQ ID NO: 58858 - protein, 183 aa, Zea mays
  Coding DNA Sequence Number=SeqID_17079
MTAVKPLELPRLRAPLRRVSARPQFPWLSRSLLQSFPWPRQHTALDPPRLYLSRCLRAPSFPCVQSRLWPDLHGSRPLCALLHGARIPMLSSLSARSSCRVVCQYSLPADLTVDHVQVIARLLASRLFDKTPKSIDCRCPAAIRGYLRHLRQLARPAALYTSPSRIFVEHVEPRSSLPDLVEP

SEQ ID NO: 58859 - protein, 122 aa, Zea mays
  Coding DNA Sequence Number=SeqID_17080
  Subcellular localization annotation: CTP_CleavageSite=78; ConfidenceScore=5.44e-01
MSHPTSPNSFLSLGPHTLSHPYLISPAPSLSRAQPSPPKLAGDPPPTCRPPGTPNAVPSVPEHRHEENLCEGYVVYPRSFTSVVKIRSCKARLGRDHDSWVKSVRNWHIIHAHGYEQPWELL

SEQ ID NO: 58860 - protein, 78 aa, Zea mays
  Coding DNA Sequence Number=SeqID_17081
MAITIRAGGAAVCSCQKIHTCNCAAAYPHLTAGGVPFCIAALKMRVPVPRCCSGVRRPWRHRVANSSTALGRREERRD

SEQ ID NO: 58861 - protein, 56 aa, Zea mays
  Coding DNA Sequence Number=SeqID_17082
  Subcellular localization annotation: CTP_CleavageSite=13; ConfidenceScore=5.02e-01
MVQKQQNSEGSSRATVGSKNPMYFRKSFTTKEKTLKDMLAFGKQGKVSDQVFMSEK

SEQ ID NO: 58862 - protein, 61 aa, Zea mays
  Coding DNA Sequence Number=SeqID_17083
MFEETEGALSTMLEQCARPDHVGSTVLDIYTMNSIIGANDVAAHARGPFGKDSIESIHNRI

SEQ ID NO: 58863 - protein, 121 aa, Zea mays
  Coding DNA Sequence Number=SeqID_17084
MELREHCPPYKLTTMTDTIDSILCVYTKVLEPLVGLRNTEQQQQYRKESADVGQMEVALPLLEQLLVEWLLAQPCYLLFLLSVLPIGGIGNHKSIFSMYLASKLVFDYYLSRNIRANNVYM

SEQ ID NO: 58864 - protein, 95 aa, Zea mays
  Coding DNA Sequence Number=SeqID_17085
MAGGCWEDDIGSYGCTSCPIEQGGVGEGRDEDHDGPAATTALTTLTSRTSPWPAKTNTARPDVSGRAGAVADSLRISGISEVMVDNPRLQVLLTS

SEQ ID NO: 58865 - protein, 95 aa, Zea mays
  Coding DNA Sequence Number=SeqID_17086
MKASMDTTERARVATMLLMEVRLVLRPSRVSGVAVADGDDASMRLVGAGRGAAAKIDGGRDVEVVRGRVVVGGSCVISNTRLIGLWILPGSWRRE

SEQ ID NO: 58866 - protein, 311 aa, Zea mays
  Coding DNA Sequence Number=SeqID_17087
  Homolog annotation: Hit_ID=Q6H734; Match level="QueryCoverage=23%, HitCoverage=20%, E-value=3e-14, Identity=50%"; Hit description =Putative DNA-damage inducible protein
MALIRHRATSMSPEVENLKALLEVETREPLRHQQIYFNEKEVEHIEAQCRWGPTSERTSQDGLTVNPDGTVVNPQAFKQYARGDSQLMAQLLQGLPLILPILLKEYPPTQMFYDAVTEWGKRGCDHAATGALPRAASSPEEHRASRGHGGPSSATPYVKAALESQDSVMEACCLQSTDTTVPPPDAPVPCSIQLSARYLEVHCCLHDYPSLTDKDVRIIVSNCAALENLIMLQSSISDGGLSQDAKQCRNLKFLHTEGCLSITKASLRALVQYAKRLESLTLGSYPQIEQHAILSGHACAQGHDGWTITYE

SEQ ID NO: 58867 - protein, 166 aa, Zea mays
  Coding DNA Sequence Number=SeqID_17088
  Subcellular localization annotation: CTP_CleavageSite=98; ConfidenceScore=5.10e-01
MVVSAYRQPHFLATRTASPFACSLEHARAATALLPTSRAHHRAELLSMAFPLLSLTHFLSSIASLSRSPGSRSYAPAPCRARCPTAPRVPLFRPAEPLCSSRPGARAGRAHPSCPRPPNRDTGSPTRLPSAPLPLLSPLAKPTRDHAQEQPDPMPSTRPAPSFGGA

SEQ ID NO: 58868 - protein, 217 aa, Zea mays
  Coding DNA Sequence Number=SeqID_17089
  Subcellular localization annotation: CTP_CleavageSite=44; ConfidenceScore=5.11e-01
MASGGDDARGRPGDISFSLPLAGFQGAGPRAPRLGRGQRGQAARALRRVANWHLWAPTGTAQRHLRVPSLSETVTGKIQRFVEQVYGNKADCSDDPSELLIRIEGVRNHRTKRYNVRPAAPANSKSAGSVHLSMPPPNRLGAGAWTAVGSLHAGPVARGGHAAVPSPHVRGSRSGQGRVITTWPALLLLLRFDENCWKELRLDWVGSRCCVRLVKQQ

SEQ ID NO: 58869 - protein, 291 aa, Zea mays
  Coding DNA Sequence Number=SeqID_17090
  Homolog annotation: Hit_ID=Q10M56; Match level="QueryCoverage=98%, HitCoverage=100%, E-value=1e-95, Identity=61%"; Hit description =Expressed protein
MAMGLPGLRCHRLLARGSLPPLGPALYRRPLERTSALRYSSLQAQAGDSIGEEALRMFLEDRQLHGDFVTKVSDMVWRRNGANVGAAEATTGQGSAIDVAQPEDVREDAVDEGMLRLAAITSDWVSGDSSPPLSKRLSAEERQNESNKRKELNLLKYEALKDELLLLTAGTGAACSLYCLLVFSLETAVSYALGVGFRIGITSEDLKNTIEKTLGGAGLALSSPRLIIPAVIYGLSALSHHFQNSFFSFEVLPGMMGFLAYKAAALVQVYRDNEDLRLILPDEEAADSDST

SEQ ID NO: 58870 - protein, 119 aa, Zea mays
  Coding DNA Sequence Number=SeqID_17091
  Subcellular localization annotation: CTP_CleavageSite=51; ConfidenceScore=5.59e-01
MAFPLLSLTHFLSSIASLSRSPGSRSYAPAPCHARCLTAPRVPLFRPAEPLCSSRPGARAGRAHPSCPRPPNCDTGSPTRLPSAPLPLLSPLAEPTRDHAQEQPDPMPSTRPAPSFGGA

SEQ ID NO: 58871 - protein, 78 aa, Zea mays
  Coding DNA Sequence Number=SeqID_17092
MDITSKTDIAKVILGCIAQRQLIKPRTEARRASRYQVDGRRSRRLRNPKPRDILRQDLLFRYNLLEESSHSTEYKVFE

SEQ ID NO: 58872 - protein, 378 aa, Zea mays
  Coding DNA Sequence Number=SeqID_17093
  Gene Ontology: Mol. function=DNA-directed RNA polymerase activity; Cellular component=nucleus; Biological process=transcription
  Homolog annotation: Hit_ID=Q9LSZ5; Match level="QueryCoverage=54%, HitCoverage=91%, E-value=5e-36, Identity=35%"; Hit description =Arabidopsis thaliana genomic DNA, chromosome 5, P1 clone:MQM1
  Pfam annotation: Domain name=RNA_pol_Rpc34; Domain location=69-375; Score=-17.3; E_value=3.3e-10; Accession=PF05158.3; Description=RNA polymerase Rpc34 subunit
TVRCAFSRVPDFCALWRALNAVVGDKFKLKCPGAPDTVRWHTGQCDAAGASINEWSTSSMVRASDGVDAHGGVSIVEAGESSAIRSKTGSWFHNSIRSEKRDSCAPLPRGAAASLSCAMPPRKRPALPPDEPSPSSKHQPEAHPSEPSKPSPDSEQPIISAAILAQLPPQERLAYKLIFEAGNKGMWMLDIRKKLLMGPNIATKVVRTLVTRRLLKEVSDVRHRSRKIFMATDFQPSAEITGGTWYHDGRLDTDAVTTARRCCQAQVERLGAATVQMIHHGILKDDPRAGYTIDKIRDIIKTMVLDKVLEEVKSTGTGEFRDVRAGTMCYRLVTGAPQGGMMEGIPCGVCPRIDECSPEGIISPSTCVYYKKWLQMDF

SEQ ID NO: 58873 - protein, 209 aa, Zea mays
  Coding DNA Sequence Number=SeqID_17094
  Homolog annotation: Hit_ID=Q8LGD5; Match level="QueryCoverage=27%, HitCoverage=29%, E-value=8e-08, Identity=52%"; Hit description =Protein MKS1
  Pfam annotation: Domain name=VQ; Domain location=51-81; Score=35.6; E_ value=1.7e-07; Accession=PF05678.4; Description=VQ motif
MAAASFDAAADVTRRGGTGRALGVHAASHKIGKPPPGAGHGQQERKPVIIYMVSPKVIHVDAHEFMPLVQRLTGPEAGRGDRKSRPSTSGVGGAGEAEPSEGARNKTRAAPPVRVKARALNRPAVSVTTTRRQQAAADASPPSGLMLFQDLSPLRGAALKGEHLPLVSPAWLHHVGDHFLSPAGAAAALGSPSPSFVDDIFGTLSSQQQ

SEQ ID NO: 58874 - protein, 117 aa, Zea mays
  Coding DNA Sequence Number=SeqID_17095
MEAKSHHQPNQGAGKGKGGEGVSREEAEGGARLGMREAEPRTALAGCTEMEGAGHGCWCAMDKEEQGRESGELDVEASTENVPGCVWCSFKGEALQALGRTWPDIGGRGWLPAGALD

SEQ ID NO: 58875 - protein, 138 aa, Zea mays
  Coding DNA Sequence Number=SeqID_17096
MGLRSAMLPTGILSNTYDALMLWGCMEDSATRIASQRAGRVHMGQPRQGGASCWGYDAMRAATAAWGKEDGLLHPWIGSGLCCGEEEQGGRWAEEMGAGSSAMGAGRRGEDWFCAQRRPSRRWGASWERAEADELLLA

SEQ ID NO: 58876 - protein, 517 aa, Zea mays
  Coding DNA Sequence Number=SeqID_17097
  Gene Ontology: Mol. function=nucleic acid binding; Cellular component= intracellular; Biological process=DNA integration
  Homolog annotation: Hit_ID=Q8H6I0; Match level="QueryCoverage=98%, HitCoverage=33%, E-value=0.0, Identity=66%"; Hit description =Putative gag-pol polyprotein
  Pfam annotation: Domain name=zf-CCHC; Domain location=338-355; Score =30.5; E_value=5.9e-06; Accession=PF00098.13; Description=Zinc knuckle
MSGDHAKKEMETGEKPTTSNEKALSGESRNKEKKKEKKKEKKTSSHKSHRSGDKLKKMRKVVYYETDTSSPSTSGSDAPSITSKRHERKKFSKIPLHYPRTSKHTPLLSVPLGKPPTFDGEDYARWSDLMKFHLTSLHKSIWNVVEFGAQVPSVGDEDYDEDEVAQIEHFNSQATTILLASLSREEYNKVQGLKSAKEVWDVLKTAHEGDELTKITKRETIEGELGRFRLRQGEEPQDMYNRLKTLVNQVRNLESKKWDDHEVVKGSRKINELDGPSTSEAQPVAFKATEEKEEESTPSRTPIDTSKLDNEEMALVIKSFRQILKQRRGKDYKPRSKKVCYKCGKPGHFIAKCPISSDSDRGDDKKGRRKEKKRYYKKKGGDAHVCREGDSDESSSDSSSDEDAANIAVTKGLLFPNVGHKCLMAKDGKKKKVKSKSSTRYESSSDENASDEEDNLRTLFANLNMQQKEKLNELISAIHEKDDLLDTQEDFLIKENKKHVKVKNAYALEVKNMKTNL

SEQ ID NO: 58877 - protein, 95 aa, Zea mays
  Coding DNA Sequence Number=SeqID_17098
MGKRAQRAWASWMADVEEKGAAPPALGRRSPLLAVLRFWTERRGDDVGGEREMRERWLVGGGGLWEEMAKRAAWPGSGTVKPDPSGTVRKPDQGV

SEQ ID NO: 58878 - protein, 289 aa, Zea mays
  Coding DNA Sequence Number=SeqID_17099
  Homolog annotation: Hit_ID=Q014P1; Match level="QueryCoverage=68%, HitCoverage=72%, E-value=1e-18, Identity=28%"; Hit description =Homology to unknown gene
  Subcellular localization annotation: CTP_CleavageSite=46; ConfidenceScore=5.24e-01
MATTAPLLSPQRACPTHLRRRLSPLHLVFPLDASARRLRLRRAPPPCSAKFGKFDASDAPAEAEEAGGATDGGLAQPVEEDDRSGSLHPQLAELLIPQLEFLNEEGAQAELWALSKIFLDTLVQETGQKVTAIFPDAGAAALLKHQWKDAQFNLGDRKPVGPEDEVAVMIIPDHQMLEAVERITSQLSDDPIRPLVMWNPRLVSGDVGVGFNVRNLRRNFLRQWKVFYDDPNRPNRYLLARELTSRPDATDIERIFGGADEQSEEAPSLMNNVMGVFSSVSRFMRVISK

SEQ ID NO: 58879 - protein, 329 aa, Zea mays
  Coding DNA Sequence Number=SeqID_17100
  Gene Ontology: Mol. function=sequence-specific DNA binding; Cellular component=nucleus; Biological process=regulation of transcription
  Homolog annotation: Hit_ID=Q6IEK8; Match level="QueryCoverage=81%, HitCoverage=50%, E-value=1e-32, Identity=37%"; Hit description=WRKY transcription factor 73
  Pfam annotation: Domain name=WRKY; Domain location=1-23; Score=-12.1; E_value=0.021; Accession=PF03106.6; Description=WRKY DNA -binding domain
  Subcellular localization annotation: CTP_CleavageSite=30; ConfidenceScore=5.36e-01
VQRCADDTSILITTYEGTHNHLLSASATAMASTTSAAASMLTSGSSSTSLGFFPAASPAAAHDASRHFFLPTGGAASVTSTPSYPTITLDLTSPAAATSQAFSLSNSRFSSGFGGPGGARYHHRPTSFSFSNSGPSALSAAAWPAATGGAGYLSYGSPAAASLFNGGGGAALMSSTNGRQGRQGGEVPALYQPQQKAAAASESAPAGVLTDTIAKVITSDPGFQTVLAAAITSYVGTQGGNKSSPSAGGEEGGSQLQLGLKWGQHLGLGPSPSSAGAACSSSALLARSSSTTAAAEQGSSGHRSSFLQPSLGLAGSHSASASPVENREH

SEQ ID NO: 58880 - protein, 135 aa, Zea mays
  Coding DNA Sequence Number=SeqID_17101
MVATRPLLLRSEDGTRLLLRSKCEREGVMERLQAGDEGQTIPGGRSGAQGRCAYAGGGPKGAGVRESEQVGLAPTTCWPSRPAAVAVASSLVTAWPALEEEAAARPTSRPVVAARPMPGRRRSRPHRREGWRLWG

SEQ ID NO: 58881 - protein, 376 aa, Zea mays
  Coding DNA Sequence Number=SeqID_17102
  Gene Ontology: Mol. function=sequence-specific DNA binding; Cellular component=nucleus; Biological process=regulation of transcription
  Homolog annotation: Hit_ID=Q6IEK8; Match level="QueryCoverage=63%, HitCoverage=40%, E-value=9e-59, Identity=56%"; Hit description=WRKY transcription factor 73
  Pfam annotation: Domain name=WRKY; Domain location=339-376; Score =47.4; E_value=4.9e-11; Accession=PF03106.6; Description=WRKY DNA -binding domain
MDDEAIATELRLDVMTKTKYNDDQKRMLELALLGKHSSGHPSPVKDVYALKYPARVGANSDGADSWHVGATSALRSDTSVSSILASCNLGANSDGVEASSPCLREKSEMDEASNQTSTNLKAHNKVDKDNLASTRAEMGEVREENKRLKTMLSRIVEDYRSLQLQFHDVLQKGEPMEKKLADHRPSTITPPTGIEESEFVSLSLGTGTGTHKKEEKSVIISAAEGKWREDYLMMGVKEEEGLSLGLSSSARKDDDGAANNTGKVQPDVTTLSPEASSEDAKDDDTTEAADRQWLPSNTQKKSRNVGATEPEDDDDVGPLLPQTKKTRVSVRARCDAPTMNDGCQWRKYGQKVAKGNPCPRAYYRCTVAAGCPVRKQ

SEQ ID NO: 58882 - protein, 141 aa, Zea mays
  Coding DNA Sequence Number=SeqID_17103
  Subcellular localization annotation: CTP_CleavageSite=52; ConfidenceScore=5.03e-01
MVVDPPLQPPRGIRVRGSTGAGDKDLSAPQRPPSRALPSCFPLPAAVRGEVSAASVGIGIRHRQCFAGRPVDFGGASRNRVEISGTRGATGQQGTPRRKHFSAAGRTTPGVDHVKTPLKIAQLGRGSAQLRGRSSSHYNRR

SEQ ID NO: 58883 - protein, 144 aa, Zea mays
  Coding DNA Sequence Number=SeqID_17104
  Subcellular localization annotation: CTP_CleavageSite=78; ConfidenceScore=5.03e-01
MDFGGASRNRVDISGTWGATGQQGIPRQKHFSAAGRTAPGVDHVKTPLKICRRFETGGSLSRRVSVAACPSPDGSSAWASAKGGRSEAVGDRRERWESRGLRVRPTPRSGALAVGGYKRPRGRGKRAAPRERLSRPRPRAANPL

SEQ ID NO: 58884 - protein, 45 aa, Zea mays
  Coding DNA Sequence Number=SeqID_17105
MAATKRTRDHGRWWWRSSGMCCARSVRELCRGALLGEGSFDIVKK

SEQ ID NO: 58885 - protein, 676 aa, Zea mays
  Coding DNA Sequence Number=SeqID_17106
  Gene Ontology: Mol. function=protein serine/threonine kinase activity; Cellular component=ubiquinol-cytochrome-c reductase complex; Biological process=protein amino acid phosphorylation
  Homolog annotation: Hit_ID=Q5N7S6; Match level="QueryCoverage=54%, HitCoverage=38%, E-value=1e-125, Identity=61%"; Hit description =Receptor serine/threonine kinase PR5K-like
  Pfam annotation: Domain name=Glyco_hydro_18; Domain location=27-293; Score=159.0; E_value=1.2e-44; Accession=PF00704.18; Description =Glycosyl hydrolases family 18
  Pfam annotation: Domain name=Pkinase; Domain location=373-658; Score =121.4; E_value=2.6e-33; Accession=PF00069.15; Description=Protein kinase domain
  Pfam annotation: Domain name=Pkinase_Tyr; Domain location=374-658; Score=62.1; E_value=2.8e-16; Accession=PF07714.7; Description =Protein tyrosine kinase
  Pfam module annotation: Pfam domain module=Glyco_hydro_18::Pkinase::Pk inase_Tyr; Domain location=27-293::373-658::374-658
MACNRRRKLLCACLLLACAAPAAAAAVNISVYWGQNSNEGSLGQTCSSGRYALVAMAFLSTFGSGQTPVLNLAGHCDPASGGCTALAADIAACQARGVRVLLSIGGGAGSYNLSSASDAESVATYLWDNFLGGTSSSRPLGDAVLDGIDMDIEISPSSHFDGLARNLTSLYGGDRRGRKYLLTAAPQCPYPDASLGAALATGLFDHVWVQFYNNPGCEYQQKDGDGVANLAASWKAWTQSLPSSASVFLGLPASPAAAGSGYVPPDDLVSRVLPAVSGSANYGGLMLWNRYYDNSTGYSARILSSNIIAGTAGVSGLCAIIALAALMWWYKRRYGMVIPWRRGVSGVESFLQKQGALLHPKGYTYSEVKRMTRSFAHKLGQGGYGAVYRGSMPDGREVAVKMLTGMLEGDGEEFMNEVASISRTSHVNIVTLVGYCLQGPKRALLYEYMPNGSLERYTFGSSSGEDALSWDRLFGIVVGVARGLEYLHTGCNTRIVHFDIKPHNILLDQDMCPKISDFGLAKLCGQKASRVSIAGARGTVGYIAPEVFSRSYEAVGSKADVYSYGMVVLEMVGARKNVHVSATDDGGNSSSSRYFPQWLYENLDQFCRPTTTSNGEIRGDDDDATEVLLVRKMVVVGLWCIQSKPDSRPSMGQVLEMLESNAADLQLPPKALCTAY

SEQ ID NO: 58886 - protein, 364 aa, Zea mays
  Coding DNA Sequence Number=SeqID_17107
  Gene Ontology: Mol. function=sugar porter activity; Cellular component=integral to membrane; Biological process=transport
  Homolog annotation: Hit_ID=Q941R4; Match level="QueryCoverage=85%, HitCoverage=93%, E-value=1e-93, Identity=59%"; Hit description=GDP -mannose transporter
  Pfam annotation: Domain name=TPT; Domain location=206-354; Score= -18.9; E_value=0.0071; Accession=PF03151.7; Description=Triose -phosphate Transporter family
  Pfam annotation: Domain name=UAA; Domain location=105-360; Score= -169.2; E_value=0.058; Accession=PF08449.2; Description=UAA transporter family
  Pfam module annotation: Pfam domain module=TPT::UAA; Domain location =206-354::105-360
MGSRVLHLDVPANSEAYLMRNVPGSVSSPPMNGEKGLFRNQNAGFTALASPVRREIGNRHQLLFKLTPSAMFLDNNGVSCSPDRRQGPSVLMTMTWKMNIVSVTIVSTLSLSGAVPTEPLTWNLIKVWLPVNIIFVGMLITSMFSLKYINVAMLTILKNVANVLTASGETYFFKKQHGTQVWVALMLMIISAVAGGITDLSFHAVGYIWQTLNCVLTAAYSLTLRHVMDSAKQVTKSGNLNELSMVLLNNVLSLPLGIILVLGLNEMEYLLQTSLLRMPEFWLVITASGVLGLGISFTSMWFLHQTSATTYSLVGSLNKIPLSIAGIVLFNVRTSVQNSLSILFGLLAGVFFARAKLRDNSPTL

SEQ ID NO: 58887 - protein, 164 aa, Zea mays
  Coding DNA Sequence Number=SeqID_17108
  Subcellular localization annotation: CTP_CleavageSite=72; ConfidenceScore=5.11e-01
MALSRFTQWLWPGSAAAPVAAHEHPNEGLTSSSFPDFPSGFREPDTVTFYTGRGAGGRRARPRRVRNRRRSRGEPRVDREYDMVIVPSDGGGCLSGSDSDDSDWSIGWLEPQAPELQTDGDPENCFAVLVPLLPPRPPRAAAREGTRAGFLGAGTLTQWLDSSG

SEQ ID NO: 58888 - protein, 135 aa, Zea mays
  Coding DNA Sequence Number=SeqID_17109
MVGSSLVVAGAGLALCARERAHRQREAWPEHDGIARSSESGSSTEDDRSLVRMISLFRRGQGLGSSLERLHVLSGKLSKGSDEVGGQWEWLAMEAGLQRRRRVTGRSSELRAGSGKLGGVRRSDREGARARWRAL

SEQ ID NO: 58889 - protein, 61 aa, Zea mays
  Coding DNA Sequence Number=SeqID_17110
MTVLADAGGSTRERNQWGAPDPCLFPLPRIPGWRIENCSSELLVHRGAAHHRGRETRCYDS

SEQ ID NO: 58890 - protein, 127 aa, Zea mays
  Coding DNA Sequence Number=SeqID_17111
MDLSTAARAYWRSIEGLGGSDELGVSSDEADSSDSSEEWSGNDGDNEGDGSSSGDDDKGDGSSSGGRKGDGGEGGGDRGSSDDNKGDGGDSSNDGGKGDDGNDGKGDGDDGSSDDSGGKATSIMPLV

SEQ ID NO: 58891 - protein, 151 aa, Zea mays
  Coding DNA Sequence Number=SeqID_17112
  Gene Ontology: Mol. function=nucleoside-triphosphatase activity; Cellular component=membrane; Biological process=microtubule cytoskeleton organization and biogenesis
  Homolog annotation: Hit_ID=Q9LSC3; Match level="QueryCoverage=97%, HitCoverage=20%, E-value=5e-53, Identity=69%"; Hit description =Genomic DNA, chromosome 3, P1 clone: MOJ10
  Pfam annotation: Domain name=Vps4_C; Domain location=95-147; Score= -0.7; E_value=0.0011; Accession=PF09336.1; Description=Vps4 C terminal oligomerisation domain
MEQMMAGATNRPQELDEAARRRLTKRLYIPLPSLETLVHHGCEEARAWIIRNLLEKDGLFMLSEEETSAICKLTEGYSGSDMKNLVKDASMGPLREALQTGVEIAKLSKEDMRPVMLKDFENAMREVRPSVSSSELGTYEEWNRQFGSLSI

SEQ ID NO: 58892 - protein, 283 aa, Zea mays
  Coding DNA Sequence Number=SeqID_17113
  Gene Ontology: Mol. function=nucleotide binding; Cellular component =membrane
  Homolog annotation: Hit_ID=Q2QS10; Match level="QueryCoverage=78%, HitCoverage=78%, E-value=6e-22, Identity=39%"; Hit description =Expressed protein
MAEPPLAAGCTTNWRREADERLRRLHSLLFGADAALEHGDATVAQALALRLLGFLDSQALAAGAGPEDAAFVAPIRTAASARLAAASRARASDSDRLFSPRCQQPSTELVTTSSPTLRSLPPALLCASFELARTDVGCVFANQGDNNVERIQRSKYFQALLQKSKANVSEQRNAKWKHTGFRSPIFEVANSPSSNDEADAPANEFTTAKRMMDAKNADIADNHTSAGEMKPGSLDHAVGHNAILNLRVGAGDGRLPLRGPRDKAHVLDRVGDVEHGEQVKVRY

SEQ ID NO: 58893 - protein, 302 aa, Zea mays
  Coding DNA Sequence Number=SeqID_17114
MSDAIVSTNELLALADEAERRCDFSVTATCLESTLCPPHTAALLSLTEAPATNTAPPHGHLLSTAPHTSTPPTPWPLPVPSSSTPGCDAPSSPRGGLASADSSSVGIHSNVGECGFHFPSSARSIVSPRADKRAPRTTPTPLTSLLRPLHGAWANLPSAAPLLPTPIDNNPYSYMPTPHFSVPSVLPHPRAWSAPMWSPLASTYFSPCSVATHYTAFGLSLPTPALSTSILRSTAVHVPPYHVCVSLYDGQLLRSTSVAFDRVMNPVLGVYIELFHPSASIQPQEDRHATGPFVSMMPRLSP

SEQ ID NO: 58894 - protein, 275 aa, Zea mays
  Coding DNA Sequence Number=SeqID_17115
  Homolog annotation: Hit_ID=Q6YUW7; Match level="QueryCoverage=18%, HitCoverage=7%, E-value=9e-10, Identity=54%"; Hit description =Chromosome structural maintenance protein-like
MTVFCDQPDWLQVWAEIERHDSLNMLQAPIDLEKNQGTMLEHNSIDYKSPVRKRETSRPHLVYCGIRRGSTRRRSIWRGNIGGAPATATGNLGTPRLLGLWSGLPLKANSRCHRKWSESSAAGAVLAVVAIAAYQAHVGGAVRSTHDAASEQHVAEMSVVPHGCRDVVRHRTGACGGRATFGRDAGRAVDGIRGGQRLNMSRRVGRRRSESVVVPQGEVGQQGRRQGREVWEGVSNSRRVKDEETLDAPCGAAPFDGEAVGGELFGTVISLTLGF

SEQ ID NO: 58895 - protein, 73 aa, Zea mays
  Coding DNA Sequence Number=SeqID_17116
MESGRRNLWHVRRQGIYGADGAPGSRADKEVKKEGGDAGGRAGRSLADAPAATDAFGERRHTATMAPGPVIYV

SEQ ID NO: 58896 - protein, 139 aa, Zea mays
  Coding DNA Sequence Number=SeqID_17117
  Homolog annotation: Hit_ID=Q10NE9; Match level="QueryCoverage=24%, HitCoverage=22%, E-value=2e-07, Identity=82%"; Hit description =Expressed protein
  Subcellular localization annotation: CTP_CleavageSite=5; ConfidenceScore=5.02e-01
MAASRRAMVPSRRAGSSARTPSRGRWLLLLLVAKESRERMLGVEEVVDVREEEQPGGWETGVVAAREGRGQLREIGLTTGSRTLLTGCYTLEDVDAAMRVAADDDSITATVVSVLLTLAFISLSILTLGVIYLSVQDFL

SEQ ID NO: 58897 - protein, 245 aa, Zea mays
  Coding DNA Sequence Number=SeqID_17118
  Subcellular localization annotation: CTP_CleavageSite=68; ConfidenceScore=5.35e-01
MSVARSAFQPRRAHGSTGSAHPVRGPTRQQATRLFLFTHVHDFFNPKHSFPALLGNQQQQQPAAPARRAGARPSTAARHHGTAARGHGTAADTAAHGLPCAAAYVAILLGLYPARRLAASQRDSRGLAPSPLPSPLLRACPACPGVRPRLHSPPQCAPSGPWLTSSRRGRPKGHPRRAPPFVLVLMCAVENEKKKQSSCGDEDDGYDYDYGNGKGYSFRLERVKKKENGVEADVREFQDFDEFED

SEQ ID NO: 58898 - protein, 302 aa, Zea mays
  Coding DNA Sequence Number=SeqID_17119
  Homolog annotation: Hit_ID=Q6QP51; Match level="QueryCoverage=67%, HitCoverage=91%, E-value=1e-24, Identity=41%"; Hit description =Putative growth-regulating factor 1
MKGVAAERTRDRKGDISKGILLREGSGPRAHLLIRGSKAGPSEGFDSRPEHSGFRLITDQRFEGWPLGRVRQPPQSTRAPRPLLIRGSKAGPSKGSTAAPEHAERGMTLEADGRNSGQGFVYSRDAISPRSSPASGGNSSPRRIHASPEGLLSNGRSLDSPEAQLEQASYLRRHRKLRLARPWASASGEVSASPDPMARPPPRPRKVVSASPDPRARPQPQPREESRPRPTPASALGGVSASPDLGLGPTTPQGPLTEARRRQQGPDSPDSYASTGLKRSSDGHDTMYTGPSTSPTATLACT

SEQ ID NO: 58899 - protein, 282 aa, Zea mays
  Coding DNA Sequence Number=SeqID_17120
  Gene Ontology: Cellular component=integral to membrane; Biological process=defense response to bacterium
  Homolog annotation: Hit_ID=Q10LI8; Match level="QueryCoverage=88%, HitCoverage=82%, E-value=1e-69, Identity=58%"; Hit description =MtN3/saliva family protein, expressed
  Pfam annotation: Domain name=MtN3_slv; Domain location=10-96; Score =97.7; E_value=3.5e-26; Accession=PF03083.6; Description=MtN3saliva family
  Pfam annotation: Domain name=MtN3_slv; Domain location=131-217; Score= 109.9; E_value=7.2e-30; Accession=PF03083.6; Description=MtN3saliva family
  Pfam annotation: Domain name=Rhomboid; Domain location=49-214; Score=- 35.6; E_value=0.07; Accession=PF01694.12; Description=Rhomboid family
  Pfam module annotation: Pfam domain module=MtN3_slv::MtN3 _slv::Rhomboid; Domain location=10-96::131-217::49-214
MITVGHPVAFAVGILGNILSFLVILAPVPTFYRVYAKKSTESFQSVPYVVALLSATLWLYYALLSTDLLLLSINTVACVAESVYLAVYLAYAPGPAKAFTLKLLCAINMGLFGAMVAFLQFYVVDTQRRVSIAGGVGAAFALAVFVAPLAIIRRVMRTKSVEFMPFWLSFFLTVSAVVWFFYGLLIKDFFVAMPNVLGLLFGLAQMVLFFVYRNRNPKKNGAVSEMQQAAVQADAEKERRSHANADGEADVRTVIVDIMPPPPAMMVMMTAAHQTPPAVEVV

SEQ ID NO: 58900 - protein, 33 aa, Zea mays
  Coding DNA Sequence Number=SeqID_17121
MDGAHERMKASHTITKSEYLQNVPQQAEYTILS

SEQ ID NO: 58901 - protein, 113 aa, Zea mays
  Coding DNA Sequence Number=SeqID_17122
MAGTRATSGLREQGTGTKGRGEGERGGTHRSAARSAASRGGGASGRDEREIVRGRGHYQASWAQLPPPPPLAPNLIHNQQPKGHRQAQQQRDAREEFEARTVNSTVPESRHIY

SEQ ID NO: 58902 - protein, 105 aa, Zea mays
  Coding DNA Sequence Number=SeqID_17123
MESHDLWADRESRLMDKVTMRIMVLVLTLVMIITEYVDVYSPLLYTPNPPSPGCQHCNPCSGEDEAVEGDFQEFQDYDEFWAWVSGNPQSAACEGHVYLRFIFAL

SEQ ID NO: 58903 - protein, 115 aa, Zea mays
  Coding DNA Sequence Number=SeqID_17124
MIITERTEGRVESPPLPPALSNPVGKTHCNGSDIYLKTASTTRMTSATMRNRMPDVIEATMIEDFYHGSNDSAFVRAILQKTPSTSKQQFCEADIYITANERAQNLIRNTKHAPQ

SEQ ID NO: 58904 - protein, 160 aa, Zea mays
  Coding DNA Sequence Number=SeqID_17125
MSVSSTLPWIKRMSRKKELGVVLHTPSISFEGGVVRMVVGGAFGVAPVLEAHASLRRVIRVHARVGNVDNRVHHARGPTRKILIGAVRGNPAAVFGTTREDLFPDGSTMRCKIPPRSAMQELDLKWKSSLALKDKSLQEASSSECKPLPHDEGTRDEDRI

SEQ ID NO: 58905 - protein, 182 aa, Zea mays
  Coding DNA Sequence Number=SeqID_17126
  Homolog annotation: Hit_ID=UPI0000584B47; Match level="QueryCoverage =68%, HitCoverage=25%, E-value=6e-08, Identity=33%"; Hit description =PREDICTED: similar to spinal cord injury and regeneration related protein 1
MTPRDLHEAVAVALCRGLKELRLVGFPASVQAYHMEHILCDILHYNGIRKVELQSYHFPDTHVCTVARSCQGALQELILDECPNVLGNFVVCLRESCPNLTKLTLNRIGISDVQIRILMLVGFHQLEEFNLTWCWCPLITDRLLAILHASTLPKLKRVNLSDCPNVTQESVDYHQHRWEVEY

SEQ ID NO: 58906 - protein, 301 aa, Zea mays
  Coding DNA Sequence Number=SeqID_17127
  Gene Ontology: Mol. function=protein binding; Cellular component =nucleus; Biological process=ethylene mediated signaling pathway
  Homolog annotation: Hit_ID=Q708Y0; Match level="QueryCoverage=97%, HitCoverage=51%, E-value=5e-17, Identity=26%"; Hit description=F-box protein
MRQSSCLRTSYEACKKVSAGSSMYQSRTLPQDLINELPEACIAEIFRHVGNPEDRQSCACVCWRRANILVPQRPDFWGPFSVHQGVHPCLHMSDVDDVKLAAAVVNICARGVITDLGLCCAPCGTVVAGVPRLTDSAIHFVSSACGNLKSVCLVDCLSLTDKAARIIASNCPALENFVMLQSSISDDGLPQVAKQCRNLKFLHIEGCLSITEASLRALMQYAKRLESLTLGSCPQIGQDAILSLLMNQPYLDKLELKGMMAGESHMNVARQSSVLHHLCLFRQLSTLILVKCSGLWDLGNA

SEQ ID NO: 58907 - protein, 115 aa, Zea mays
  Coding DNA Sequence Number=SeqID_17128
MAMRLAAAATFVRRLAPARPPVRILAAASTAEAEAVTCGRGDKKTKRGKRFKGSFGNARPKREKKIERIKDRVEFEASNEVRLAVYFSFVQFQASNERQDLYQFFVDSIVQPHWH

SEQ ID NO: 58908 - protein, 759 aa, Zea mays
  Coding DNA Sequence Number=SeqID_17129
  Gene Ontology: Mol. function=microtubule motor activity; Cellular component=microtubule associated complex; Biological process =microtubule-based movement
  Homolog annotation: Hit_ID=Q6Z9D2; Match level="QueryCoverage=98%, HitCoverage=96%, E-value=1e-176, Identity=49%"; Hit description =Putative kinesin heavy chain
  Pfam annotation: Domain name=Kinesin; Domain location=12-227; Score =231.6; E_value=1.7e-66; Accession=PF00225.13; Description=Kinesin motor domain
MASEERILVSVRLRPVNAREAERGDGSDWECAGPTTLMFHGNIPERAMFPASYTYASIFAYGQTSSGKTYTMVGITERSMADIYDYIDKHPEREFVLKFSAMEIYNEAVRDLLRPDATQLRLLDDPENFVDLAGSERASQTQSAGVRLKEGSHINRSLLTLGKVIRQLSKGRNGHIPYRDSKLTRILQSSLGGNARTAIICTMSPAHSHIEQSRNTLLFANCAKNVVTDAKVNVVMSDKVLLKHLQREIARLENELKFPRPTSCSNYAEALREKDELIKQDQSNRSSESLPCSASEDTLSFDTYSDVYEEQDDLGSKGFDVSHVYNDYHHDVYHQKVDEHPMSSLHQPRNHISNRTQMYQPNRETSPEVPKEHCKEVQCIKINEFRRSRSDEEKHGENITYTSEGAIKLYTCDSEPSSDTEKTNNDESLVLKRCVISSRDSVLTRSRSCRASFMVIPNSWFDDSADMRMTPPGDILKYPHRRLEKVRRSMYSENGHCQNDLTLDCPVVSGKVASDMVIDKNTCNEEDGYANNKFSCITKVKEKQEDYCTSQLEGNQDNVTAEILDMKHAKNIDKDIFVANIDSPSRWPINFEKKQKEIIELWHECNVSIVHRTYFFLLFKGVKADNIYLEVEHRRLSFIHSSFIAGCEPNVTVTSSLRNLRHERDMLYKQMLRRLHLLERESLYSKWGIDLNSKQRRLQLSRRIWTQTDMEHVRESAALVIKLVEHLEKGQAIKEMFGLSFTLNQRAIQRPFSWVSANS

SEQ ID NO: 58909 - protein, 192 aa, Zea mays
  Coding DNA Sequence Number=SeqID_17130
MVNKYVGGGGLFQRRCQCRGWGGSSWKGEGKRGRHGEREGRKGGDGDRVDISVLRASRWRKNSTTLALEMLSGSDTCYRHLADNRACRPIGVWPWPASVLASWLATTTLLHAERRHRPCRRGRCPCPPWGGEQWRRRDTEPPFPTQKLLKRMEERQLAEEVRTRPPSSSPRGEVWRECETGRGEGAHAGEAE

SEQ ID NO: 58910 - protein, 132 aa, Zea mays
  Coding DNA Sequence Number=SeqID_17131
MAPSPIELEGGEVGWLSSGVEEQGARADPFIGGQEGEGREGTASADELAMMAGMEQTATGWLGQARGEGTARWWWLGVFIAPTTKPTVGVGLLSMGASDSPLCQGTVLSTVSLIDVAPLGALDSLVAHQTVR

SEQ ID NO: 58911 - protein, 79 aa, Zea mays
  Coding DNA Sequence Number=SeqID_17132
MAAPLASCPPWRRRIWSPSRLVAGVVLVGWWRCSCAVAEEVCRVRVGGKVRRGHGSRQSWAVAHGAVVILAMAWYVGLE

SEQ ID NO: 58912 - protein, 305 aa, Zea mays
  Coding DNA Sequence Number=SeqID_17133
  Gene Ontology: Mol. function=calcium ion binding; Cellular component =membrane; Biological process=homophilic cell adhesion
  Homolog annotation: Hit_ID=Q3E0G9; Match level="QueryCoverage=80%, HitCoverage=25%, E-value=4e-19, Identity=37%"; Hit description=Ig -like, group 1
MGKVMGQTQMLFFRHAGKTLSIPPPAGGLTAAIVVVARRRKEYHVVAAVEGHELETPETEQRPGLERLLETTHLELDGKLFVNTQQAPTWRANYRRFDPGGSLDRRPKVERGGGSSEVEAESEPWGRARRRPSSGVEAESEPWGRARRRPSSGVEVESEPWGRARRRPSFGVEAESEPWGRARRRPSSGVEAESELWGRARRRPSSWVEVESEPWGRARRRPSSGVEVESEPWGRARRSFLWRPRLDLAVVSLTRAGGTTVGVVQAALFSCQLCADGGYQSSLGVLGVPLIMVLDNEVRGSRAVA

SEQ ID NO: 58913 - protein, 143 aa, Zea mays
  Coding DNA Sequence Number=SeqID_17134
  Homolog annotation: Hit_ID=Q6QP51; Match level="QueryCoverage=34%, HitCoverage=22%, E-value=7e-15, Identity=77%"; Hit description =Putative growth-regulating factor 1
MGMHPFDFNASSMESQAHTSCNRGAGYYVRKTVAPLVPAPRLLDCGTGAAIQGNPTRGPAVPAKHAGHGDRERGYSERDPSSRRKWAPSPPTDQRFEGWPLRRFRQPPQSTRAPRPLLVRGSKAGPSEGFDSRLRLLGLRAHY

SEQ ID NO: 58914 - protein, 430 aa, Zea mays
  Coding DNA Sequence Number=SeqID_17135
  Gene Ontology: Mol. function=oxidoreductase activity; Biological process=electron transport
  Homolog annotation: Hit_ID=Q10RL6; Match level="QueryCoverage=83%, HitCoverage=89%, E-value=3e-63, Identity=39%"; Hit description=FAD binding domain containing protein, expressed
  Pfam annotation: Domain name=DAO; Domain location=18-355; Score=-6.7; E_value=1.3e-05; Accession=PF01266.14; Description=FAD dependent oxidoreductase
  Pfam annotation: Domain name=FAD_binding_3; Domain location=16-366; Score=1.0; E_value=2.6e-10; Accession=PF01494.9; Description=FAD binding domain
  Pfam annotation: Domain name=Lycopene_cycl; Domain location=18-424; Score=-184.9; E_value=0.0067; Accession=PF05834.3; Description =Lycopene cyclase protein
  Pfam annotation: Domain name=Pyr_redox_2; Domain location=18-256; Score=-40.6; E_value=0.089; Accession=PF07992.4; Description =Pyridine nucleotide-disulphide oxidore
  Pfam module annotation: Pfam domain module=DAO::FAD_binding _3::Lycopene_cycl::Pyr_redox_2; Domain location=18-355::16-366::18 -424::18-256
MASGGGNAAADAKHVDAEVVIVGGGIAGLATALALRRAGAARRVLVLERHAGHRATGAALTIFPNGWFALRALGVAHKLASRYDAYETSRVTNLETGATQVFRFAGNKNKGEEVRVRALDRKALLEALAEELPPGTVRFSSKVVSIDTERAAGDSSVTVVLGLDDGTVIRAKVLIGCDGVHSVVARWLGLSEPASSGRSAVRGLSVFPGGHGVKRELRQFLSEGLRAGMVPISDTDIYWFLVNNTKEAAGDPVKTLLEVTDNLARHMPAEYLDVVRHSDHGNLSWAPLLYRNPVSVLLGPAARGPVTVAGDAFHPMTPDMAQGGCSALEDAVVLARALSREATPAEGVSAYVAQRRWRAAWLVAGAYLSGWIQQGGTNVGGVRGRLVKVFRDWIFYRFVFPRLADTMWFDCGDLTPPPPTAAVGKSHHIE

SEQ ID NO: 58915 - protein, 115 aa, Zea mays
  Coding DNA Sequence Number=SeqID_17136
MDTTGHGRRKSELGTGGSSAGEQGAPEKVNGELRGRRELEDGAEGAVLGQQWRARRVRSTGSAHHGSFELSELEQRRCPCARHGRSRGGTRDAATEEAKEKQLRAAVKWKTMESA

SEQ ID NO: 58916 - protein, 339 aa, Zea mays
  Coding DNA Sequence Number=SeqID_17137
  Homolog annotation: Hit_ID=Q6QP54; Match level="QueryCoverage=43%, HitCoverage=44%, E-value=1e-30, Identity=75%"; Hit description =Putative kinase
  Subcellular localization annotation: CTP_CleavageSite=47; ConfidenceScore=5.25e-01
MQAACNHAKWARPFDSNASSMEAQAHTSCNRRAGKRSKRRFAFAIMTASKKGPGKGDSPKRILLREGNRPRASLLIRGSKAGPSEGFNGRLRALGFCAHYWSEVRWPAPRKGSTAASGHSGSAPTTDQGAACAALTAEPLNRVRLAAAKSGLRRHRKLRLARPQGSDSGSAPEDDELRFARPQGSDSGSAPEDDELRSARPQGSDSGSAPEDDELRFARPQGSDLGSAPEDDELRFARPQGSDSGSAPKDDELRFARPQGSDSALASADGLHLVRPEGSHSTSTLEDRLDLDLGGASTSPNLGHGPTTSTGGAIITLPRGDSGYGEQERRPIWLTPLYE

SEQ ID NO: 58917 - protein, 85 aa, Zea mays
  Coding DNA Sequence Number=SeqID_17138
  Subcellular localization annotation: CTP_CleavageSite=31; ConfidenceScore=5.21e-01
MSVVVIMFMAALLLLLLATVESSSSSSAASSAMASSSSDQLGGLVALEAAGRKLLQIDLCGGRFCTIVDDCCITNPRCIANACTA

SEQ ID NO: 58918 - protein, 942 aa, Zea mays
  Coding DNA Sequence Number=SeqID_17139
  Gene Ontology: Mol. function=nucleoside-triphosphatase activity; Cellular component=membrane; Biological process=defense response
  Homolog annotation: Hit_ID=Q2L3E2; Match level="QueryCoverage=98%, HitCoverage=99%, E-value=1e-158, Identity=39%"; Hit description =Nucleotide binding site/leucine rich repeat (NBS/LRR) kinase
  Pfam annotation: Domain name=NB-ARC; Domain location=154-509; Score =207.0; E_value=4.4e-59; Accession=PF00931.13; Description=NB-ARC domain
MAQQAVFAVLERGGSIAVDEAVYLLGVSEKLESAKKQLLLMQAFLMDLDEKMLKGNFMARHLASEVREIAYEVEDIIDTANILMRRNGPKTSVRGAMSKYACFPIYLTRLHKLGSRIDSTEERMKKLFGDFEKFNIAANAIAEEPRRYITEDDDIRHRRLVHPNSGDQVGVIGFDEQIKQIEYDLLDTKNRHLTVVSIVGPGGAGKSTMAKKVYSLPAVKGHFKVHCWLTVSQRAVATHDFLKEVVKMVVPSHLMKVMVLRVMGDVKVKKVDNARKMMTEKEEKKIWEDQKAKELEEAKELDKLEEHEVKKLLHEFALSQRYLIVLDDIWSKDAWDAIKHAFPNQKNGSRIILTTRNVDVAKLPGARKKIYRPKLLNEDESTQLLLTTALPEYILDGGQNLDELKELGKELAIKCGGLPLALIVLGGYLSRNLDVGEWKRLLTNSMDWHDLITSDRVIGAILDLSYYDMPSHLRSCFMYTTAFPEDSPIDVRVLAMLWIAEGFIPLVRGQTREKVALKYVAELVQRCMIQAEGWTNSGMIKVVKVHDILREWGFGRAQREGFMKDCHSAEDIEVAYSGEEMMKAYRVVLHSSLSLERGVGTTTRKLRTLLDFNNHTSVQVPKSFQGLRVLHLNCSGEVSLPKDIHQMRYLRYLGLGGNCSYDLPSNIGGLLSLETLYCTASIDHIPASLWRNRTLRQVHIPYARSLSSPQIGSQSSKVLVILVDCGSSTHMDDAKRIVEKTRRQVLRNKNLDLSFCLGVEYGKYGMEVIGRCNTGVQFPIDLLNFDETHDYWELKICCANLLSNDHKILELGRIKNLKVLEIGEQSYTGKVMVFPSGSFMTLERLVLYDLAVEKWKIECGSMICLRVLTLCKCPKLVHLPEELLRLPKLRSLALIAMPLGCYQKGEVPQGVKISESDDEKVFQHLPIWRWLHLSAPPAFDEY

SEQ ID NO: 58919 - protein, 107 aa, Zea mays
  Coding DNA Sequence Number=SeqID_17140
MEYSAKTSLPLYTINIIYPFAGAKGSTQTNKKNKLGFKRKEQKGNRSVPWSGAPDCPVKYQITNAPSALTEGKSTSVTHRQAQDAAYEKLQLCPLHLLLAYRKIYED

SEQ ID NO: 58920 - protein, 66 aa, Zea mays
  Coding DNA Sequence Number=SeqID_17141
MAVGALQKGAWVAVVRYKGGVGRWQCAWRRARVRGARVSGGVNDPDVCGFKEKTFLKMKENTQAQQ

SEQ ID NO: 58921 - protein, 203 aa, Zea mays
  Coding DNA Sequence Number=SeqID_17142
  Gene Ontology: Mol. function=ubiquitin-protein ligase activity; Cellular component=ubiquitin ligase complex; Biological process =protein ubiquitination
  Homolog annotation: Hit_ID=Q2QU07; Match level="QueryCoverage=90%, HitCoverage=22%, E-value=1e-83, Identity=89%"; Hit description =Armadillo/beta-catenin repeat family protein, putative, expressed
MDNWSTIALTKNLVLHDRSSPGMQLPMAAYLGELVLSNDVKVLVAQKAGSTLVNIMKKGNREAREAALKALNQISSYDVSAKILIEAGILPPLITDLFTVGSNQLPMRLKEVSATILANVVASGARFESIPLDHNRQTLVSEDIVHNLLHLISNTGPAIECKLLQVFVGLTDSSTSVQNIVDAIKSSGAIVSLIQFVEAPQRE

SEQ ID NO: 58922 - protein, 142 aa, Zea mays
  Coding DNA Sequence Number=SeqID_17143
  Gene Ontology: Mol. function=kinase activity; Cellular component =ornithine carbamoyltransferase complex; Biological process=amino acid metabolic process
  Homolog annotation: Hit_ID=Q6QP54; Match level="QueryCoverage=99%, HitCoverage=37%, E-value=2e-36, Identity=75%"; Hit description =Putative kinase
MAPPVDVAGRHPRLGDVEAPPKPRSSLSSVAKVESEPLGRVRRRPSAEAGAESEPWGRAKRSLSSSGAEPKSEPWVGRSGDRRLMLGRSPSPGVGRSRVRRLLGPSPSPSPGSGGAEFAVFRGLAQVRALGRPEQSSPSSGA

SEQ ID NO: 58923 - protein, 425 aa, Zea mays
  Coding DNA Sequence Number=SeqID_17144
  Gene Ontology: Mol. function=ubiquitin-protein ligase activity; Cellular component=ubiquitin ligase complex; Biological process =protein ubiquitination
  Homolog annotation: Hit_ID=Q2QU07; Match level="QueryCoverage=60%, HitCoverage=33%, E-value=1e-101, Identity=73%"; Hit description =Armadillo/beta-catenin repeat family protein, putative, expressed
  Pfam annotation: Domain name=U-box; Domain location=173-252; Score =45.9; E_value=1.4e-10; Accession=PF04564.6; Description=U-box domain
MDYIHEARKINPIIFEAKETSFENGSTNLNHTRDVIRNSLGKGSKQGIGFPPFPVGHSTRRRSGRAAPAVTAARLATLPVPEAACGDRDRLLVVNSRRRTEFKRRIPSSGPVSSPRRPRLLRLAAVLDARRSNTGSAQQPQGMVASVSLVMAEVQDGHYDSMSQATDSLRVEPIYESFLCPLTKQVMRDPVSIDSGVTFERNAILNYFNECLSSGRRLVCPVTKMELSNTELNPSIALRNTIDEWMNRNEAAKLDVARKSLTSDSTESDILQALQYVDEICQRSRSNRQVVRRDGLIIMIADLLKNSSTKVEIAAGDNIRTIVKFLNHGQTQEKEQAVSLLFELSENKALSERIGSVSGAILILVGLSSSKVENLLIVDRAEKTLENLESCEKNVRQMAENGRLQPLLRLLLDVRSVSLFHQVHL

SEQ ID NO: 58924 - protein, 125 aa, Zea mays
  Coding DNA Sequence Number=SeqID_17145
MTPRRRAPDQRPDASNSSTKRYGEGYRRQRSPLYPTRAAKGAEIGTEARGRRAILFRVRGVEDTSHTGTHYAVSFFGRVRVCKEPVARARVVSEAMTRHTSDYREGKVTGHQGPFVGGRSEHGRE

SEQ ID NO: 58925 - protein, 233 aa, Zea mays
  Coding DNA Sequence Number=SeqID_17146
  Pfam annotation: Domain name=zf-CCHC; Domain location=80-97; Score =22.0; E_value=0.00024; Accession=PF00098.13; Description=Zinc knuckle
MGLLNKKKDLALKANQEKKGKTEILVKEESSSDDDLDVNIALMVKKTTKMLNKLNREGIKFYSRNKKFFFSSKRKPISEMDCYNYGELGHLAHQCRKPNKNKFKGKKYDESENEKKEKKFFKKKESKQKRFHKRKGGKAYIVGDWLTDIESISDSSSSGEDDEKVTAVAVDFSSPPQSPSSTTHLCLMAKDERKVQNDVASEVDCGSDSDDEYASPTYDELADLLKEYTLKGN

SEQ ID NO: 58926 - protein, 195 aa, Zea mays
  Coding DNA Sequence Number=SeqID_17147
  Gene Ontology: Mol. function=metalloendopeptidase activity; Biological process=proteolysis
  Homolog annotation: Hit_ID=Q10LS9; Match level="QueryCoverage=79%, HitCoverage=15%, E-value=6e-33, Identity=52%"; Hit description =Insulinase containing protein, expressed
MAAAVSRDDELVIKSPNDKRSYRLLRLGNGLRALLVHDPEIYADGYPPQTSKPCEDEEMEEVDEEDEDGDDDSEEYSDEEGEDDDEEDGEDDEEEDEGEPKRRKEKVGAEPIVKKAAAAMCVGMGSFADPEKAQGLAHFLEHMLFMGSTEFPDENEFCHCGTVDVIHVHVGRPGPARHRPTKARPTKARPTKAHI

SEQ ID NO: 58927 - protein, 268 aa, Zea mays
  Coding DNA Sequence Number=SeqID_17148
  Gene Ontology: Mol. function=metalloendopeptidase activity; Cellular component=cell surface; Biological process=proteolysis
  Homolog annotation: Hit_ID=Q10LS9; Match level="QueryCoverage=90%, HitCoverage=24%, E-value=1e-114, Identity=85%"; Hit description =Insulinase containing protein, expressed
  Pfam annotation: Domain name=Peptidase_M16_C; Domain location=90-262; Score=33.6; E_value=7e-07; Accession=PF05193.11; Description =Peptidase M16 inactive domain
MAVHLMLSLKPSTHATILRFSQFFVSPLVKAEAMDREILAVDSEFNQVLQSDTCRLYQLQSHTCSQGHPLNRFTWGNKKSLVDAMGSGINLREEILEMYMRNYHGGAMRLVIIGGEPLDILEGWTMELFSKVKTGPLLDIGPKTDIPFWKPGKLYKLEAVRDLHSLFLSWTLPCLHKEYMKKPEDYLAHLLGHEGKGSLLYFLKAKGWASSLSAGVGSGGSQRSSYAYIFEMSICLTDSGLKNGARGNSQAGIRLENKIEMSWDKARE

SEQ ID NO: 58928 - protein, 607 aa, Zea mays
  Coding DNA Sequence Number=SeqID_17149
  Gene Ontology: Mol. function=metalloendopeptidase activity; Cellular component=extracellular space; Biological process=proteolysis
  Homolog annotation: Hit_ID=Q10LS9; Match level="QueryCoverage=86%, HitCoverage=51%, E-value=0.0, Identity=84%"; Hit description =Insulinase containing protein, expressed
  Pfam annotation: Domain name=Peptidase_M16_C; Domain location=320 -506; Score=44.2; E_value=4.5e-10; Accession=PF05193.11; Description =Peptidase M16 inactive domain
MGLSWPSSEVFEVIGAVYQYIKLLKQSEPQEWIFKELQDIGYMEFRFAEEQPPDDYVVDLAEYIFEDWDSELVKHALSFFNPDNMRVDVLSKSFDKQSQAIQCEPWFGSHYIEEDIPSSLIESWKNPVQVDDNLHLPRKNEFIPGDFTLRNANSPGSSSDDNPRCIVDEPFIKLWYKMDMTFNVPRANTYFLIYVKDGYSSLENSVLIDLFANLLKDELNEVLYQAYVAKLETSTSVVASKLEIKLYGYNDKLPILLSNILSTVRSFSPKTDRFEVIKEDLERAYKNTNMKPMSHSTYLRLQVLREIFWDVDKKLELLMKLTFTDLVAFVPKILSQLHIEGLCHGNLSEDETINISKIFLNTLSAQTLPEEARHEERVICIPNGANLVRSVRVKNDLEENSVVEVYFPIEQDVGKEATRLRAITDLFSNIIEEPCFDQLRTKEQLGYTVDSSPRMTYRMLAYCFRVMSSKYSPIYLQSRIDNFIDGLSALLDELNEETFEHHRSGLIADKLEKEPSLSYQTSDYWSQIADKRCPGKLRRTSRMIEVVYTRAYVARVLMMWQADTYVVHATIGHVASRGTMITRRWVQGGYSCTCSVEYALHVFSLIG

SEQ ID NO: 58929 - protein, 248 aa, Zea mays
  Coding DNA Sequence Number=SeqID_17150
MGQRTLAFTKLLLLRVFSCNSLRLHERPDIYASANIHPTFLKCNTFNVYMSNPVDRLTGSTRRFSLRSGHGRGLGWELITPEKGRTRQRPRAVTPVARPRPSNEGAGQLANTRRHESTTATAQRAGKSGVGGDPISDSRWHAKQLGVGRVCRARAETRTAAPQATPGEEREEVGESSPRRPTGTRRGAAARAGCADRGLRRTAQQGGAIPSEVKAKKLDDGCGIDWFWKRRARLLHGKFAQAVGEDIQ

SEQ ID NO: 58930 - protein, 172 aa, Zea mays
  Coding DNA Sequence Number=SeqID_17151
  Gene Ontology: Cellular component=endoplasmic reticulum
  Homolog annotation: Hit_ID=Q10LS6; Match level="QueryCoverage=80%, HitCoverage=60%, E-value=1e-64, Identity=86%"; Hit description =Reticulon family protein, putative, expressed
  Pfam annotation: Domain name=Reticulon; Domain location=13-170; Score= 54.3; E_value=4.1e-13; Accession=PF02453.8; Description=Reticulon
MTRMGWGESGPSNLEQSLRIGGRHWWPATNKYILQFIRVKIAGLLDRQPRPLPELVLSEEMVSNAAASFRVKVNSMLMIAHDITLGKDFRLFFQVVIVLWLLSVIGNFCSSITLAYIGTVALVTMPALYNKYQRPVDRYAGMVYRNISRHYKIVDENVISRLPRRFIRDKED

SEQ ID NO: 58931 - protein, 253 aa, Zea mays
  Coding DNA Sequence Number=SeqID_17152
  Gene Ontology: Mol. function=dopamine beta-monooxygenase activity; Cellular component=membrane; Biological process=histidine catabolic process
  Homolog annotation: Hit_ID=Q93FQ9; Match level="QueryCoverage=58%, HitCoverage=55%, E-value=3e-18, Identity=36%"; Hit description=Cell surface mucin-like protein
MGRGEDAGGGGDACHTLQRLTGAGVRNCDQCGHKCGAGGAGRRASWMPGAVAIADLRSGAGLAGLARGSSASPDPRARTQPRLRKTVSASPDPRARTQPQLRKTVATSPDPRARTQPRLRKTVSASPDPRARTPPRPRKTVSASPDPRARTQPRLRKTVSASPDPKSQTQPRLRKTVSALPDPRARTPPRPRKTVSASPDPRARTQPRLRKTVSVSPGPRARTQPRPRRSHHLARPRARTDHVTGGHHYPTPS

SEQ ID NO: 58932 - protein, 116 aa, Zea mays
  Coding DNA Sequence Number=SeqID_17153
MEAGPLALANHMDLYTREAFTEFPYSLLLHQDMVPTRMGLLSSNLYWISIKLKEGPHDDRGGNGDNSHDSNNDDEPMEEDDEQEAHEEDSRDGYFHSQLKTWLKRAFGPNKWAIEY

SEQ ID NO: 58933 - protein, 105 aa, Zea mays
  Coding DNA Sequence Number=SeqID_17154
MAPPCDEVGPSPGLGEAELPMAPEARLGRCQPHSVEWHSSRSDAGGAVFLSGWIRCQATFALNAPATRSVGVAIRPMLLLGEDWASGEPKLCADGGYQLRLGVLG

SEQ ID NO: 58934 - protein, 507 aa, Zea mays
  Coding DNA Sequence Number=SeqID_17155
  Gene Ontology: Mol. function=RNA-directed DNA polymerase activity; Cellular component=mitochondrion; Biological process=RNA-dependent DNA replication
  Homolog annotation: Hit_ID=Q8S463; Match level="QueryCoverage=99%, HitCoverage=26%, E-value=0.0, Identity=85%"; Hit description =Putative prpol
  Pfam annotation: Domain name=RnaseH; Domain location=1-123; Score= -9.7; E_value=0.00046; Accession=PF00075.14; Description=RNase H
  Pfam annotation: Domain name=rve; Domain location=314-473; Score =110.0; E_value=6.8e-30; Accession=PF00665.16; Description=Integrase core domain
  Pfam module annotation: Pfam domain module=RnaseH::rve; Domain location=1-123::314-473
MFFDGSLMKTGVGAGLLFISPLRKHLRYVLRLHFPASNNVAEYEALVNGLRIAIELGVRRLDARGDSQLVIDQVMKNSHYRDPKMEAYCDEVRRLEDKFYGLELNHIARRYNETVDELAKIASGRTTVPPDVFSRDQHQPSIKTNDTPEPGKASAQPEAPPAQPGAPSAPEGEALRVEGERSGVTPNRNWQTPYLQYLHRGELPLDRAEARRLAWRAKSFVLQGDEKELYHRSPSGILQRCISITEGQELLREIHSGACGHHVAPRALVGNAFRQGFYWPTAVADATRIVRTCQGCQFYARQTHLPAQALQTIPITWPFVVWGLDLVGPLQKAPGGYTHLLVSIDKFSKWIEVRPLHSIRSEQAVAFFTNIIHRFGVPNSIIIDNGTQFTGRKFLDFCEDHHIRVDWAAVAHPMTNGQVERANGMILQGLKPRIYNDLNKFGKRWMKELPSVVWSLRATPSQATGFTPFFQVYGAEAILPTDLEYGSPRARAYDDQSNRTNREDSLD

SEQ ID NO: 58935 - protein, 394 aa, Zea mays
  Coding DNA Sequence Number=SeqID_17156
  Gene Ontology: Mol. function=protein serine/threonine kinase activity; Cellular component=nucleus; Biological process=protein amino acid phosphorylation
  Homolog annotation: Hit_ID=Q6ZL03; Match level="QueryCoverage=88%, HitCoverage=64%, E-value=6e-94, Identity=52%"; Hit description =Putative SnRK1b protein kinase
  Pfam annotation: Domain name=Pkinase; Domain location=38-292; Score =295.6; E_value=9.5e-86; Accession=PF00069.15; Description=Protein kinase domain
  Pfam annotation: Domain name=Pkinase_Tyr; Domain location=38-292; Score=34.3; E_value=1.4e-14; Accession=PF07714.7; Description =Protein tyrosine kinase
  Pfam annotation: Domain name=RIO1; Domain location=51-194; Score= -90.8; E_value=0.028; Accession=PF01163.12; Description=RIO1 family
  Pfam module annotation: Pfam domain module=Pkinase::Pkinase _Tyr::RIO1; Domain location=38-292::38-292::51-194
  Subcellular localization annotation: CTP_CleavageSite=30; ConfidenceScore=5.45e-01
MAAANKQQQAGSSSSCRGGDAGSSRQSSSVAAVLRDRYELQSLRGNGSSAEVWEARHRRTGHKVAIKIISHANTDKKKIAREIRVMRLLSQGQHPHVIRFIEAMSTHAHTFIVMELAASGQLYDHVVLRGRLPEDQARTIFQQLAAAVLYCHRNMVAHRDLKMENVLLTPDIAVKLVDFGFSKLYTHAKPMRKKMGSPLYAAPELLFGGRATSYVGPQVDVWSCGVILYGMLCGGLPFDGADVSEVARNVRRGDYRLPSWVPDDARDLIAGMLIVSPHKRMTMADVMAHRWLQPATMPAYLAMPPPDATRLAQVAVDETAVEQLAMRHGFDRSSLLESLRQNQEDEGEAAVAYRLVLATMSDAPTRYLTMRPPHRHCWKACSTAACSSTTADRA

SEQ ID NO: 58936 - protein, 60 aa, Zea mays
  Coding DNA Sequence Number=SeqID_17157
MTAQAATGESERGDFRDGLDLNAGFFVLRLESSWEAVDLSTGGSRASEIARLLGFLSERV

SEQ ID NO: 58937 - protein, 88 aa, Zea mays
  Coding DNA Sequence Number=SeqID_17158
MLRRRRSCRKKQLRLMLSIFGDPDVVDIVFTCGADILAMYDVTCDCFANATYFEKYLDSFDGSKNSDNRWLQNHQDLIAQVLKSMSTI

SEQ ID NO: 58938 - protein, 74 aa, Zea mays
  Coding DNA Sequence Number=SeqID_17159
MPLPRLPLRAAAPEEGSLVASEGEARALGPIAGGLYMSGASTTPHRHRLRGHAMGARVIGEALPHYDHVWRQQE

SEQ ID NO: 58939 - protein, 612 aa, Zea mays
  Coding DNA Sequence Number=SeqID_17160
  Homolog annotation: Hit_ID=Q1SF96; Match level="QueryCoverage=96%, HitCoverage=98%, E-value=0.0, Identity=59%"; Hit description =Membrane attack complex component/perforin/complement C9
  Pfam annotation: Domain name=MACPF; Domain location=118-316; Score =62.1; E_value=1.8e-15; Accession=PF01823.10; Description=MACPerforin domain
MEAAGDEVVRALGAGFDLTSDFRMRFAKASEGRRLVELGEETRDVPLPGGGGATLRAVPRDVGVDKGDRIRFRSDVLEFNQMSELLNQKSSVQGKVPSGYFNALFELSGAWLTDAKETKHLAFDGYFISLYNLHLKASPLVLRDEVKKAVPSKWDPIALSWFIKNYGTHIIVEMGIGGQDVICVKQSHSSTISTVDLKLHLEDLGDFLFSDGKNHSPIHRKTKDGKSKVPDVFVRIVQQPNNLHLSSYSETSTKDGLTVTCSKRGGEAYLPNHSKWLQTVAKKPDAIMFKFVPITSLLTGIPGSGYLSHAINLYLRYKPDLQDLQYFLEFQVPLQWAPMFNELVLGPQKRKSSYPSMQFRFLGPRLQVSTSQVSSSQKPVVGLRLYLEGRKCNRLAIHVQHLSSVPSMIGDSVASSMSEWRESQDSDPGYVEAIQWKKYSCVCTSVVKYNPEWHKRAPGGVFIVTGAQLVTKGAWSKKVLHLRLLYTHIPNCTIQRTEWTNAPAASQKGSFLTTISTTLSSPFTQRDTHQGKHEPVQLNSGVYPDGPPVPLRSRKLLKFVDISEVVKGPHDVPGHWLVIAAKLVKERRKIGIHVKFALLGYEGLSQNDSFMG

SEQ ID NO: 58940 - protein, 728 aa, Zea mays
  Coding DNA Sequence Number=SeqID_17161
  Gene Ontology: Mol. function=sulfate porter activity; Cellular component=integral to membrane; Biological process=sulfate transport
  Homolog annotation: Hit_ID=Q5VQ79; Match level="QueryCoverage=97%, HitCoverage=98%, E-value=0.0, Identity=71%"; Hit description =Putative sulfate transporter Sultr3;4
  Pfam annotation: Domain name=STAS; Domain location=599-717; Score =100.8; E_value=4e-27; Accession=PF01740.11; Description=STAS domain
  Pfam annotation: Domain name=Sulfate_transp; Domain location=268-576; Score=450.1; E_value=2.9e-132; Accession=PF00916.10; Description =Sulfate transporter family
  Pfam module annotation: Pfam domain module=STAS::Sulfate_transp; Domain location=599-717::268-576
MVVNNKVDSLSYDVEAPPPSAAGAAAGQAPPPASPAPAPAPATHAPVTREGGAASVLELHKVSLPERRTTAKALRQRLAEVFFPDDPLHQFKNQSSARRLVLALHYFFPIFQWGSAYSPRLLRSDLVAGLTIASLAIPQARARVCPVPVSPPLLPLAFIQFLATFGTGISYAKLANLPPIVGLCESLPPFLPAPASCQQNRRNSSFVPPLIYALLGSSRDLAVGPVSIASLVMGSMLRDAVSPDEQPLLYLQLAFTATFFAGVFQASLGFLRLGFIVDFLSKATLTGFMGGAAVIVSLQQLKGLLGISHFTSHMGFLDVMRSVVNRHDEWKWQTIVMGSAFLAILLLTRQISARNPKLFWVSAGAPLASVIISTILSFIWKSPSISVIGILPRGVNPPSANMLSFSGSYVALTIKTGIMTGILSLTEGIAVGRTFASINNYQVDGNKEMMAIGLMNMAGSCASCYVTTGSFSRSAVNYSAGCRTALSNVVMAAAVLVTLLFLMPLFHYTPNVILAAIIITAVVGLVDVRGAARLWKVDKLDFLACVAAFLGVLLVSVQTGLGVAVGISLFKVLLQVTRPNVVVEGLVPGTQSYRSVAQYREAVRVPGFLVVGVESAVYFANSMYLVERVMRYLRDEEERALKSNHPSIRCVVLDMGAVAAIDTSGLDALSELKKVLDKRNIELVLANPVGSVAERMFNSAVGESFGSGRLFFSVAEAVAAGACKAAQP

SEQ ID NO: 58941 - protein, 473 aa, Zea mays
  Coding DNA Sequence Number=SeqID_17162
  Gene Ontology: Mol. function=carboxypeptidase A activity; Cellular component=integral to membrane; Biological process=proteolysis
  Homolog annotation: Hit_ID=Q1S2R2; Match level="QueryCoverage=79%, HitCoverage=80%, E-value=1e-127, Identity=55%"; Hit description =Peptidase M14, carboxypeptidase A; Carboxypeptidase regulatory region
  Pfam annotation: Domain name=Peptidase_M14; Domain location=67-308; Score=187.7; E_value=2.8e-53; Accession=PF00246.14; Description=Zinc carboxypeptidase
MGISHLQPVLLLLMLRALASLPTQAAARGGHDPSDDGAHGPFSRKLLEDKPQITEEMVRGYMSNTELETAVHAFGSRCSNISRVYRLFFEEKNWVIEISDKPRQRESEPAFKFIGNVHGDEPVGREVLMHLANWLCDNYLKDSLATLIVENMHLHILPTMNPDGFALRWRGNANNIDLNRDFPDQGALVANYPWDGTRDTRAQYDFVSHCNILNNDFTSYSKHYYGCPDDKTFQHMASVYSRSHYNMSLSKEFEGGITNGAFWYPIYGGMQDWNYIHGGCFELTLEISDTKWPKADELPIIWEHNRMSMLNLLASLIKSGVHGRIFAADTGRPVPGSVMIKGIDSKVSASSTFGDYHRIVAPGETYEVVASMRGFRQKSTRIRLEQEAVSLDFILDPDGADGQTKLLPRSNDRGCRCDNDNAAKPFHVHEAHLWLYLLIVSVLLALYVVFKRKTVPRLLAYRHSSSLRRPVAV

SEQ ID NO: 58942 - protein, 154 aa, Zea mays
  Coding DNA Sequence Number=SeqID_17163
MSRASGEAEDGELKKVVRIRKPNVRVGGPEWTDMSTPPPSIAAVWDWRTAIAEPGKIEAMTTGCCALGRAARLPRRTTYHWLRDRMPSVALPGKKAGYLGEYWRSIMAPDEVGEYWRSIMAPDEAGAATSALDVVAGGHLMLAAAAAWGQRQSS

SEQ ID NO: 58943 - protein, 95 aa, Zea mays
  Coding DNA Sequence Number=SeqID_17164
  Gene Ontology: Mol. function=porin activity; Cellular component =integral to membrane; Biological process=transport
  Homolog annotation: Hit_ID=Q10LH9; Match level="QueryCoverage=95%, HitCoverage=13%, E-value=2e-36, Identity=69%"; Hit description =Nucleoporin interacting component, putative, expressed
MTAVEIHKRVGAFAMALQTINKCMSDAVCAMARSMLDGESRAAALIHSGNEILETARYSSEARLVRAGQTVDALRETIRLPFLHLDPKAPNVTVV

SEQ ID NO: 58944 - protein, 87 aa, Zea mays
  Coding DNA Sequence Number=SeqID_17165
METWACRSRFGLSWKWRILSEAVASSLLNGGDGGVMALSGQGPRTLDGFSGRHEPIAALNSRSHQHLIGIRANKRNRFSSQASDPIE

SEQ ID NO: 58945 - protein, 133 aa, Zea mays
  Coding DNA Sequence Number=SeqID_17166
  Gene Ontology: Mol. function=heat shock protein binding; Biological process=protein folding
  Pfam annotation: Domain name=DnaJ; Domain location=76-119; Score= -7.0; E_value=0.021; Accession=PF00226.21; Description=DnaJ domain
  Subcellular localization annotation: CTP_CleavageSite=63; ConfidenceScore=5.65e-01
MSSLRAISSLLHIYSTSAAARRGAGRLGFAPSPGGRFRVPSNSGPPAFVLDEVARAAGGVRRRASTRAASWDSEKSPYETLVYDGKGTLEEGETAEARFIKIQAAYELLIDGVCRRAYDREHHVNPMKVYESY

SEQ ID NO: 58946 - protein, 213 aa, Zea mays
  Coding DNA Sequence Number=SeqID_17167
  Gene Ontology: Mol. function=oxidoreductase activity; Biological process=electron transport
  Homolog annotation: Hit_ID=Q8LI32; Match level="QueryCoverage=54%, HitCoverage=24%, E-value=1e-49, Identity=84%"; Hit description =Putative oxidoreductase, FAD-binding
MEELPVPVDHPIGETAGRPLHDAGRCKRNTPMHVPAPHLLPAPPKPHYHAALRFTVAASAAPASPRKAVIVGGGLAGLAAATHLTSLSVPFTLVEASDRLGGRVATDVVDGYRLDRGFQIFLTAYPECRRLLDFPELRLRPFYPGALVFVGAGEPFYLLSDPFRLPLRSLSAVFSPVGTLTDKSSRLFELVFKRLALGTRLPKTASAHRGQFQ

SEQ ID NO: 58947 - protein, 323 aa, Zea mays
  Coding DNA Sequence Number=SeqID_17168
MGQGKEVKTRPDPEVEIQEKGEIFFFYRPKVGKDEAHGPDDVQRMYIVLRPESAGGGGRTVEEKQAPDSGKEGRKRRRQGDGAQEESEEKGADGGHGKEEVNIEDQPLLRLVVMGRKSLPDPAKHSRPYWGYVELVTTKVDDIKDALKEEEYSTATRGKRHRAAARALGEGVYRIVKHESESGSGGRRRSPRPHTHLVYKLELPSTRGAMEPQEAMNVEPEASFLVQSKRRAAFPAHLQDAFGGRRYAPADPPDLLNYEGCELLLIAASDDVEDELGLQLEGEVEDGEGEGVETPQGALGCSDLVKMFGEVADVKPLLSGSWD

SEQ ID NO: 58948 - protein, 129 aa, Zea mays
  Coding DNA Sequence Number=SeqID_17169
  Gene Ontology: Mol. function=nucleic acid binding
  Homolog annotation: Hit_ID=Q7XIG8; Match level="QueryCoverage=65%, HitCoverage=10%, E-value=4e-13, Identity=50%"; Hit description =AcinusL protein-like
  Subcellular localization annotation: CTP_CleavageSite=24; ConfidenceScore=5.30e-01
MANQTLVPPHVPATSRGLLPTPARFAKVPPTSDPGPARESLPPPPLSLEPARTLDELFKKTQTYPRIYYMPLSEEEVSAKRAAHDKAVFRCNHTCHGTAIDRLSSPQLTPPDQQLQLYEELLHRTCPYI

SEQ ID NO: 58949 - protein, 115 aa, Zea mays
  Coding DNA Sequence Number=SeqID_17170
MGEDKTWGLTLLHPAELGGRPESRRSPTIPSCIRRWRYQFKNPGAKVERDEEHPCADLQRVRDGWPCRMDCARGWQWGGNLGAPVEFLAAVLADTVEAVVLRVTNPSENLLPPLR

SEQ ID NO: 58950 - protein, 774 aa, Zea mays
  Coding DNA Sequence Number=SeqID_17171
  Gene Ontology: Mol. function=protein kinase activity; Cellular component=integral to membrane; Biological process=protein amino acid phosphorylation
  Homolog annotation: Hit_ID=Q8LI36; Match level="QueryCoverage=99%, HitCoverage=92%, E-value=0.0, Identity=65%"; Hit description =Putative receptor-like protein kinase
  Pfam annotation: Domain name=LRR_1; Domain location=102-121; Score =13.4; E_value=0.83; Accession=PF00560.23; Description=Leucine Rich Repeat
  Pfam annotation: Domain name=LRR_1; Domain location=11-30; Score=7.6; E_value=11; Accession=PF00560.23; Description=Leucine Rich Repeat
  Pfam annotation: Domain name=LRR_1; Domain location=126-148; Score =9.1; E_value=5.7; Accession=PF00560.23; Description=Leucine Rich Repeat
  Pfam annotation: Domain name=LRR_1; Domain location=150-172; Score =13.2; E_value=0.95; Accession=PF00560.23; Description=Leucine Rich Repeat
  Pfam annotation: Domain name=LRR_1; Domain location=183-205; Score =14.7; E_value=0.33; Accession=PF00560.23; Description=Leucine Rich Repeat
  Pfam annotation: Domain name=LRR_1; Domain location=207-229; Score =7.4; E_value=12; Accession=PF00560.23; Description=Leucine Rich Repeat
  Pfam annotation: Domain name=LRR_1; Domain location=231-252; Score =15.7; E_value=0.17; Accession=PF00560.23; Description=Leucine Rich Repeat
  Pfam annotation: Domain name=LRR_1; Domain location=253-275; Score =11.1; E_value=2.4; Accession=PF00560.23; Description=Leucine Rich Repeat
  Pfam annotation: Domain name=LRR_1; Domain location=33-52; Score =12.1; E_value=1.5; Accession=PF00560.23; Description=Leucine Rich Repeat
  Pfam annotation: Domain name=LRR_1; Domain location=54-75; Score=6.8; E_value=15; Accession=PF00560.23; Description=Leucine Rich Repeat
  Pfam annotation: Domain name=LRR_1; Domain location=78-100; Score =3.3; E_value=69; Accession=PF00560.23; Description=Leucine Rich Repeat
  Pfam annotation: Domain name=Pkinase; Domain location=492-768; Score =6.5; E_value=6e-09; Accession=PF00069.15; Description=Protein kinase domain
  Pfam annotation: Domain name=Pkinase_Tyr; Domain location=496-768; Score=-68.9; E_value=3e-08; Accession=PF07714.7; Description=Protein tyrosine kinase
  Pfam module annotation: Pfam domain module=LRR_1::LRR_1::LRR_1::LRR _1::LRR_1::LRR_1::LRR_1::LRR_1::LRR_1::LRR_1::LRR_1::Pkinase::Pki ase_ Tyr; Domain
  Pfam module annotation: Domain location=253-275::33-52::54-75::78 -100::492-768::496-768
  Subcellular localization annotation: CTP_CleavageSite=49; ConfidenceScore=5.32e-01
MPEALLQNSMRLIEVDLSRNGFSGSVPTVNSTTLKVLNLSSNVLSGSLPATMGKCTSVDLSGNQFSGELAILRSWDGIVEVIDLSSNKLVGSYPNDVSQFQNLVSLKLRNNSLSGSLPSVLGTYQKLSVLDLSQNAIEGSVLPTFFMSPTLTVLNLSGNKFSGTIPFQSTHSTESILLSSQSALRIVDLSSNSLAGPLPPDISNLQKLEFLILMMNELSGEIPSEISKLQALEYLDLSHNHLTGRIPDMPQNGLKVFNVSYNNLEGTVPKSVEKFPLSCFRPGNDMLVFPDGLPAGNDDYTGVDQGQTSHGHKAGVRVALIIGCIGAVLLVISIALAFYLVRSQELCGRNGFRGQITIRDLKGRISRPNLFRSPKDNVIPSKTSFSNDHLLRAATRSMSAQKELLAEASVEYGYTDPKEVAESTSLGVTETSSAIQAHESPPRSALPAAPHFADSRFLEEPVAFEVYSPDRLVGELIFTDSTLVFTAEDLSRAPAEVLGRSSHGTTYKAVLQSGHVLTVKWLRVGLVKHKKEFTKEIKRIGTIRHPNIVPWRAFYWGPKEQERLIISDYVSGDSLALYLYESTPRRYSRLSVSQRLRIAIDLARCLQFLHHEKGLPHGNLKPTNIFLTGPDLTPKLVDYGLHRFMTPSGAAEQILNLGALGYRAPELANAGKAAPTFKADVYAFGVVVMEMLTRRSAGDIISGQSGAVDLTDWVQMCSREGRGADCFDRDIAGLEERPGVMEELLAVSLRCILPVNERPNMKTVCDDLCSIITA

SEQ ID NO: 58951 - protein, 114 aa, Zea mays
  Coding DNA Sequence Number=SeqID_17172
MKKEAVNMRPTDTMTTASVGYHSTGTGLEIAFAACDTNPLGQHSGLPSRTLDLRKRRQWRVHHSVRSAAAVVAARSACLVAPLSPPRCTNNFVTTRAKWIRPGRSQVLVGFGSE

SEQ ID NO: 58952 - protein, 177 aa, Zea mays
  Coding DNA Sequence Number=SeqID_17173
MKLRHLKSYGSQNQEIERLEGGRFRKKLKIKLCKYLKNTGKRSTALLNQMSSSDPVGESIRGRIASNVAPSHEFSRAWPELFTGGRRGSVNSTAVSSMPCSSLTVPLLYVVAMREQSLPRSLIVSRTTVAINSAMDHGESPPVMASTSRGVIDGKRAVAMGLIGEETKAEGPMCDCQ

SEQ ID NO: 58953 - protein, 108 aa, Zea mays
  Coding DNA Sequence Number=SeqID_17174
MAPKKATSKATTSLDDAAKATLLPKKKGKAAVVPHEAIEDGAVNSKRHRPPARLHPLEADDIIKDDEVLGISADDQLKLHALRIKNNHLQKQKEIFEAKRQHITMQTK

SEQ ID NO: 58954 - protein, 185 aa, Zea mays
  Coding DNA Sequence Number=SeqID_17175
MRHGEEEMEDEHMKGNNDVVAHSAKANDNDTDSVGHGRIHSELQIDGHQVTTPRRMHKAKRLCRELGHELGRESRAIQGLRRGRNSAGHRWRDLSTGRAQGSSWLRVDGRAGAPRRAQGRVTGEGELPQGGRRWRRAAALGVRRAVTSREMWRCTEEGDEGERAAMGKGGELGATLDQIRAGAGR

SEQ ID NO: 58955 - protein, 105 aa, Zea mays
  Coding DNA Sequence Number=SeqID_17176
MDWEMGAERAGWRGRGTTPGSCAARLRVGSRRGHGEQGARAQEAGRARQQVRHQGEDEGAGSREEQRRVTSQSRDTMKFADIFGTQNFSDTNELNQMRSIEINGT

SEQ ID NO: 58956 - protein, 131 aa, Zea mays
  Coding DNA Sequence Number=SeqID_17177
RRRGNTGGLGLRVGETSAQWAGAEKWRKNSGRLPRPRVRRALATLEHAPALSLASAVSCCVNPAPTPAAIKYTLVSTVHPRALLTLPEHEFIDVCPENGVPAAAQALATVDRPHQPPSIPPDPLASFAGAQ

SEQ ID NO: 58957 - protein, 120 aa, Zea mays
  Coding DNA Sequence Number=SeqID_17178
MVEAHRRRRPSSEPSKKSSIGDEMLIESMNRRHWDKALDKRNVAGSNSASAPEDDELRLARPQGSALASADGLRLARPRGSDSTSTSEDRLDLDLGGASSSPDPGLGPTTSQEGPSLPYP

SEQ ID NO: 58958 - protein, 291 aa, Zea mays
  Coding DNA Sequence Number=SeqID_17179
  Gene Ontology: Mol. function=endopeptidase Clp activity; Cellular component=chloroplast; Biological process=proteolysis
  Homolog annotation: Hit_ID=Q5VQ13; Match level="QueryCoverage=99%, HitCoverage=98%, E-value=2e-83, Identity=58%"; Hit description =Putative ATP-dependent Clp protease proteolytic subunit
  Pfam annotation: Domain name=CLP_protease; Domain location=118-271; Score=97.1; E_value=5.4e-26; Accession=PF00574.13; Description=Clp protease
  Subcellular localization annotation: CTP_CleavageSite=13; ConfidenceScore=5.11e-01
MAAPASSSCFHPRATASPPSSLRFVGVVMPECQRWVPHCGQPENLSQVYVCAYVYHVNLSLMGFGTYMDAIVSSRFEEITRYVSSDSSGYSRLSKKKATRARISMMPIGTPRVPYRTPGEGTWQWLDIWNALYRERIIFIGDNIDEEFSNQVLASMLYLDSIDNSKKIMLYINGPGGDDSSLQPVKRVHALVCLYAGFHSNHLPEQLEDRADDIENEANELIRIKNYLYGKLAGHTGHSVEKIHEDLSRVKRFDAEGALEYGIIDRIVRPSRIKKEGSTAQRRDMRNLGLG

SEQ ID NO: 58959 - protein, 164 aa, Zea mays
  Coding DNA Sequence Number=SeqID_17180
MVSRKRLSLPKHILNTSTLGVVGIVEDWRDICLVMKDAQESLSLKTQRRRFQREPVAARGVIVEDRMVLDLDVLLQSNTGLHMLKDIKQLELVLSHARRYARMSSYDLSYLTSCKIMDWDYDTAETGKVLDMEARNKGALDKRIQTFARLVTYIRQFYVSPLIK

SEQ ID NO: 58960 - protein, 61 aa, Zea mays
  Coding DNA Sequence Number=SeqID_17181
MAEPPDASATKSWLYLVAPRAMETPVPPLRHRGSTTQLDGPLAIGKCQRGQAARQQLSNNQ

SEQ ID NO: 58961 - protein, 124 aa, Zea mays
  Coding DNA Sequence Number=SeqID_17182
MEERDRTCEDDDRGEGSFATGLRRRGGCANPSQDGLSREGDATVGMEEFAEEVARTCEDDDAGRRGTGGGAVGARRRRGGCATTLAKSTDFRPKLSEGRFQRTVGGGFYPKRATQKPREKLRVW

SEQ ID NO: 58962 - protein, 92 aa, Zea mays
  Coding DNA Sequence Number=SeqID_17183
MTITAPIPPVADREGRAKRIHGGHALPLQHVDVVNHIYSGNTIKTECIITHRSTHTLKRLRPGGGSGSCPADRPVRSGLVPVSCRYASLPPS

SEQ ID NO: 58963 - protein, 221 aa, Zea mays
  Coding DNA Sequence Number=SeqID_17184
  Homolog annotation: Hit_ID=Q5VQ11; Match level="QueryCoverage=45%, HitCoverage=31%, E-value=4e-11, Identity=68%"; Hit description =Putative AT-hook protein 2
  Pfam annotation: Domain name=DUF296; Domain location=11-100; Score= -7.3; E_value=0.0021; Accession=PF03479.5; Description=Domain of unknown function (DUF296)
  Subcellular localization annotation: CTP_CleavageSite=53; ConfidenceScore=5.11e-01
LGRIRAAPPGGRVRVQRRRQRVQRVRPPARRRRRGIERGGPLRDPLPLRLLTPAGATTAATGLTVYLSGGQGQVVGGSCRPLLASGPVVIVAACFGNAAYERSRSTTTTCRSSSSTCPLLLLFRRACPELPAPAGSPRPRRPRRCHCPDNTRSPTSSPTASSTASLSPLTPTAGPTQEAAPAASPRTDRSNPSPYRTRSIRTWKGNQRLLLHRHRRIDDDK

SEQ ID NO: 58964 - protein, 514 aa, Zea mays
  Coding DNA Sequence Number=SeqID_17185
  Gene Ontology: Mol. function=RNA-directed DNA polymerase activity; Cellular component=intracellular; Biological process=RNA-dependent DNA replication
  Homolog annotation: Hit_ID=Q8S463; Match level="QueryCoverage=99%, HitCoverage=26%, E-value=0.0, Identity=86%"; Hit description =Putative prpol
  Pfam annotation: Domain name=RnaseH; Domain location=312-439; Score =20.4; E_value=7.2e-07; Accession=PF00075.14; Description=RNase H
MPFGLRNAGATYQRCMNHVFDEHIGRTVEAYVDDIVVKTRKASDLLSDLEVTFRCLKAKGVKLNPEKCVFGVPRGMLLGFIVSERGIEANPEKIAAITSMGPIKDLKGIQRVTGCLAALSLFISRLDERGLPLYRLLRKVECFTWTPEAEEALGNLKGLLTNAPILVPPAAGEALLIYVAATTQVVSVAIVVKRREEGHALPVQRLVYFISEVLSETKTRYPKIQKLLYAVILTQRKLRHYFESHPVTVVSSFPLGEIIQCREASGRIAKWAVEIMGETISFAPRKAIKSQVLADFVAEWVDTQLPTVPIQPELWTMFFDGSLMKTGAGAGLLFISPLGKHLRYVLRLHFPASNNVAEYEALVNGLRIAIELGVRRLDARSDSQLVIDQVMKNSHCRDPKMEAYCDEVRRLEDKFYELELNHIARHYNETADELAKIASGRTTVPPDVFSRDLHQPSVKIDDTPEPEAPSAQSEAPSAQSEAPSARPEAPSARPETPFVRPEVPSAPEGEALRV

SEQ ID NO: 58965 - protein, 137 aa, Zea mays
  Coding DNA Sequence Number=SeqID_17186
MGKNNKRKREPTPLSEDFGDSEYSEEEFSSESEGSPAPVSPPASSDDSGDSQGIAAEVWTYIRAVERSGLEGSNESEYSSDEEDSDGGGEDEDDDDDDDGAGDDGDGDGDSSGRGSNGGSRGSGGGGSSMGSNKASG

SEQ ID NO: 58966 - protein, 272 aa, Zea mays
  Coding DNA Sequence Number=SeqID_17187
  Gene Ontology: Mol. function=pectinesterase activity; Cellular component=cell wall; Biological process=cell wall modification
  Homolog annotation: Hit_ID=Q43062; Match level="QueryCoverage=88%, HitCoverage=43%, E-value=3e-90, Identity=63%"; Hit description =Pectinesterase PPE8B precursor
  Pfam annotation: Domain name=Pectinesterase; Domain location=8-256; Score=439.8; E_value=3.6e-129; Accession=PF01095.10; Description =Pectinesterase
MPLLHCCAACLACFSSLRQLGANIIPEAVNGKGFIARDLTFENTAGPAKHQAVALRCDSDLSVFYRCAFEGYQDTLYAHSLRQFYRDCRVAGTVDFVFGNAAAVFQDCALLARRPLPGQKNSVTAQGRLDANMTTGFAFQFCNVSAHPDLLLQQQQQQAQSSNSNGTATTQTYLGRPWKPYSRVVFMQSYIGDVVRPEGWLAWDGDFALDTLYYGEYANTGPGATVAARVKWPGFHVMTSPTEAGNFTVAQFIEGNMWLPPTGVKYTAGLTS

SEQ ID NO: 58967 - protein, 133 aa, Zea mays
  Coding DNA Sequence Number=SeqID_17188
  Homolog annotation: Hit_ID=Q7XDP3; Match level="QueryCoverage=76%, HitCoverage=32%, E-value=7e-17, Identity=46%"; Hit description =Expressed protein
SPEIPHSLIERDPCMRGDLPTLGLALLDLVSAALGPTTSAKPVLSKDRDRDASQRRKSMRTPELSSRAEDLFEIEDVQLAIGSCKIDPESASGSEKHGHPFLRRSSLGRPMRQARERVTTYKEMPLHVKLRRA

SEQ ID NO: 58968 - protein, 37 aa, Zea mays
  Coding DNA Sequence Number=SeqID_17189
MKKVRVLVAGISKMIDLGSSLKAKVDKDTILRTQVAM

SEQ ID NO: 58969 - protein, 266 aa, Zea mays
  Coding DNA Sequence Number=SeqID_17190
MSGADPVEDEEEEIDKRPHACCPTTNDAKAGGRSARDHVADAATNWRHQAPAWPMCRSPNLDIASSSTLPVASAGGRPSLMPTPCTAVAMASTPSTAASRRRNPGDEEEDVGDEGRVLEAWERAYADERSWESLQEDESGLLRPVDTKTLVHARYRWCLLLRSTAAAARIQKGLFRRSMCGGGATCITSGGQGAQPSRRLERGGTIAGRGTTSGGVSRVGIGARPSWRWMGEVPSQSRARWGAPERILEGWVRGWGTSEIRGRGHA

SEQ ID NO: 58970 - protein, 121 aa, Zea mays
  Coding DNA Sequence Number=SeqID_17191
MAVATTDRWLLLLAVVSAAATSGKHERWRHQPSGVEIIMRETESDACVGPGGVLQACAWGRASGPTDLDPRSQGPHPIYSCRLAPNSGTWRHINNTRETADGHSIVIDIMPSKKYASNFMY

SEQ ID NO: 58971 - protein, 227 aa, Zea mays
  Coding DNA Sequence Number=SeqID_17192
  Pfam annotation: Domain name=PMEI; Domain location=23-184; Score =43.2; E_value=8.8e-10; Accession=PF04043.6; Description=Plant invertasepectin methylesterase inhibitor
  Subcellular localization annotation: CTP_CleavageSite=42; ConfidenceScore=5.30e-01
MAWASPRGTAPQLLLVLSLLLAAASASLLPLSNNAPPPRLPPAAKAREGGASVSAGLLSTLREALDAVKDVTSIISSFPIGGILGDGGGDLRLSSAVADCLDLLDLSSDEMSWSMSMSTDSSGAGGGRLGTGDARSDLQSWLSGALGNQDTCKEGLDATGSVLGSLVAAGLDAVTSLLADGLGRSPAATTRPLRRRRCRLLLPPREVPMRLITIPCVSSRFMLGLRQ

SEQ ID NO: 58972 - protein, 202 aa, Zea mays
  Coding DNA Sequence Number=SeqID_17193
MVRADARRNTKGTYRFRPHERVTLYDLCGVEYWIALSLQITNGSGGQPCVVDFFTRPYFLFPAILFSTSKNSNGGKEGCKSRLKNRGDKRKCPPTFPSEDFCDSSTPMRGLPCHPPFVFVRLHGRLHGAISGREGQPLGHRAVGLDDSDDSEEEEDKYDGGDKGGEDDNVGSGGGSKGSSDNDDGKGVTTAARAATRVAERT

SEQ ID NO: 58973 - protein, 131 aa, Zea mays
  Coding DNA Sequence Number=SeqID_17194
MDEQTRHRDGDEQEHWRVAKRGEVESHIIEFNDEVTDRGGLELGAPAGEIRTQGGRRRLELVAAHDGHGRNLAGERSLLGRGDEQRGAAMKVSADRGARRGEQARRRREQELEEEACARETDGDERRAARR

SEQ ID NO: 58974 - protein, 178 aa, Zea mays
  Coding DNA Sequence Number=SeqID_17195
MGSWHDANEQTCQAVKRTEGEAPTNPTDQHSQGPGSEFPSHSPSMDIPTAVIHRLQSSLREAIFAPSVEDAPAPPFPSVSDAVAAFDSGAASVSAEFRCVGCGSAGGLLRGAQSALCAYCGCPRRGEEAEGGGSGGIAFRNSAAYRICELFFLAKLSQGIRERRGCYAPGELLIELFA

SEQ ID NO: 58975 - protein, 425 aa, Zea mays
  Coding DNA Sequence Number=SeqID_17196
MEEPLRGDSSEKDVIDPWPVGNKESPNNVIEDSNQWQAFASMSGQARDFVISVERSSGHRLNLVRPDVVEETMSSISHQHSSEINPVDLWPVGNVEALNAAEMFKETNDYFGDWQDFTTTGQVQDTSLNQTGDMIEVRKATHKETDMDSWFIGNIREPANTGTMNENNMLDNRQGFTCSDQAHQTSSSPGAEMISVPLELHDVSVSVQSWANGSSKDAATPSSTNIESNTFNVRQDFAKSGHLQENISSLGRELSSVSPEPVEENDSLDLWLTSNFKESKCSDVVGRTNASSDGWQDFASFDHAQSSTKIPVEGHLIKILQAAWPDAFGGLEFGGALQLAASENLKDKKEASNEAKTSPSDDHLKSTNGMQQMDDVDSLSSLWPTNKPDPANTNVEQLLAQMHDLSFMLKDELSAPDKLIDRSKS

SEQ ID NO: 58976 - protein, 115 aa, Zea mays
  Coding DNA Sequence Number=SeqID_17197
MESHDLRPEWESRLVGGYEIDGFGYDYDAASPLQPNRILAEYVDVYSPLLYTPNPPHPQVVSIATTAQAKMKLWKETSRSSKTTTSSRCGLAATPSRLPVKAAFIYVSFPHFDLL

SEQ ID NO: 58977 - protein, 142 aa, Zea mays
  Coding DNA Sequence Number=SeqID_17198
MATTKLANDARSARIRDLARAVELVIAHACDAYAGRRRHGSVGIVSRLGISLGLKNLVYRNIGTHQANMAQIPLGESIITSHRVETLEGYLKHLLLAKDKYDGQDILQQVQTLEKLKEYNQEIKCWCNTRSNFSSMERPGIR

SEQ ID NO: 58978 - protein, 271 aa, Zea mays
  Coding DNA Sequence Number=SeqID_17199
  Gene Ontology: Mol. function=protein serine/threonine phosphatase activity; Cellular component=protein serine/threonine phosphatase complex; Biological process=protein amino acid dephosphorylation
  Homolog annotation: Hit_ID=Q6L5C4; Match level="QueryCoverage=70%, HitCoverage=33%, E-value=6e-24, Identity=42%"; Hit description =Protein phosphatase 2C
MNHRSSEEDSAGNDEPQIKMQGHRRSTASPIRSPTQPPDRILQDQDQESAAASTALAASVVAASPEQVVVGSTRVSARPPQDKRLGVRHPLKHRWFRARGKVMVELGGVPPAHAVPEGEEEEEEEEGVSESEVEEELVEVEVEQASSAGTGMRGVEVEVLSAPATGVQEMDVEVGEMEVSPEPAVAVGGTELEPQPDDEDEVSSVTLARGERKQEAAPAPASSAVLAVEAPREKDQDGERVEKEKRDKEREMQKERERVDEVGYMSGGWKR

SEQ ID NO: 58979 - protein, 91 aa, Zea mays
  Coding DNA Sequence Number=SeqID_17200
  Homolog annotation: Hit_ID=Q6IM91; Match level="QueryCoverage=34%, HitCoverage=58%, E-value=5e-08, Identity=75%"; Hit description=DVL10
  Pfam annotation: Domain name=DVL; Domain location=65-83; Score=39.7; E_value=9.9e-09; Accession=PF08137.3; Description=DVL family
MELAASASASAVCSAYRQLSAPAAAADRGVGGDDAQETATRLDRRRRKRGGGCAGLRRRCYAVLKQQRTRLYILRRCVTMLLCWHQHDLSD

SEQ ID NO: 58980 - protein, 398 aa, Zea mays
  Coding DNA Sequence Number=SeqID_17201
  Homolog annotation: Hit_ID=Q01B71; Match level="QueryCoverage=12%, HitCoverage=24%, E-value=7e-07, Identity=47%"; Hit description=[R] KOG2888 Putative RNA binding protein
  Pfam annotation: Domain name=DUF1777; Domain location=216-377; Score=- 75.1; E_value=0.0041; Accession=PF08648.2; Description=Protein of unknown function (DUF1777)
MEIQTSGKPIDVLMEKVLSMNILSSDYFKELYRLKTYHEIGFLYLRYVADPKVLWMWYEPYLRDDEEFSPGSNGRKTTMGVYVRDLILGQGSRPMLVTPSVAALVAFLTKAARSPQTQQAGANLEKMKLPTKLSGATGDSSRQGSEDTARRPPSVKASLSVSFGQRAPHRASTRDSSPVRRTVTRDGHRSSYSPSRRSGSREGPDHDRSDRELDHSSRDRERARDRSNRDRYHSSRDLDRDKDARDYHRHERDSRDREYYRSRHSEERRDDRRDHESSRHRRSSSRHRSRSRSRSRSRSRSRRSRSRSTSRRSLNEQRSSPFRDANKEKAATVSSNLAKLKDLYGDITAKKEDSDAEKLHRDSCAEEVIRLGGPRWSTGIESTCSYGKAALLNRGRNS

SEQ ID NO: 58981 - protein, 83 aa, Zea mays
  Coding DNA Sequence Number=SeqID_17202
MAALSPLTEARGRQQGLDNPDSCPSARLQRSSDGHDTTRTGCQNLSGCHDGMLGLGHMPMLSSSASALYPVKRTCYRDQAPFS

SEQ ID NO: 58982 - protein, 483 aa, Zea mays
  Coding DNA Sequence Number=SeqID_17203
  Homolog annotation: Hit_ID=Q6YU89; Match level="QueryCoverage=29%, HitCoverage=7%, E-value=3e-54, Identity=76%"; Hit description =Putative HECT ubiquitin-protein ligase 3
MFVTEFFADKYRRRDPLASSSLLFLCVLVLATVTPGSSSPRLPLRILLAEPCCQRRRLILDYFIYSADNLRVVLATPTRAFVYDTLPGVANLEHASSTTVGSEKKLEELKQKSGRCVSAVEKANVELEHGIDGGQALDEKCDHASAKAAKAPPSKGREADETADTDKEAFGSRTEKTRRRLQPAAAMLLREFTGADIDADNEREERGRSSSSVATGRSDALVQLLMKGRPSRPEPWLALYMETRSGSRNSAPSPQQPSTPSSRAAGNKGKDPDLSVGDADVPFPQPFTSGQISEEHAPNRLFASWNLPADASEFVMEAVPSLTNLLNHHDSKVLEHASVCLTVTRIAEAFAYYPDELDELCNHGLVAQAASLIALGNSSGQEPLSTSTYTGLIRLLSTCASGSLLAVKTLLLLGISGTLKDFLSGPALISGTLVPRAVTRPADQSSELVCSKTCIRNPGMGKTQPGDFFTKPEIRPLRIEPRT

SEQ ID NO: 58983 - protein, 162 aa, Zea mays
  Coding DNA Sequence Number=SeqID_17204
MKGDIQGREVRGSRHGEGRASREQGAATEHGEPEEECAADVGGAPRWEVDRHGCGGRGAEIADEALWRGTSGGGVAVGCSGEFLDGGSGGSGDTRQRPTLENTLRDKMLVRVERGHYVVVHGQDEHGHRVLDEAEADDECGQASGRRANYFFSKAQENYASF

SEQ ID NO: 58984 - protein, 378 aa, Zea mays
  Coding DNA Sequence Number=SeqID_17205
  Gene Ontology: Mol. function=DNA binding; Biological process=DNA integration
  Homolog annotation: Hit_ID=Q6YU88; Match level="QueryCoverage=49%, HitCoverage=28%, E-value=3e-41, Identity=48%"; Hit description =Putative kinesin
  Pfam annotation: Domain name=Kinesin; Domain location=1-171; Score= -199.3; E_value=0.074; Accession=PF00225.13; Description=Kinesin motor domain
  Subcellular localization annotation: CTP_CleavageSite=31; ConfidenceScore=5.12e-01
MGPTGSGKTHTIFGSPRNPGILPLTLRRIFNAQGESKVSRKPNAVKYVVLHAVLSYICKLWSFFFSMFEIFSEGKGERILDLLSDTVECVLQQSVIKGLQEVSLSNPADAESLVSRDIGSRLLESNFINNTSMVFSLCLRSLLEHQKNQKKPLEKHFKNSMLLNPFAISIVDKVLKRLPRRKEENDFGKLASRAGSQANFEPSRAYFFSSLSERVEPDHPTRRTELSLARLVSSPISVGNQLRSWRGLKEAVIEGVVEVAKNSLLSDEVRLLQGVHVKAHLLDDVSDVGSSEGEVLESPDEASVGCHIADWDTVVVGDLHLSVNRRGAGLAVGHVSSFQYVDGILALVKAIVCWRRAALDAMSMMSSTWSVISWPLGW

SEQ ID NO: 58985 - protein, 143 aa, Zea mays
  Coding DNA Sequence Number=SeqID_17206
  Subcellular localization annotation: CTP_CleavageSite=27; ConfidenceScore=5.12e-01
MEATSPHPPTTIRRNPPRRARPPPTPLAGDKSKPSPLSRLLEGEAAFAASVPCPPQEERLKVFLRIRPLPDRDRSRPLPAAKDPRRKPKQVGAPGELCLAPDGPNSVVLTVPRSKLVDPKRGRTEVFDGFSAVFPSDSTQVLC

SEQ ID NO: 58986 - protein, 64 aa, Zea mays
  Coding DNA Sequence Number=SeqID_17207
MDELAPPDGTQTLLGEVRATHGKVPSRRVTWTRSGGDQATLQTAHLSNQTADSTPMPPRAPWPS

SEQ ID NO: 58987 - protein, 460 aa, Zea mays
  Coding DNA Sequence Number=SeqID_17208
  Gene Ontology: Mol. function=helicase activity; Cellular component =mitochondrion; Biological process=metabolic process
  Homolog annotation: Hit_ID=Q94HS0; Match level="QueryCoverage=99%, HitCoverage=77%, E-value=0.0, Identity=46%"; Hit description =Putative salt-inducible protein
  Pfam annotation: Domain name=PPR; Domain location=131-165; Score =25.6; E_value=0.00018; Accession=PF01535.11; Description=PPR repeat
  Pfam annotation: Domain name=PPR; Domain location=166-199; Score=7.9; E_value=0.87; Accession=PF01535.11; Description=PPR repeat
  Pfam annotation: Domain name=PPR; Domain location=200-234; Score =20.5; E_value=0.0062; Accession=PF01535.11; Description=PPR repeat
  Pfam annotation: Domain name=PPR; Domain location=21-55; Score=45.5; E_value=1.8e-10; Accession=PF01535.11; Description=PPR repeat
  Pfam annotation: Domain name=PPR; Domain location=235-269; Score =47.2; E_value=5.5e-11; Accession=PF01535.11; Description=PPR repeat
  Pfam annotation: Domain name=PPR; Domain location=270-304; Score =36.7; E_value=7.9e-08; Accession=PF01535.11; Description=PPR repeat
  Pfam annotation: Domain name=PPR; Domain location=305-339; Score =47.7; E_value=3.8e-11; Accession=PF01535.11; Description=PPR repeat
  Pfam annotation: Domain name=PPR; Domain location=340-374; Score =24.6; E_value=0.00035; Accession=PF01535.11; Description=PPR repeat
  Pfam annotation: Domain name=PPR; Domain location=375-408; Score =11.9; E_value=0.29; Accession=PF01535.11; Description=PPR repeat
  Pfam annotation: Domain name=PPR; Domain location=409-443; Score=2.5; E_value=3.8; Accession=PF01535.11; Description=PPR repeat
  Pfam annotation: Domain name=PPR; Domain location=96-130; Score=26.3; E_value=0.00011; Accession=PF01535.11; Description=PPR repeat
  Pfam module annotation: Pfam domain module=PPR::PPR::PPR::PPR::PPR::PP R::PPR::PPR::PPR::PPR::PPR; Domain location=131-165::166-199::200 -234::21-55::235-269::270-304::305-339::340-374::375-408::409-443
MPEARRLFDQMAQVGIQVNTITFNVLIDGYAKSGQMHQASAAYREMQARGLVPDSCTFNIIAARAHKFRLCWDHRLDDAWELRLGAIEQGVPLRVTGFNALIAAYNKEGLHEEASELYRIINKLGLTPSSSTFNYLIMGLCNQVRLDEAQLLLEHMVSKGYCLSTSFTICLDAYFRDGNAVGALKCWDDMGKIDLQTDFIAFSAYINGRSRLDYVNEAYQAFAEMTSRGIVPNNITYNSIISALCKAGNMTEAFKLEQNMRQSGLVPDIYTSNILIDGLCREGKLKMVDNLLLDMCSNGLTPDTVTYNTIINAYCRAQDMNSAMNFMNKMLVAGCEPDIFTYNIWMHSLYRNHMLNQAGKLLDELVAVDCSPNSVTYNTLMDGICSDVLDRAMILTGRLIKMAFKPNTITLNVFLSHFCKQGFGNRALMWAEKLREDSYVFYGATRNIIDWARREMEDDP

SEQ ID NO: 58988 - protein, 70 aa, Zea mays
  Coding DNA Sequence Number=SeqID_17209
  Gene Ontology: Mol. function=ubiquitin-protein ligase activity; Cellular component=intracellular; Biological process=protein modification process
  Homolog annotation: Hit_ID=O24402; Match level="QueryCoverage=57%, HitCoverage=43%, E-value=5e-14, Identity=87%"; Hit description=Tap
  Subcellular localization annotation: CTP_CleavageSite=24; ConfidenceScore=5.09e-01
MAFAIMHPSSAANTSNSTGATESAAAAAADLPSVMTCANYVKLPPYSTKEIMREKLLYAILEGRGSFHFS

SEQ ID NO: 58989 - protein, 118 aa, Zea mays
  Coding DNA Sequence Number=SeqID_17210
MRSGGSGVDLGGLVNGRGELGEEVGAEQRAVHVEQHRRDGSAVPSAEAAVAPMKGGRRRGPPAPDAARTKQEAELADLGKLQEVKERGTASDAAPYSGIIQRTHWKWRSWGGRMREWG

SEQ ID NO: 58990 - protein, 95 aa, Zea mays
  Coding DNA Sequence Number=SeqID_17211
MERLISVGADWIVRSLLVAELVMFSSCAGSRIFAMPNGTGGEKCQTKQEPPVSTDTQDNVGAGNKAGGEPEEGAATRTPRVKRRSVRVSGPEWAV

SEQ ID NO: 58991 - protein, 492 aa, Zea mays
  Coding DNA Sequence Number=SeqID_17212
  Homolog annotation: Hit_ID=Q6H4U9; Match level="QueryCoverage=83%, HitCoverage=92%, E-value=3e-09, Identity=23%"; Hit description =Dentin sialophosphoprotein-like
  Subcellular localization annotation: CTP_CleavageSite=69; ConfidenceScore=5.26e-01
MGCLFACFRASGGDGEVKGTGGQLAHPSQPPATTTTTSHQVQDGAGRRARPPSRNALSAVFQREDEGSRTAQVASSWADESGERKEMDQELVHQAIIQRSCGALLQTTNNIQGALIKYADSVHQKETHSGCLPVVSDDLHFMEAPKVEKCETPSRSHQSFTVPDATSSSKTNDELQTSATSLANNVKDSMNENNMEALVQDEEQHQALDLEECGVSKEESFHPEKTEEPKCAKNHHVVSMEISISDECSLFQSSEGSVPSSYKIRESMNTTSVEKSPKTEATIHATRKKLPKSDNSELELPSLAQWLKPPNPKKTFRDEAMAGDRSHSGKSSDEDRPIIGMVAAHWKDKVPLPANFTSKLRDGNGIPNSTNKYKEVKSVSLSLALYFTFKQSGLTQNNVSHVQDQKVSWHATPFEERLEKALSEEKLLSESTLIPYPGICYFIGFLTDRHVSSLPRQVANKLKQPTPGGKYYDLGVALENNTLSPLSWDRFP

SEQ ID NO: 58992 - protein, 138 aa, Zea mays
  Coding DNA Sequence Number=SeqID_17213
  Homolog annotation: Hit_ID=Q10NP6; Match level="QueryCoverage=28%, HitCoverage=13%, E-value=5e-07, Identity=87%"; Hit description =Splicing factor 3A subunit 2, putative, expressed
MYRGGLDRFEKAQALEPFSVKSKTGTKKAPAAAGTTKALALLTLPQNSIFLPGPQQPSIRETPRKKIQLSTETIKKFSSRTAQSVHNVPDATQQRGELPGKRRQTNLAKRAACEAKDAPAQPFPNKVKIAPSLVHEKT

SEQ ID NO: 58993 - protein, 492 aa, Zea mays
  Coding DNA Sequence Number=SeqID_17214
  Gene Ontology: Mol. function=transferase activity, transferring hexosyl groups; Cellular component=mitochondrion; Biological process= embryonic development ending in seed dormancy
  Homolog annotation: Hit_ID=Q94HS0; Match level="QueryCoverage=56%, HitCoverage=61%, E-value=6e-97, Identity=37%"; Hit description =Putative salt-inducible protein
  Pfam annotation: Domain name=PPR; Domain location=124-158; Score =33.6; E_value=7.1e-07; Accession=PF01535.11; Description=PPR repeat
  Pfam annotation: Domain name=PPR; Domain location=159-193; Score =10.4; E_value=0.44; Accession=PF01535.11; Description=PPR repeat
  Pfam annotation: Domain name=PPR; Domain location=194-227; Score=5.8; E_value=1.5; Accession=PF01535.11; Description=PPR repeat
  Pfam annotation: Domain name=PPR; Domain location=21-55; Score=45.3; E_value=2.1e-10; Accession=PF01535.11; Description=PPR repeat
  Pfam annotation: Domain name=PPR; Domain location=228-262; Score =29.4; E_value=1.2e-05; Accession=PF01535.11; Description=PPR repeat
  Pfam annotation: Domain name=Peptidase_M22; Domain location=227-426; Score=-21.3; E_value=2.7e-05; Accession=PF00814.15; Description =Glycoprotease family
  Pfam module annotation: Pfam domain module=PPR::PPR::PPR::PPR::PPR::Pe ptidase_M22; Domain location=124-158::159-193::194-227::21-55::228 -262::227-426
MPEARRLFDQMAQVGIQVNTITFNVWIDGYAKSGQMDQASAAYREMQARGLVPDSCTFNIIVARAHKVRVCCPVSPCTMTCFSSHMSADGLDMLVCRLCWDHRLDDAWELLLGAIEQGVPLRVTGFNALIAAYSKEGLHEEASELYRIMNKLGLAPSSSTFNYLIMGLCNQVRLDEAQLILEHKVIKGYCISTSFTISLDAYFRDGNAVGALKCWDDMGKIGLQTDFIAFSAYINGLSRLDYVNEAYQAFAEMTSRGIVPNNITYNSIISTLCSQTLSYSYFANSYNQPTELIFLHTADEHLLYHGQLAKKGEQFIDVPYVVKSMDVSFSGILSFIEAAAIEKLKNNECTPADLCYSLQETIFAMLVEITESAMAHCDSKDVLIVGGVGCNKRLQEMMKIMCSERGGRLFATDDRYCIDNGAMIAYTGLLAYAHGMTTPLEESTFTQRFRTDEVHAIWREKEMPVLNNTHSDAIAEVSIDEASMATPIVIDY

SEQ ID NO: 58994 - protein, 133 aa, Zea mays
  Coding DNA Sequence Number=SeqID_17215
  Homolog annotation: Hit_ID=Q6Z0Z4; Match level="QueryCoverage=69%, HitCoverage=25%, E-value=8e-09, Identity=44%"; Hit description =Putative HGA1
MAHVHEYILKPLSEPAVAPVCTRNHSVPGFLFSNGGFSGNLSQDTPVLGAGAALAQRDEDVLGGQAPLFSSSDMDNDQEGHGRGPTPLAGPPELFVTCYIFVEATTAMQAVLLCKPASKPYDPLDRDPTVGHI

SEQ ID NO: 58995 - protein, 104 aa, Zea mays
  Coding DNA Sequence Number=SeqID_17216
MELLLQGWITSAQRMSITPVREELGVDVDTLEGGRREVAVGSPIEDREEAAAFADPSIAREEGSWGAGGGVAGLAAPKCGFPGVGLDLLPKPRANSFGLPSSDA

SEQ ID NO: 58996 - protein, 631 aa, Zea mays
  Coding DNA Sequence Number=SeqID_17217
MGVSDLCARWRTINALQGQLGVAPNRLPRREFVWSYGAPDSVGEKREYPIVHRSRDSVCRDRDHDDDEDFQNGRRQGTRRQRSLSGWARASRCRGGLDDCYSSNGKHRSSTPFCRHGQGLTITKSWVPVVEAKKVSFANPLISAMWPSGMDEGTTVAEFSRLANVHLSGNKAHKADEESSRPIDDNRLANVHLSGNCIDSLIFQASASPEVPPLASLYSVDVPLLSNVERGTEPNYNPDQNFSMLSNDPLMQETQRSTLSQRSTQGVTSVDPNLDGRDLVTEQHCNQHNQDVPTSNVVHMNDPLLVGQSTAHRQGVCSDAQLQEFVASIAMPKEQLLIHPPPNDTTAPTFTKRSSVRLAAKKKITMGRSRDVITKAQDILIAKLNNAAINQNQNQNSTASCSSNQGNSFDQILPPIDNQEATHGLTATHCKVINIVDLANVFATIHRSLDSVSACPSSVNLNASKPPNVLDVHPTNLLGPELVNGNQAVESNLSGAEQASLRDALFIHDSQREPVFHPVDNDSHKALRVSPALRTTDNRTVDNTQLHDFIASITNPPEPPLIPSPPKSSTTITHPVMGVQNQPTTRRSSVRLAAKKIMKFESNRDAISKAQEIILAKLNNSAAKKLKALIL

SEQ ID NO: 58997 - protein, 43 aa, Zea mays
  Coding DNA Sequence Number=SeqID_17218
MDMSDTGDIVATYADAGAGYRNGSYGAVDGHIIPPLRASLGLS

SEQ ID NO: 58998 - protein, 228 aa, Zea mays
  Coding DNA Sequence Number=SeqID_17219
  Gene Ontology: Mol. function=sequence-specific DNA binding; Cellular component=nucleus; Biological process=regulation of transcription
  Homolog annotation: Hit_ID=Q5QMC1; Match level="QueryCoverage=73%, HitCoverage=67%, E-value=2e-29, Identity=45%"; Hit description=WRKY transcription factor 18-like protein
  Pfam annotation: Domain name=WRKY; Domain location=52-98; Score=0.2; E_value=0.00068; Accession=PF03106.6; Description=WRKY DNA -binding domain
  Subcellular localization annotation: CTP_CleavageSite=60; ConfidenceScore=5.14e-01
MKREQSLSFEFGDPSAQDAMGSASESSYSYSPPGGAVFGLSPPESSPRSGRNNNRRLYFRCSYREDRHCLASKLLQQKNDDDPPLYEVTYTYEHTCGAPPVSFPDIVAEPPVSTDGLVLRFDSPSSDAWMQQNGRYHSTSRSAFMMLSFGSSSQTHDQQPAVFRSDLEAGLSSFPTEGLPPAPPPANDDDGDMLSKLNSFAYDFDNQMHFGDHTYLPHNSSNYDHDDH

SEQ ID NO: 58999 - protein, 158 aa, Zea mays
  Coding DNA Sequence Number=SeqID_17220
MAGQRHAGGRAAADAHATREEGQASQGLPRAWAGQPGLPRAGAGEPGHRTLGHVGVVAPSRRERPGRWAAPAGEGRGSGVPHRAAGRSGSGAGAPGPPQAGREGEGARHGHGKRGPGPRKKRGGKGEEGDGAHRAGGEGGTGGRRFRAAGEVEEGRAA

SEQ ID NO: 59000 - protein, 148 aa, Zea mays
  Coding DNA Sequence Number=SeqID_17221
MGKNNKRKREPTHPSENFGDSEYSEEEFSSESEGSPAPVSPPVSSDDSNDSQGIAAEGSDESEYSSDEEDSSEEGGEGDDDDDGGDGSDDGGGGSDDGGGGSKGGNSDSRSDDGGSRGGNGGGRSGDDGSDRGSGGGGSSKGSNKASG

SEQ ID NO: 59001 - protein, 76 aa, Zea mays
  Coding DNA Sequence Number=SeqID_17222
  Subcellular localization annotation: CTP_CleavageSite=55; ConfidenceScore=5.06e-01
MATALAMIATSPEESQFGAPHPQTQIKRRNTKLGTWFSSVEGSHRISRSGSSRPRHQADGGAARWCSFSDKWSPGS

SEQ ID NO: 59002 - protein, 246 aa, Zea mays
  Coding DNA Sequence Number=SeqID_17223
  Gene Ontology: Mol. function=protein kinase activity; Biological process=protein amino acid phosphorylation
  Homolog annotation: Hit_ID=Q10NJ0; Match level="QueryCoverage=74%, HitCoverage=33%, E-value=8e-49, Identity=49%"; Hit description =Protein kinase domain containing protein, expressed
MDANGGTRSAAFPPAVVNATHRARCCELYDIVIDGSKKFEPHYYSYVATWKGEISQLSANIKYICVLICIIDPVERLTVEEFVHHPFLSEHAPERTLSRTLSEIRDGFPINNISPTRPSSQSSQEDCMPFPLDDESSGQEEGPIPDSKSPMKSYGFPTDFPIIDSLEFVDQEYVFVSGPHPEGSSSSTNASQQLNLPAKYDNLSVSPPKLTFLSAPIPINGLPINRQQSAGTGSFDNHYSPASVTS

SEQ ID NO: 59003 - protein, 458 aa, Zea mays
  Coding DNA Sequence Number=SeqID_17224
  Gene Ontology: Mol. function=ribonuclease activity; Cellular component=ribonuclease P complex; Biological process=tRNA processing
  Homolog annotation: Hit_ID=Q9ZW76; Match level="QueryCoverage=62%, HitCoverage=97%, E-value=2e-38, Identity=33%"; Hit description =Expressed protein
MSAISDQKKRTLEALQQQYTAAKAKKLQDEQVKSQKKSNFNTPKPKCDAPRGSKGPEITPRRTYAQPSHKGVAFSSSNCQQKPSTSSGEEINPVYAELSCAFHDTLSKGVVSDLDGTEVVHNVIYDIIQKGGDAGKITKGAKKLKLEKGILLDNYVQRGSRLVDSQARSLLIHSKRSKRHMSLKQHKKCGSFDLDGTFHKYDLYKPMHEMWKDYIRELMDLSPYPVAECKAASYKGVNGIMIRDTAETFGIISEDNRFRVVPKAGSVFVLQADRWKFTLIGDKLSPREKLKEDQRQQRSDWFTASTHTVSREPGRSGTAISGVCADADNQTNSYPKSTHMLIQDGMVRATNHVDILQLDPGSRLETSSRICEKYYTSILAHSSEALWAAPSAKRLSEWSTHLKQDIRLKIYKNIQKFKGPDRIKSRMKIMKKLISEKDAVGENPSWHQQGYYTKHRTI

SEQ ID NO: 59004 - protein, 121 aa, Zea mays
  Coding DNA Sequence Number=SeqID_17225
MDQNGLPYRLRLCVADATAPAPASACSTSGNPACANLRESHVRRKPPARPPRCDTRPPIRKPPTVAILKPANPSANRVATIATPRTARRMPCTTRGTPQPPPSKPRRNPFVASPEQSRASR

SEQ ID NO: 59005 - protein, 99 aa, Zea mays
  Coding DNA Sequence Number=SeqID_17226
MRLLRWADEEVTDPKAHLEDRSKAKCLSQWYEYQENAFAPVFAKIDFIVKLFSPMCSSKGRGLDGPKLLSTACAISNSCILNAANHIRKGEGVGDFIFL

SEQ ID NO: 59006 - protein, 103 aa, Zea mays
  Coding DNA Sequence Number=SeqID_17227
MADLGHGWAERTNKSGAEAGAWRSLGVRPKQGAGAHLGAAAPAARRTSERGAGEELGGAVMPPWSPAITGGVCCNAPVVTSDHRRREQRESSRVGRERSLKVV

SEQ ID NO: 59007 - protein, 232 aa, Zea mays
  Coding DNA Sequence Number=SeqID_17228
  Gene Ontology: Mol. function=metal ion transporter activity; Cellular component=integral to membrane; Biological process=metal ion transport
  Homolog annotation: Hit_ID=Q7Y247; Match level="QueryCoverage=78%, HitCoverage=49%, E-value=8e-40, Identity=54%"; Hit description =Putative zinc transporter OsZIP2
  Pfam annotation: Domain name=Zip; Domain location=1-227; Score=44.4; E_value=3.8e-10; Accession=PF02535.12; Description=ZIP Zinc transporter
MLAAVATLVVDTVATGYLRRKAAAVGDEPPQLGGDDPEEASGGGRHGHAHGVDDDDDDLVRHRVVSQVLELGVVVHSLIIGMSLGASDFPSTVRPLVPALTFHQLFEGIGLGGCIVQRDDKGFLSVPPQAKFRLRSMVAMAVFFSLTTPIGVAIGIGISSAYDETSQTALVVQGLFEAAAAGILVYMALVDILREDFMSARVQGSAPLQAALSASLLLGAGFDVHARPSGHE

SEQ ID NO: 59008 - protein, 125 aa, Zea mays
  Coding DNA Sequence Number=SeqID_17229
MATTATNRRVIHKEYVKGYPREEHMELLRGAEVPLRPTGAELAGSVLVRNLYLSYNPLHAAQDVALAAGYERPWCYDPYMRPLHHGLRAAAKGDEPRRRRCRRRPEQSRCRRRHRCARGTSSARG

SEQ ID NO: 59009 - protein, 65 aa, Zea mays
  Coding DNA Sequence Number=SeqID_17230
MTTEEVSNKATKLRGSNKAIFGRQLQGAEAPGASEEAILIISDDSFASASASGSKGSEVEIIRLW

SEQ ID NO: 59010 - protein, 221 aa, Zea mays
  Coding DNA Sequence Number=SeqID_17231
  Gene Ontology: Mol. function=oxidoreductase activity; Cellular component=membrane; Biological process=metabolic process
  Homolog annotation: Hit_ID=Q1S682; Match level="QueryCoverage=88%, HitCoverage=59%, E-value=7e-74, Identity=71%"; Hit description=Short- chain dehydrogenase/reductase SDR
  Pfam annotation: Domain name=KR; Domain location=1-134; Score=-96.8; E_value=0.095; Accession=PF08659.1; Description=KR domain
  Pfam annotation: Domain name=adh_short; Domain location=1-117; Score=- 7.0; E_value=1.6e-05; Accession=PF00106.15; Description=short chain dehydrogenase
  Pfam module annotation: Pfam domain module=KR::adh_short; Domain location=1-134::1-117
MDLSAGEESLKEVVHVAESFFSNAGVDYMVHNAAFERPKRRALEESEEGLKATLNVNVFGTITLTRLLAPYMLDREMGHFVVMSSAAGKVPAPGQAIYSASKHALNGYFASLRSELCTKGIKVTVICPGPIETLQSSAAASSSQTHSAEKREKRVSVERCVELTIVAATHGLKEAWISYQPVLTVMYLVQYMPTIGLLANGQGLNGFNPQQPTFGSKSLAG

SEQ ID NO: 59011 - protein, 93 aa, Zea mays
  Coding DNA Sequence Number=SeqID_17232
MKELQSYKLMLNHSQLNQIVKANIVVASSSKGKGKCGKKGKAKLFGPPQMERKRTREPKDLFKSKFFFYSKKVHFNVKFKKRKEYLAAKEKGV

SEQ ID NO: 59012 - protein, 49 aa, Zea mays
  Coding DNA Sequence Number=SeqID_17233
MAVYKCKTIARLWHTDDKTIAGLWHSDDKTVTSYGIMDIHFVDQKIGLA

SEQ ID NO: 59013 - protein, 262 aa, Zea mays
  Coding DNA Sequence Number=SeqID_17234
  Gene Ontology: Mol. function=binding; Cellular component =intracellular; Biological process=RNA processing
  Homolog annotation: Hit_ID=Q8GTX9; Match level="QueryCoverage=96%, HitCoverage=69%, E-value=1e-110, Identity=39%"; Hit description=Cell cycle control crn (Crooked neck) protein-like
  Pfam annotation: Domain name=HAT; Domain location=216-240; Score=1.6; E_value=15; Accession=PF02184.7; Description=HAT (Half-A-TPR) repeat
  Pfam annotation: Domain name=HAT; Domain location=25-59; Score=13.5; E_value=0.11; Accession=PF02184.7; Description=HAT (Half-A-TPR) repeat
  Pfam module annotation: Pfam domain module=HAT::HAT; Domain location =216-240::25-59
MEKLADEEDAEQLFVAFTEFEERCKETERARSIYKFALNHIPKGSVEDFYRKFAAFEKQYGEKEGIEDAIVGKRRFQYEDEVRKNPLNYDAWFDYIRLEESVGNKGRIREVYERAIANVSLAEEKRYWQRYIYVWINYALYLELDAGDMERTRDVYRHMVYSKESFSFWVFFTIHIVFEIRQLNLKGARQILGNAIGKAPKDKIFKKYIKIELQLGNIDRCRKLYEKYLEWSKYVELERSLAKTERARAIFELANLDIFFLL

SEQ ID NO: 59014 - protein, 37 aa, Zea mays
  Coding DNA Sequence Number=SeqID_17235
MRPMSMEFMTDPNDQGSAMEVDDVDTPDIFDEGSEIS

SEQ ID NO: 59015 - protein, 151 aa, Zea mays
  Coding DNA Sequence Number=SeqID_17236
  Homolog annotation: Hit_ID=A0FKR1; Match level="QueryCoverage=34%, HitCoverage=7%, E-value=5e-08, Identity=56%"; Hit description =Vacuolar citrate/H+ symporter
MESSRLTYPDRFYTVAAYATHKDEAIVGSPSPSLLWDEHFPSSVTATAAAAGGMGQLLLMCSFGGWIIPCSTGKMVLAVFGVSHAFVIFLPIQDLIILWMTKSLMDDIHGWGVLFDDKVGDGTVSVSAQGPHPLNHSAVKICYMGSHDSNL

SEQ ID NO: 59016 - protein, 258 aa, Zea mays
  Coding DNA Sequence Number=SeqID_17237
  Homolog annotation: Hit_ID=Q01G74; Match level="QueryCoverage=89%, HitCoverage=43%, E-value=1e-47, Identity=43%"; Hit description =Homology to unknown gene
MTMQHVALSKANNEYPKIHTLFSIECSSYFDWQTVGLMYSGQPGNITRLLSCTDEDLKKGHDLAPTHYVPSMSRHPLTGDWYPVINKPAGVLHWLNHVQTDAEFLVILDADRIMRGPITPWEYGAKRGHPVSTPYEYLIGCDNILAKIHTRNPSACDKVDGVIIMHIDDLRRFALLWLHKSEEVRADKDHYATNITGDIYNSSWISEMYGYSFAAAEINLRHIIRRDIMIYPGYVPLPRVKAGDWRRVKAFLGIQIQT

SEQ ID NO: 59017 - protein, 51 aa, Zea mays
  Coding DNA Sequence Number=SeqID_17238
MAHDADEDGEPVDQKEHKSMIGSLLKIEMGLHFYHISASRLLPFALLDELE

SEQ ID NO: 59018 - protein, 186 aa, Zea mays
  Coding DNA Sequence Number=SeqID_17239
MDDAREYKLIGRGKDPKSLGLIEASANMVVEVRIVKCSPAFLKLWTALFIASRRVARISWVGRVRSAVYGDVEHLSVASIKAEAGLGRGGGPPEVVSEPAPGFLDMRDTVEGVAFYGIHGEQVCALNAHVSCGLRLRPASRLYSLPESGLSEAETAVLGRGDLDWDKDSLENVPCPRAGLGKAELW

SEQ ID NO: 59019 - protein, 76 aa, Zea mays
  Coding DNA Sequence Number=SeqID_17240
MESKWEREKKRRGTFMARGSGRRGWDRSVRWCLVRSRPLRSRLRLGEAGRRAVPRLLARGAAGRACRAPGAWARVE

SEQ ID NO: 59020 - protein, 492 aa, Zea mays
  Coding DNA Sequence Number=SeqID_17241
  Gene Ontology: Mol. function=mismatched DNA binding; Cellular component=MutSalpha complex; Biological process=response to DNA damage stimulus
  Homolog annotation: Hit_ID=Q9XGC9; Match level="QueryCoverage=51%, HitCoverage=29%, E-value=2e-80, Identity=59%"; Hit description=DNA mismatch repair protein MSH2
  Pfam annotation: Domain name=DUF1715; Domain location=321-420; Score=- 24.0; E_value=0.085; Accession=PF08215.2; Description=Eukaryotic domain of unknown function (DUF1
  Pfam annotation: Domain name=MutS_I; Domain location=237-322; Score= -6.6; E_value=9e-05; Accession=PF01624.10; Description=MutS domain I
  Pfam annotation: Domain name=MutS_II; Domain location=325-450; Score =8.6; E_value=0.004; Accession=PF05188.8; Description=MutS domain II
  Pfam module annotation: Pfam domain module=DUF1715::MutS_I::MutS_II; Domain location=321-420::237-322::325-450
AIQLANARRRPCGALTSRWWLTGGYGPITDVGRTIFDRELFHVDLDDAPVFDADTDNLSVEPIFDDVVFEDIEPNFDDLDDEPLFDTKFDELDKGSVFDTESIPDHVAVSVFEFVRPEYDAELTVFDTDSDSLNDLPVVDMGPVHDAELAVFNQGNDGSSTAHTGVLDGHPVFDVELVFDEEPLIEIDCSIFNTNAPFMCLTDCLSYVDDMVSATFKEGHIFDKEIVVEAVQKESGRDYYTAHGENAMFIARTYYHTISALRHLGSNSGGISSVGVSEAMFETIVRKILLDRTDCTLDFYEGSSSDWRLSKSGKPGNIGGFEDILFINNDMQESPVMTNRKLGLAEFREDSRFTNVGSALLALCLTADCEKSINSHSLQDAITKCSILLTERKKSNFKSKDLVQDLEKIRSSVKLVHDLISQFDYSLGALGALLSYAELLANDTNYGNYTIEKYNLDCYMRLDSAAVRALTIHEEKTDRVGFNFREYIELLE

SEQ ID NO: 59021 - protein, 121 aa, Zea mays
  Coding DNA Sequence Number=SeqID_17242
  Subcellular localization annotation: CTP_CleavageSite=50; ConfidenceScore=5.29e-01
MSWPHAEAAPRRAPGVSQGRANIGGREPGRARAVPGRARRAAASAPGRVRAGTPRQGTPWPGGKRVGGRGGRGVRRAQGELSRGRVAPGAEAPRARRAEFQVVPRQAVTPGFRGTKTRART

SEQ ID NO: 59022 - protein, 63 aa, Zea mays
  Coding DNA Sequence Number=SeqID_17243
  Gene Ontology: Mol. function=DNA-directed RNA polymerase activity; Cellular component=nucleus; Biological process=transcription
  Homolog annotation: Hit_ID=Q5VQW7; Match level="QueryCoverage=82%, HitCoverage=26%, E-value=9e-15, Identity=71%"; Hit description =Putative DNA-directed RNA polymerase II 23K chain
  Pfam annotation: Domain name=RNA_pol_Rpb5_C; Domain location=11-63; Score=44.6; E_value=3.3e-10; Accession=PF01191.9; Description=RNA polymerase Rpb5, C-terminal domain
MNPFLTFGGPEAKSIIEGPSTKLPRIQITDPIARYYGMKRGQVVKITRASETAGRYITYRYVV

SEQ ID NO: 59023 - protein, 55 aa, Zea mays
  Coding DNA Sequence Number=SeqID_17244
  Subcellular localization annotation: CTP_CleavageSite=37; ConfidenceScore=5.03e-01
MAPPHRATVSPKHPPGFRKQPAVHPRVNLSLGNYCTEAPALSGFYAPSPGIRKTQ

SEQ ID NO: 59024 - protein, 175 aa, Zea mays
  Coding DNA Sequence Number=SeqID_17245
MMRVIGVPMSGRRTPGLKDCSLSSALGRQGEQNDGTFSVRIDDCQWSCANTIVAKLAVALAPMPFMRVLLDRFVAATSGVFPDNQELQDRGKLSGSVLGQWGAVDDPESMLHHIHWAVMRWPVPAMLVSSKQSPCLHYTDDWNEGVSKEELDSEIPPGEESIYGYIMGMADTCSL

SEQ ID NO: 59025 - protein, 89 aa, Zea mays
  Coding DNA Sequence Number=SeqID_17246
MELLLRHDLPLPEIAAFHTGFIHTQLHPPPTKPQPTPILPVRCRAEHEGEATDTEAKVSRGEAILFPVRRLRGVREEADCLAGKRRTER

SEQ ID NO: 59026 - protein, 96 aa, Zea mays
  Coding DNA Sequence Number=SeqID_17247
  Gene Ontology: Mol. function=N-acetyltransferase activity; Cellular component=intracellular; Biological process=metabolic process
  Homolog annotation: Hit_ID=Q2HRG1; Match level="QueryCoverage=77%, HitCoverage=12%, E-value=1e-14, Identity=47%"; Hit description=BRCT
MTVKKGYRSRLPWRDLQPCDWIISPNWLKESVREGQFVEEAQYVLEDEEYRMQYKSELRDAVMRAKERHNSLFAGYKHIQPSFDVLLAIIKSTGGK

SEQ ID NO: 59027 - protein, 114 aa, Zea mays
  Coding DNA Sequence Number=SeqID_17248
MEPICKHTSSTTTVHHPSDTYTCTSEFYTGLYLRSGVSNFLPPLQHDDLGTRVSRYSIVAAPPNYDLVASAPGFRVCHGYGRPEPEPFWGAATALFRVQYFAPPERQLARRLRL

SEQ ID NO: 59028 - protein, 64 aa, Zea mays
  Coding DNA Sequence Number=SeqID_17249
MDPPSDPKPIIPLDEIVSDFEGVLAADSCLTAPAQDVNNSWLDSPLEPEQYPLNSILYINSVLI

SEQ ID NO: 59029 - protein, 114 aa, Zea mays
  Coding DNA Sequence Number=SeqID_17250
MDSQRPVTYSVASHGDEHISMLQIRVGDLAAAAAAMDFVLQVLLRVVMRRSIRRLQEVVDIAVDIGTAVFVAVRVSGLVFRRRLPTPTTTSSSSTTYYYSPGTSSSIGMHVQED

SEQ ID NO: 59030 - protein, 121 aa, Zea mays
  Coding DNA Sequence Number=SeqID_17251
  Subcellular localization annotation: CTP_CleavageSite=52; ConfidenceScore=5.23e-01
MGPRPFASRVSSNQARHLRVLANLSLSFSHTLNLSLETLLPQSFSLIIFGVSEMTGEGKGDELVLVKYYDAAEKIQDEKIIEEIMVSLYDDSDGIEEFNFEEDNAYVEDRPSRGISGGWSS

SEQ ID NO: 59031 - protein, 293 aa, Zea mays
  Coding DNA Sequence Number=SeqID_17252
MAEDEAQKLLFARDIIVIARVQAEASLSEQSTELQALRAAVSTYSLEVDGSHFDETNTIVIMKGFAAGQSDEELYRFVAHVGWESSGQITREPSHLSEDDVPTRVCLVALAALVHASFASLADLEAALKEEDAMMVPRELGIFSFNLLAPARFLALSARWDPPVGANSLSRARSLALCATGPACQRRSRLARPCLYAADPACQTRCPRNRRSPRRARTPRRPAHVTAHVSQLPFELRTHPSSLSCLISLAPSPSRAQLLPPELTGEARPPCRLPGAPDAVPRLSERCPKIKNR

SEQ ID NO: 59032 - protein, 119 aa, Zea mays
  Coding DNA Sequence Number=SeqID_17253
MGRRLRDMPDCCSDDGFFFVYWVCWLNLISWTSGGSQVLKEILRRSRPERRPRTPSDPAAALLWFVTRVGEEIADARDPFDNEGRREHGCAERLARWGPPAVAGACNAEEKKKRLARAE

SEQ ID NO: 59033 - protein, 54 aa, Zea mays
  Coding DNA Sequence Number=SeqID_17254
MESGALDTIGLLAGGQDWLAWPALQAKHHATAMATAAHNKIRYGDIKSVRIRLN

SEQ ID NO: 59034 - protein, 42 aa, Zea mays
  Coding DNA Sequence Number=SeqID_17255
MGVPHWARLASVGYDVPEVSAASVIELLAGVRRWESGPRRCN

SEQ ID NO: 59035 - protein, 92 aa, Zea mays
  Coding DNA Sequence Number=SeqID_17256
  Subcellular localization annotation: CTP_CleavageSite=67; ConfidenceScore=5.26e-01
MASSAARGLAQAIRLVSMVMCSELYFPSALACSTKCRSAKRPWILPAPRPWRAQRNAAACCSSDALRCVALAGSGLTPSLCATFLRRLQNPW

SEQ ID NO: 59036 - protein, 556 aa, Zea mays
  Coding DNA Sequence Number=SeqID_17257
  Gene Ontology: Mol. function=protein transporter activity; Cellular component=nuclear pore; Biological process=protein import into nucleus, docking
  Homolog annotation: Hit_ID=Q9ZVW8; Match level="QueryCoverage=80%, HitCoverage=54%, E-value=1e-174, Identity=66%"; Hit description =Putative transportin
  Pfam annotation: Domain name=HEAT; Domain location=169-204; Score =3.1; E_value=18; Accession=PF02985.12; Description=HEAT repeat
  Pfam annotation: Domain name=HEAT; Domain location=217-253; Score =7.7; E_value=4.9; Accession=PF02985.12; Description=HEAT repeat
  Pfam annotation: Domain name=HEAT; Domain location=258-294; Score =17.0; E_value=0.067; Accession=PF02985.12; Description=HEAT repeat
  Pfam annotation: Domain name=HEAT; Domain location=299-335; Score =7.7; E_value=4.9; Accession=PF02985.12; Description=HEAT repeat
  Pfam annotation: Domain name=HEAT; Domain location=427-466; Score =25.1; E_value=0.00025; Accession=PF02985.12; Description=HEAT repeat
  Pfam annotation: Domain name=HEAT; Domain location=471-507; Score =23.7; E_value=0.00067; Accession=PF02985.12; Description=HEAT repeat
  Pfam annotation: Domain name=HEAT; Domain location=517-553; Score =10.7; E_value=2.1; Accession=PF02985.12; Description=HEAT repeat
  Pfam annotation: Domain name=IBN_N; Domain location=91-146; Score =7.7; E_value=0.012; Accession=PF03810.9; Description=Importin-beta N- terminal domain
  Pfam module annotation: Pfam domain module=HEAT::HEAT::HEAT::HEAT::HEA T::HEAT::HEAT::IBN_N; Domain location=169-204::217-253::258-294::299 -335::427-466::471-507::517-553::91-146
MARQGRGRKVAALLGCGGDRERARKPRQAAEVKGRSGRKHGQAAAARARKRAEAREQQTATTGRARGMEMASPTPSAKMTSEGDEIPSMMERNAAPVCQSLKLGKSIEVRQAAGLLLKNNLRTTYISMQSSSQHYVKSELLPCIGATNRAIRSTVGTVISVLFQIVRVAGWIELFQALHKCLESNDLDHMEGAMDAIYKICEDVPEELDVDVPGLSERPINVFMPRILQFFQSPHASLRKLSLGIINQYIVVMPSALYMSMDQYIQGLFNLAKDSSADVRKLVCSAWVQLIEVRPSILEPHLKNVTELILQANKDSDDEVALEACEFWSAYCDVSMPPEGLQEFLPHLIPTLLSNMVYADGDESLDDAEEDESFPDRDQDLKPRFHDSRLHGSETGDDDDDADAVNVWNLRKCSAAGLDVLSNVFGDSILPTLMPLIEQNLARTDDDSWKERETAVLCLGAIAEGCISGLYPHLPQIVAFLIPLLDDKFPLIRSITCWTLSRYSKFIVQSLDHPNGRGQFDKILMGVLRRILDTNKRVQEAACSAFAILEEVIAIF

SEQ ID NO: 59037 - protein, 318 aa, Zea mays
  Coding DNA Sequence Number=SeqID_17258
  Subcellular localization annotation: CTP_CleavageSite=85; ConfidenceScore=5.03e-01
MGLRSTKTVLPLKRTIESAIQPLLEPMQRLPKTMARHAVQTPRALAYHLRSSRSPMRQRRSAGRPPQALNPITSVRRASADRFVRVSLLEGSLRLLPHGQRGEPYGRIEFRGADEGRACDPPGTGGVERTHGGWESVDSVPHPSIGSQIWASRSDLCMAAGSGNGEEIRGGAGGIKAVALVPLRSRFGLVQGRLRACGRAGSGATACGMRQVGGRAVRGGRSEICGIVACERFGGREGAKMVDIQGLTMSVVDGILEDVVPDDLLLELPKIRVIDVRINCPDEVNSASLLAEPEAVGDLSQGSVDFTRRVQGSSEVGQ

SEQ ID NO: 59038 - protein, 125 aa, Zea mays
  Coding DNA Sequence Number=SeqID_17259
MRLEYEDGHQRTPLLDPAEGVGASLGSLVYSSSSAMISIIEESMVQLNLPLPMNKMHEKSIKKIERSLDVSPIANGGLEGSLRKKKGLFGSTDQGPPSAMISITEGSMVQLTLPLSVDGMRGKEQ

SEQ ID NO: 59039 - protein, 51 aa, Zea mays
  Coding DNA Sequence Number=SeqID_17260
MAPPRLDTPAVVWASGVDNEQFVIPRGGAGEELEQLFSEGKCLLTYYVLFT

SEQ ID NO: 59040 - protein, 366 aa, Zea mays
  Coding DNA Sequence Number=SeqID_17261
  Gene Ontology: Mol. function=DNA binding; Cellular component=nucleus; Biological process=regulation of transcription, DNA-dependent
  Homolog annotation: Hit_ID=Q52H28; Match level="QueryCoverage=59%, HitCoverage=52%, E-value=2e-37, Identity=39%"; Hit description =Putative auxin response factor 10
  Pfam annotation: Domain name=B3; Domain location=116-221; Score=70.0; E_value=7.4e-18; Accession=PF02362.12; Description=B3 DNA binding domain
MATEPALPQGHGDGDSIVDRDVWLACAVPFSRVPTVGAEVYYFPDGHAEQHLLAPLPASHRFPCTCTVTDVSLGAEDRTDEVFAKISLRPGPAAASRPEPGPGPGSSNSTRQGLSYFVNELLHRDTSTSGMFCIPRYCTEHIFPKLDLNANPPEQDLVMRDTRGKPWQFHHIYVVKIRQHRLTAGWSEFVDAKLLVAGDTIVFMRHPNGDLILGLRRKATRTSWRPRASPPWAGPSRSPTSRDRPPWSSSSRTARWIARSPPAGNEARRLEDENKQRSVWVDGHVVKANRQNIWRMLEIHWWGDSPASASPPSRAMSRFVNVWQVQRVAWFLPRPYYWRVRKKPGPGHEHDIGGATNSCNAKPLSC

SEQ ID NO: 59041 - protein, 340 aa, Zea mays
  Coding DNA Sequence Number=SeqID_17262
  Subcellular localization annotation: CTP_CleavageSite=47; ConfidenceScore=5.16e-01
MPRSATRSTGAARCPHSPTRRACVQLPRSQVDHTPVPGSAAVFGHVGTAARGAQLLEHLVGPTEFDAAVGLTALAMREKAEAALEKGNADEATVFVLLNPIAAVEILLPPLIYESRWVSKVVFTPSPAKDDFAAAAICDIDRIAYVTAGARRWAVMDPVRLTCGDQLTDVVYTDKGKVYCLTKCGDVHVLRLPERRRRKPANTDEAGSSEPEFSVLQLPQPNERTITFRPLRWQHQRNFRMMRNEQARPRDQDLTIPLRVTFCAETLIPYKKVPPESQGPHLNAPATVEPLLSEANLPFNPATVFAPPYDSGGATDFPETYNSTANFARERKLTWLLDFF

SEQ ID NO: 59042 - protein, 148 aa, Zea mays
  Coding DNA Sequence Number=SeqID_17263
  Homolog annotation: Hit_ID=O04438; Match level="QueryCoverage=33%, HitCoverage=48%, E-value=1e-19, Identity=88%"; Hit description =Signal recognition particle 9 kDa protein
  Pfam annotation: Domain name=SRP9; Domain location=2-67; Score=84.5; E_value=3.2e-22; Accession=PF05486.2; Description=Signal recognition particle 9 kDa protein (SRP9)
MVYVDSWDEFVERSVQLFRADPNTTRYVMKYRHCEGKLVLKVTDDRELIELGDRRIISSFVGWICLNFRGVMDCCSKWRCRPNVEYLFMLILCASMCTFQLLTEISNYTETIEADMEYNTKLSEFCLAKAGPSGDKAHVSTRVVATYG

SEQ ID NO: 59043 - protein, 1263 aa, Zea mays
  Coding DNA Sequence Number=SeqID_17264
  Gene Ontology: Mol. function=protein binding; Biological process =nervous system development
  Homolog annotation: Hit_ID=Q015Y0; Match level="QueryCoverage=54%, HitCoverage=40%, E-value=3e-36, Identity=28%"; Hit description=[D] KOG1832 HIV-1 Vpr-binding protein
  Pfam annotation: Domain name=LisH; Domain location=1144-1170; Score =27.2; E_value=5.7e-05; Accession=PF08513.1; Description=LisH
MAESEKGAAATTTAAAEPGSGPPHEDEDALLARAHTVISRILDRELDPNPRLLHTLATMCELHEARYLELRAADPTFNNTNTRSTFTIGKLANLLRPPYPHVFEDSIIDNIKKWVMKDPEASNECEWKYLGKNKPTDAEMLRTYAIGLLAMALCSGGQLVEDVLTLGVPAKLMHFLRIRVLGDASSSQRDANHPQDTKYPRGRDDNRGKSRLAQDGSRLDGTRVGYGILTNPTAEKDNEPGVVMRQAYGERSLDGTFASSDNSDVPEVDWTNDNSYGTIVCDTKSKYGEKTSVTRALKDEEISENGELLKRKLSRAPSRLRVKGKAGDNLPECEMTPLSPTSGLRIGGRASRDRNVVRVDDPKKATDVNNSSAGLELFSAISKEEYEDRLRDCIIGLKDISDIVLKAVRAAEAEARSANAPDEAVKAAGDAAAELVKSAALEVWKAENNSDAVIVAAEKAASAVVEAAVSTSVSRSTNQVGEERAAEEAVQTSEDQDLENFVISDKSQLLQLREKYSIQCLQILGEYVEALGPVLHEKGVDVCLTLLQMSMKDQEGCDHFAQLPDVLKLICALAAHRKFAALFVDRGGIQKILSIPRITQTYMGLSACLFTFGSLQSTMERVCALSSDTLDSVVELALQLLECPQDLARKNVGIFFAAAFVFKAVLDLFDARDGMQKLLDILYGCASGRSGSNSGGAGSSNVNQGNDRSPAEALTASEKQVAYHTCVALRQYFRAHLLQLVDSIRPSKSIRSIARNTSSARAGYKPFDISNEAMDAVFRQIQRDRKLGLALVRVRWPVLDKFFASNGHVTMLELCKAHGDRYLRDLTQYAIGVLHIITLMPQPHVRKSIVQGTLSNNRAGMAVLLDTVKSFDYIDHEVICPALNVLVNLVCPPPSISNKPLSTANQQPAAAQALASESRDRNFEKSISDRNLLANQGEYRERSGDGNPAERNNTLHQGTPNTPVVTSGVVGDRRITLGVGGGGPGLAAQLEQGYRQAREVVRANNGIKILLQLLGSRMVTHPVAIDSIRALACRVLLGLARDDTIAHILTKLQVGKKLSELIRDTSAQTSAGDSGRWQAELTQVAIELIAVIILKIQPSKQAMLVLTNSGKETTLAATDAAAPALRRIERAGIAAATPISYHSRELMQLIHEHLLGSGFTATAAMLQKEAGLAPLPLIAAVLPAHQVAALEASSVQQQWPSGRVQGFLSDKINMSTDQSAHRSDSIPPSSKKKALTFSSSFSRRAQTPHSVSGSRTSNILKSP

SEQ ID NO: 59044 - protein, 196 aa, Zea mays
  Coding DNA Sequence Number=SeqID_17265
MESWGCPAKGAQAGWTRRQRSFDKLDRGRSAMDEARSRGDARRGAGRSDRRRHRNKGVAGARHQRRKSRAGSREDGRANRAGRHGQQESEQSAAGKHQGTSRHAMEGSSTSRAEGTEASAPASSCRGDRSPSAEQGGIRGERGHGELKEQGGRGPSSAMGELGGRRSWGACQGAARRAQGMALLLRAWERKLARGA

SEQ ID NO: 59045 - protein, 107 aa, Zea mays
  Coding DNA Sequence Number=SeqID_17266
MTQLHLIGPVLHDTVTKTGTGDEYIPQIVDAKELPTVKCRRTTELFLRRPIHATPAPNLAWKDYGYPQGVEAKLPQWLSHSGFCGCGGTSVLSAMASYEKIWWRLVG

SEQ ID NO: 59046 - protein, 124 aa, Zea mays
  Coding DNA Sequence Number=SeqID_17267
MQWNKSCDGVQKKIIHDEIEIVKTESKYNAHKRAKHYNVPIPFYDEIEFIFTGKQTIGEFSVLQAPFDGPPRHAADPNGNGRKSKKQVDVNNNPSQYYDSDTLPDSNGPTQVILRRNLMMTRRK

SEQ ID NO: 59047 - protein, 175 aa, Zea mays
  Coding DNA Sequence Number=SeqID_17268
  Gene Ontology: Cellular component=membrane; Biological process =hypersensitive response
  Homolog annotation: Hit_ID=Q852C9; Match level="QueryCoverage=88%, HitCoverage=53%, E-value=1e-44, Identity=74%"; Hit description =Putative nitrate-induced protein
  Pfam annotation: Domain name=NOI; Domain location=55-130; Score=49.7; E_value=9.8e-12; Accession=PF05627.2; Description=Nitrate-induced NOI protein
  Subcellular localization annotation: CTP_CleavageSite=60; ConfidenceScore=5.08e-01
MERSPLHPHHQARLVNRGGVSSPSWERRGSSEGNRGAAPTTPGRSSKMRPGGRGDETPERGSAVPKFGEWDEKDPSTGEGFTDIFNKVREEKQSGDAPVITSGNAGGGYSRSNQGRKYESSVSQLQTCCHNAGSNYFLGLKHLFAGLLMLQLVQELMLPCMVADASAGSAADRCR

SEQ ID NO: 59048 - protein, 567 aa, Zea mays
  Coding DNA Sequence Number=SeqID_17269
MMHDLSLVELLSSSAHYVCLPVFGCCSSCSQHGSYLSIRRAKDVRYASRALIYSPNRVNERRFWRKSKDFWRKSKSGEAAVSVAITKVEAAAAAAARKAEAASDAAGTGKEKAPHKNHLYFTKLQLDNGMRNIEHELKRLRDVLIKLRGEETKLKENMEDGGRLMQLLSEEQRKLRQEQTKLWAQQAKLRLQRKEFYLEHGFPLGAGEEGPQVPNRAETVHGCDNAGAAANVNGSCNGGRQGYPEVRYKRKVQKYVVKTKQPSSGPATAGAEHKPEEKVTSDASSEADHHDEAATPANVEVAAASVAAACNNGQDGPRTNNVFVRKEKLNGSVKRKNKNSKNGGSNDKLKKQDLSETEEPPREQEKKTLDEYEREQKKSSEDASRTEARKVCDDEFRGLQMLKNKVDDGEAIMIKAEKLQQKSKKPQPEAKVPKKVVIPLKDLSFAPPRRTFFLEDGSSNGGGFRGRSRDNGRVVQNEASNGAPRGGGGDGYHDQGSNGGTGYYHHQQSGYARRPRGRGYSGNGRHPAPATKPILVEEFPPLPAFSAAARGAAPAAAAAPAAARAQA

SEQ ID NO: 59049 - protein, 604 aa, Zea mays
  Coding DNA Sequence Number=SeqID_17270
MRGRRACLWWFLAQDDSHSIGGYGARAVINIDLERACFAELVFNTSLRSVPVYEKQKEKKHKKDKKDKVRKEGKEKKDKDRSKDKHKDKKDRKEKHRDKKKDKSKDKSRDSGEGIERNDEAHHGQKVGESSRRSEEIKDLKFREDLVRDVQDEKGAASRPSENYGVSNDRNRKGFSASPAMETERFALNKVHIQSSNAPRKNEGLVQQSISANRQKNGTSIRHSESLTTFAQRTVGGFPPAPSTEEKFKAARPLSNTEAAPRKEGIGQRISNISILVPKRTENTNRDVAKKEVGTSSPLPPNPANAMHKGNDKVGRPMENTQVPMQRFGSPSMSTAAVGMDRGTPRSSIPSPSITIRRPNGIVRPPKNISVSSKKPDAGDVSPAIGKEKEQGGRLLQANISTDQKLVMSKPPAVEKAAHGSAERTEKVSRDGVPDVAKKEDKKSDRHEKKKRKEKDKHKERKKEKEAKKEKEKHNYKEHDKTRENNISYPVDSLNLKPSATPVAPPVDGGKSVVPDENLKKRKNHETNGYLQNHLEMRPTKLPRPALPINLVENGTASHVAAPLSSVKPEAIINNIEKAERLHKEEKMNGPLPPERAPVDPVAA

SEQ ID NO: 59050 - protein, 568 aa, Zea mays
  Coding DNA Sequence Number=SeqID_17271
  Gene Ontology: Mol. function=zinc ion binding
  Homolog annotation: Hit_ID=Q69L44; Match level="QueryCoverage=99%, HitCoverage=92%, E-value=1e-180, Identity=79%"; Hit description=SWIM zinc finger family protein-like
  Pfam annotation: Domain name=SWIM; Domain location=418-454; Score =14.2; E_value=0.014; Accession=PF04434.8; Description=SWIM zinc finger
MEAFIAGESNNPECPTRFHIERGPQAYWCSFGPENYGEGGTILPSRKYRLNTRNRAARPQSMRGCTCHFTIKRLYARPSLLLIIYHERRHVNKSGFICHGPLDRDAIGPGARKMPYIGSEIQQQTMSLIYLGVPEENILQTHIEGIQRYCSKDAKVDNLASQYVQKLGMIIKRSTHELDLDDQASIRMWVDRNRKSVFFYQDSTEADAFILGIQTQWQLQQMMRFGHQSLLASHSSFGVSKLKYPLHTLLAFDSRQHALPVAWVITRSVTKKDTLKWMSTLTDRIHSIDSTWGIGGFIIDDPASELGPIREVFACPVLFSMWHIRRTWLKNVIKKCSNVELDALQRVDWLVHKLTTELHSSYWINLFADESGSFPEVKADYIASTSWQRALQIPDDAVTFDDKDPLVARVVSQKETSQTRTVWSPGSEFSLCNCSWSMQGNLCKHVLKVNMVCGARKDFQPSLSFQSFQHVLLDLWQKPLDDSFSLDLSVARVMQMQEKIKHVAELATSSGIAQVAGKLPMQWTKKRGRRVGVKPTSALLLPRSKGSLQKDLTPKNSRKRKRLSRFKG

SEQ ID NO: 59051 - protein, 556 aa, Zea mays
  Coding DNA Sequence Number=SeqID_17272
  Gene Ontology: Mol. function=receptor activity; Cellular component =membrane; Biological process=Golgi organization and biogenesis
  Homolog annotation: Hit_ID=Q84LH7; Match level="QueryCoverage=92%, HitCoverage=63%, E-value=0.0, Identity=73%"; Hit description =Putative conserved oligomeric Golgi complex component
  Pfam annotation: Domain name=COG2; Domain location=1-554; Score =152.3; E_value=1.3e-42; Accession=PF06148.2; Description=COG (conserved oligomeric Golgi) complex component, COG2
MTVHLIYFPNSRLFLNEFTVEKLIKELPTAPSDLSNAEVPNSDTGTPNGVAGTGVSETQSILLERIASEMNRLKFYISHAQNLPFIENMEKRVQGATKLLDGSLERCFVDGLEHRDAKVIYNCLRAYAAIDNTSSAEELFRTAVVSPLIQKIIPQNYARAVAGASSDELEEDYQQIKECVQKDCKFILEISSSENSGLHVFDFLGNSILKEVLSTIQKGKPGAFSPGKPKEFLRNYKASLGFLDFLEGILRLRLDYFAANYVEPEPGSTISFFHPFVPQAPQSNISSFFNGYCISKSAVTKFRSELAYTDFMRQWNVGVYFSLRFQEIAGGLDSTLTNTFSPTGLNEAQGKPLLLKQSIKLLESLDSCWSDEVLVFSHCDKFLRLSLQLISRYTTWLSSGLTARKASDGSPNSPADAEWALSIPIEDFIYIMHDVHAVIGELSESGSFIGHVNQLLGSCPIEVFNLVKQSILQAVEPLKERLPAIINVMIGIIVKKSNEDLKHLKGITATYRMTSKLPVRHSPYVSGILHPLKVTEPPVLPFFYDLYSTNSSKAAD

SEQ ID NO: 59052 - protein, 245 aa, Zea mays
  Coding DNA Sequence Number=SeqID_17273
  Homolog annotation: Hit_ID=Q2QQY1; Match level="QueryCoverage=23%, HitCoverage=26%, E-value=2e-09, Identity=52%"; Hit description=SAM domain family protein
  Pfam annotation: Domain name=SAM_1; Domain location=174-229; Score =28.8; E_value=1.9e-05; Accession=PF00536.20; Description=SAM domain (Sterile alpha motif)
  Pfam annotation: Domain name=SAM_2; Domain location=173-240; Score =19.6; E_value=0.011; Accession=PF07647.7; Description=SAM domain (Sterile alpha motif)
  Pfam module annotation: Pfam domain module=SAM_1::SAM_2; Domain location=174-229::173-240
MADLRPPEPGTNGSSAVVVAALPAVEAAKAAAAAAAAACGAQPPAPPYSKRRRRPSVRLGDIDAPPPRRNHKPSSSSHSRPPRRPHPDDPDTHGGRGPKPPAQRRPRTAWIPAGPAEGCYDDEERYYDDEDQSDSAAAAAAAAAMARVSGSRDAGGDESDGVADWGLPNGRLSSAMRHGRVKAWLDGLGLSRYAPVFEIHEVDGEVLPLLTLEDLKDMGIGRCWVQEEDVCRHPQAPERQRVLRW

SEQ ID NO: 59053 - protein, 528 aa, Zea mays
  Coding DNA Sequence Number=SeqID_17274
  Gene Ontology: Mol. function=oxidoreductase activity; Cellular component=integral to membrane; Biological process=electron transport
  Homolog annotation: Hit_ID=Q8S845; Match level="QueryCoverage=84%, HitCoverage=84%, E-value=1e-132, Identity=55%"; Hit description =Putative flavonoid 3'-hydroxylase
  Pfam annotation: Domain name=p450; Domain location=44-524; Score =116.6; E_value=7e-32; Accession=PF00067.12; Description=Cytochrome P450
MELFVTTPDLPTPLLLSTLTIVSVVVCYVLFWKQQAAARRAPLPPGPRGWPVLGNLPQLGGKTHQTLHEMTKVYGPLLRLRFGSSTVVVAGSAAVAQQFLRAHDANFSSRPPNSGGELMAYNYQDVVFAPYGAPGGRAMRKVCAVNLFSARALDDVRGVREREAALMGEGRSRSRPTAASTRRRRRCRLARPSTWGGVLNVGDFVPALRWLDPQGVAAKMKKLHRRFDDMMDEIIAGYREARRVAADGEESKDLLGLLLSMVDERPFDSGEEVRITETDVKALILLTQQFRTKRISSFSLILSFMLARGHVRQNLFVAGTDTTSTIVEWSLAELIRHPEILRQAQEEMDAVAGRGRLVTESDLRSLTFFNAVIKETFRLHPSTPLSLPRMAAEECEVAGYRVPRGSELLVNVWGIARDPALWPDPLEFRPARFLPGRVACGTWTSKAPTSGSSRSAPAGGSAPASAGGCGWSRSPAPPWCTRSTGSCRQGRRRTKLNMEEAFTLLLQRAVPLVARPVPRLLPSAYEIA

SEQ ID NO: 59054 - protein, 257 aa, Zea mays
  Coding DNA Sequence Number=SeqID_17275
  Subcellular localization annotation: CTP_CleavageSite=48; ConfidenceScore=5.06e-01
MQEFPCRTAIAAKSSRGSPYTDHSPTALAPFGVSGHGEERTRGGDRTAASNSSRPEAPQFELSTPATSWVPGERPKFLSFARSTVYRDAEASVFIPEGKSRSQPPTYRRESRRSPRRRGDRRPVEIGAESVWRRRAGRRLRPDFQGMASTDSADRGTPAMRAERSAAACGSRDDKAVTKLTEREIQGSVICRWNRSSRTRSCRGARGSVALLLGARVRREGDGSDEEVPHISVGPRKARTCGVAGQRAPPVSEMSAG

SEQ ID NO: 59055 - protein, 269 aa, Zea mays
  Coding DNA Sequence Number=SeqID_17276
MARRTSSTLLAEHGGARSSRGGTRRRGIDGEYAGGVLPVVSARRVSGHGEERTRGGDRTAASNSSRPEAPQFELSTPATSRVPGERPKFLSFARSTVYRDAEASVFIPEGKSRSQPPTYRRESRRSPRRRGDRRPVEIGAESVWRRRAGRRLRPDFQGMASTDSADRGTPAMRAERSAAACGSRDDKAVTKLTEREIQGSVICRWNRSSRTRSCRGARGSVALLLGARVRREGDGSDEEVPHISVGPRKARTCGVAGQRAPPVSEMSAG

SEQ ID NO: 59056 - protein, 726 aa, Zea mays
  Coding DNA Sequence Number=SeqID_17277
  Gene Ontology: Mol. function=nucleoside-triphosphatase activity; Cellular component=integral to membrane; Biological process=protein catabolic process
  Homolog annotation: Hit_ID=Q8S2A7; Match level="QueryCoverage=78%, HitCoverage=72%, E-value=0.0, Identity=75%"; Hit description =Putative AAA-metalloprotease FtsH
  Pfam annotation: Domain name=AAA; Domain location=340-530; Score =312.6; E_value=7.2e-91; Accession=PF00004.19; Description=ATPase family associated with various cellular activities (AAA)
  Pfam annotation: Domain name=AAA_2; Domain location=337-469; Score= -28.5; E_value=0.0013; Accession=PF07724.4; Description=ATPase family associated with various
  Pfam annotation: Domain name=AAA_3; Domain location=340-472; Score= -20.7; E_value=0.06; Accession=PF07726.2; Description=ATPase family associated with various
  Pfam annotation: Domain name=AAA_5; Domain location=340-476; Score= -6.3; E_value=0.0053; Accession=PF07728.4; Description=ATPase family associated with various cel
  Pfam annotation: Domain name=FtsH_ext; Domain location=138-314; Score= 112.8; E_value=1e-30; Accession=PF06480.5; Description=FtsH Extracellular
  Pfam annotation: Domain name=Peptidase_M41; Domain location=537-667; Score=88.7; E_value=1.8e-23; Accession=PF01434.8; Description =Peptidase family M41
  Pfam module annotation: Pfam domain module=AAA::AAA_2::AAA_3::AAA _5::FtsH_ext::Peptidase_M41; Domain location=340-530::337-469::340 -472::340-476::138-314::537-667
  Subcellular localization annotation: CTP_CleavageSite=20; ConfidenceScore=5.54e-01
MTLASLARALGRSARSSRPRQASIPSQVLIPSPAPLSSSRRSDLSLLLLGYLTAASSAALGKPSAGKTVDWRYVLASPHFRRLFSDGSKKNYENYYPKGKKEVPKGDGTNKSESKPEVAEVAVDHIEERAPVLTRRIAHISFQEFKNKLLEPGLVDRIVVSNKSVAKVYIRSSPHPKSQGQDSDIHITTTDAPGKPAPSRCKYYFNIGSVDLFEEKLEEAQEALGIDPHDFVPVTYVAEVNWFQEVMRFAPTALIVGLLYFTGKRMQSGFNIGGGAGKGRGGIFNIGKATVMKMDKNSKNKVFFKDVAGCDEAKQEIMEFVHFLKNPKKYEDLGAKIPKGALLVGPPGTGKTLLAKATAGESGVPFLSISGSDFMEMFVGVGPSRVRNLFQEARQCAPSIVFIDEIDAIGRARGRGGFSGSNDERESTLNQLLVEMDGFGTTSGVVVLAGTNRPDILDKALLRPGRFDRQIAIDKPDIKGRDQIFRIYLKKLKLDNKPSFYSQRLAALTPGFAGADIANVCNEAALIAARSEETQITMQHFESAIDRIIGGLEKKNRVISKLERRTVAYHESGHAVAGWFLEHAEPLLKVTIVPRGTAALGFAQYVPNENLLMTKEQLFDMTCMTLGGRAAEEGFRFEGPNYCRFGVGFNTNRRVSHGPRTTYSDRLTVTQPTSTHQPITYPSRPTPKSVKIQGAKTPSRQYPNPSAASPAGLLPHWSSTALGLCI

SEQ ID NO: 59057 - protein, 92 aa, Zea mays
  Coding DNA Sequence Number=SeqID_17278
  Gene Ontology: Mol. function=transferase activity; Cellular component= membrane
  Homolog annotation: Hit_ID=Q33AH8; Match level="QueryCoverage=59%, HitCoverage=18%, E-value=8e-13, Identity=51%"; Hit description =Exostosin family protein, putative, expressed
MGVFVAEDDVPRLDTILTSIPVEVPGDAFHQILNGLARKLPHGDDAFLRTEQTVLVYNRNYFGYFDFRKNETKITIDSFGFGYFGFWAAQAY

SEQ ID NO: 59058 - protein, 38 aa, Zea mays
  Coding DNA Sequence Number=SeqID_17279
MGDRTASNYSSEQMFRRKSAPRRGRRHPNDHPWNLNNS

SEQ ID NO: 59059 - protein, 56 aa, Zea mays
  Coding DNA Sequence Number=SeqID_17280
MSHAFDDYYIKDYGVISAPELLLKSRPSPRHAFAGAQALSQIVSANLDVGPLPAGG

SEQ ID NO: 59060 - protein, 60 aa, Zea mays
  Coding DNA Sequence Number=SeqID_17281
MSHAFDDYYIKNYGIISAPELLLKSRPSPRHAFAGAQALSQIVSANLDVGPLPAGGQRSP

SEQ ID NO: 59061 - protein, 148 aa, Zea mays
  Coding DNA Sequence Number=SeqID_17282
  Gene Ontology: Mol. function=kinase activity
  Homolog annotation: Hit_ID=Q6QP54; Match level="QueryCoverage=53%, HitCoverage=40%, E-value=9e-14, Identity=43%"; Hit description =Putative kinase
MEKPSSSRAPHASSVVSRRSAGEAEDGELRSARPRARTWAQPQKTTNSASPDPWGSDSALASAVGLRLARPRGSDSTSATEDRLDLGFGGAYTSPNLGRKPATSTGGAIITLPRADSGHGNKTGIPSGSLSFGRRQTPLRPTQGSDSG

SEQ ID NO: 59062 - protein, 118 aa, Zea mays
  Coding DNA Sequence Number=SeqID_17283
MAGWASSGGLEDERWRDGGWAGGGVRVRRAACGAWCGRPAGRQGESRRERDASPACGVRLAASGLRRGRVAACDPVVRWACRVRWCRAAGETGRVAMFFLHGLGLTDYGLELELAILQ

SEQ ID NO: 59063 - protein, 209 aa, Zea mays
  Coding DNA Sequence Number=SeqID_17284
  Gene Ontology: Mol. function=sequence-specific DNA binding; Cellular component=nucleus; Biological process=regulation of transcription
  Homolog annotation: Hit_ID=Q2HTS9; Match level="QueryCoverage=72%, HitCoverage=65%, E-value=1e-21, Identity=43%"; Hit description=DNA -binding WRKY; VQ
  Pfam annotation: Domain name=VQ; Domain location=54-84; Score=48.1; E_ value=3.1e-11; Accession=PF05678.4; Description=VQ motif
  Subcellular localization annotation: CTP_CleavageSite=62; ConfidenceScore=5.65e-01
MALGPNSPSSSTSSSSPSSAAAAASSPSPRQQHPHAPAPPSPTPRPVPRIIDTTPFPTTFVQADTASFKQVVQRLTGSDTPPPPHKPVKSYPHHHGSGPKKPAFKLYERRIGKSNLKMIAPLAMAAAAAPPEALSPSVLDFPSLALRSPVTPLLPDPFNRSQGAEEDEEAAERAAIARTGFFLHPSPRGAEPPPRLLPLFPVTSPRMAQ

SEQ ID NO: 59064 - protein, 288 aa, Zea mays
  Coding DNA Sequence Number=SeqID_17285
MMRPVEQGPWPAAVEHERGAVDGATASAWDPSADGEVEARLGGLIDGARAGELGGLAASTTAHRRHDADDEAKRDMAQGELAGTRWEWEDAMEHTYTAAASRRRSGGATSSSREARASSIVLIWSVMGGWASGFGRQHERWAGGALGQMAEMVQGRGSGCGCAGWVEGEGALLSWGVVGPTCHGHAWVVTSLWASCEGCRTEPARRCVGRSWAAEPRLPRWADELATDRAAPSRQAIEPNDHYNSEGRGETGVGDSPGMVGRAGREGVLVGETWNRQRREQERESQWR

SEQ ID NO: 59065 - protein, 117 aa, Zea mays
  Coding DNA Sequence Number=SeqID_17286
MGTAQQHASREDTESRAMARMLKGVCCSTPWGVGGVAAGALSAGHGETSCSHGAEGALGGDELGAEFLRRERGGVGEGMGRDAVDLGCLEADSNGGLGELGHGAPARREEKAPCCPA

SEQ ID NO: 59066 - protein, 149 aa, Zea mays
  Coding DNA Sequence Number=SeqID_17287
MGKSKKSGSSSHHSGDKRKREPTPPSEEFGDSEYSEEEFSSKSEGSPVHASPPESFDDSNDSQGIVAEVWTYIRALERSGLEGSDESEVSSDEENSSDSSEEGSGGDGDDEGDGDDGGDNDGDGDGGKGDDKGSSGSGSGKASGKAPLA

SEQ ID NO: 59067 - protein, 232 aa, Zea mays
  Coding DNA Sequence Number=SeqID_17288
MTAHWRHDADDEAKRDMAQGELAGTRWEWEDAMELTYTAAASRRRSGGTTSSYRKTRASSKVLIWSVMGGWASGFAGQTAREVGWGRAGPNVRDGTGRGQRLRMRLRRVGRGGGRAVGWGAVGPTRHGHAWAVASLRASCEGCRAEPARRCVGRSWAAEPRLPRQAAELAADRVVPSLQAIEPDDRYSAEDRGETGVGDSPGMVGRVGREGVLVGETWNRQRREQESESQWR

SEQ ID NO: 59068 - protein, 74 aa, Zea mays
  Coding DNA Sequence Number=SeqID_17289
MSGEADRPSRCGLVLGMVKCGPCSGEVRERKDVGKEEKGEILRFCDRWRTNQGMFALDHLGLTSTSTSTFDSSG

SEQ ID NO: 59069 - protein, 111 aa, Zea mays
  Coding DNA Sequence Number=SeqID_17290
MESNGLRLYPYYLIVYGTIFVPRGGLSAALDSPTYRTRRFMGGLDGLRLYLDRLVGVETLGTPLRGARPSAVGHQTIRYGTDNYTLLCGYADHLRVGGGPSTMGQRASRRT

SEQ ID NO: 59070 - protein, 79 aa, Zea mays
  Coding DNA Sequence Number=SeqID_17291
MWRSMKHVIPLQVDEGAPPKYRSMKPAIPLHHVLQTIVSLSPKNPPQKSSFALSQLRKFVSYERNIQRAFAPQSAALPG

SEQ ID NO: 59071 - protein, 49 aa, Zea mays
  Coding DNA Sequence Number=SeqID_17292
MLTHFLKNKVKVREVKLLSGLKNELRISHIEHNEVLMKIILNEHVKSLR

SEQ ID NO: 59072 - protein, 77 aa, Zea mays
  Coding DNA Sequence Number=SeqID_17293
MKMRAPVVAFAALLMPLLVATRAHEGIRLDMLLHDVINSSKEGDKLTTGEPAPSQDRSSESGDGCGVYDMGGKRCSL

SEQ ID NO: 59073 - protein, 125 aa, Zea mays
  Coding DNA Sequence Number=SeqID_17294
MPRPGAASARRRCGPGAASAAAVVVGGWGGGAEAEGEVVRAPSAETEEGRRPSADPSADPEGGAGQGGVGDVVRGVELHEAGVAVDGGEREGGWGSAGRLRQNRAPLQADGPQADGPPALSTNTS

SEQ ID NO: 59074 - protein, 244 aa, Zea mays
  Coding DNA Sequence Number=SeqID_17295
  Gene Ontology: Mol. function=transcription factor activity; Cellular component=nucleus; Biological process=regulation of transcription, DNA-dependent
  Homolog annotation: Hit_ID=Q67VJ6; Match level="QueryCoverage=54%, HitCoverage=27%, E-value=3e-38, Identity=63%"; Hit description =Aintegumenta-like protein
  Pfam annotation: Domain name=AP2; Domain location=84-125; Score=5.8; E_value=0.00013; Accession=PF00847.10; Description=AP2 domain
MVDWGKGWNCTFLYWEGLQFSFLVHYPILFHLELKIQGQTCLAAPEIGNQYSTHFPNLNLKLTRDSYLLKTENDSSPPPDASSVRPDWFCTPSGTQEEATEAYDIAAIKLRGLNAVTNFDMSRYNVESILSSDLPVGGGATGRAAKFPLDSLQPGSAAAMMLAGAAAASQATMPPSDKDYWSLLALHYQQQERQFPASAYEAYGSGGVNVDFTMGTSSGSYLKPGGRPRKKLSEREIGIKPFPK

SEQ ID NO: 59075 - protein, 345 aa, Zea mays
  Coding DNA Sequence Number=SeqID_17296
  Homolog annotation: Hit_ID=Q9ZNU3; Match level="QueryCoverage=29%, HitCoverage=31%, E-value=3e-07, Identity=36%"; Hit description =Putative extensin
  Subcellular localization annotation: CTP_CleavageSite=93; ConfidenceScore=5.36e-01
MADDQQPPTQRIWFPYWTAPAPAHGPRPAARPQLSRRESRPAPQASPPPTTASTGAGGGVPAPPAQPTPLSSRPSPPPARAPPLSPIGEPNARAPEPSPVPVAKQHRPPSPLRPNYIARDVPKQKDIVVPQEKTIQEPALVASKTPAKAPEKEKEDKEKREEEKTKEKDKGHKMKKEKDHEEKQEKDKEKEGGQPHKELKAGVADMVRKLGTPAPSSGGGHERAGSAAAEGTTIITLAGENKGASMKVDGSAVADGRADAAGSKERRGRTLDGSAVVSGTERAWGGRGFTAFVNSNVQVINNSLLLQSSCNGGGPGVHLKLSTKAKKKDGEGAGGKSGSAAAPKK

SEQ ID NO: 59076 - protein, 114 aa, Zea mays
  Coding DNA Sequence Number=SeqID_17297
MLVNHTTILDGPSVSIEGPAQQGVESVEEMTTARSIISDGSCDPYLWLLLLQELHAVARTATIVVMSVCARVSSSNRDSLGWCRGHLWQIGPSQAADWGSATNTTRTHRSPETP

SEQ ID NO: 59077 - protein, 141 aa, Zea mays
  Coding DNA Sequence Number=SeqID_17298
  Pfam annotation: Domain name=zf-CCHC; Domain location=25-42; Score =11.4; E_value=0.013; Accession=PF00098.13; Description=Zinc knuckle
MALVASQFTRFHNNHQKRRHGGSKDGCFNYSNPDHYIASCPKKGRQEDGLRDHHSGHCKGKRENSSNKYKFKGGFDKEALKNKYFQKAKIKEHTFLTFLSDLNQDTDDAMSSSSIMETDRRVEDKLNRLYFLIESCLEGHE

SEQ ID NO: 59078 - protein, 52 aa, Zea mays
  Coding DNA Sequence Number=SeqID_17299
MARVVCTLCGKRLDGGVSVLSVKKRQTFVASVLRWYQKMKTRSKAARGMDPP

SEQ ID NO: 59079 - protein, 100 aa, Zea mays
  Coding DNA Sequence Number=SeqID_17300
  Subcellular localization annotation: CTP_CleavageSite=46; ConfidenceScore=5.38e-01
MAEPPSSLAAQLTVQGAQKILAASSTADLRSKLHAAAACSFASRVECSTNRRSEPRPPASLWSPMRDDAFVFTPHVQQPRRRFDMVLYERYRSPIIIGSE

SEQ ID NO: 59080 - protein, 144 aa, Zea mays
  Coding DNA Sequence Number=SeqID_17301
MAGCSAFHDEVRTRMGTEEGAISSEKPSSHCISATTGLTQSITMEPLAHDSVEDARERTAESGGAREENGGGGGGGGQQRAGASAEGAPWMECWGRHGGGATVSRHGWKYSRIWRGGGAAAIEGLADLARRERRGMRDPAPWME

SEQ ID NO: 59081 - protein, 247 aa, Zea mays
  Coding DNA Sequence Number=SeqID_17302
  Gene Ontology: Mol. function=transcription regulator activity; Cellular component=nucleus; Biological process=regulation of transcription
  Homolog annotation: Hit_ID=Q941Z7; Match level="QueryCoverage=88%, HitCoverage=89%, E-value=7e-61, Identity=61%"; Hit description=BHLH transcription factor-like
  Pfam annotation: Domain name=HLH; Domain location=72-124; Score=57.0; E_value=6.1e-14; Accession=PF00010.16; Description=Helix-loop-helix DNA-binding domain
MDHQLFDDPFGSSISSLEAEIFSAAAQLPPSPPWPDIDLDDDYDIHDLSAPAANAATSSGGGYGSGGSGGHRKLSHNAYERGRRKQLNELYSSLRSLLPDADQTKKLSIPTTVSRVLKYIPELQKQVDNLERRKKELTNANCKPGVLKTTKAVTPIVSATCLNDTEIMVQVSLHSDVAATALPLSKCIKVLENEGLHLVSSSTYSSAFENKTFYSLHLQFQAPNPQARGVTGSLSISRIRERPQQTK

SEQ ID NO: 59082 - protein, 107 aa, Zea mays
  Coding DNA Sequence Number=SeqID_17303
MCDSGVLEDGNAGGRSGPSFWLSGHAWNILDGAGAQPALALPERFSTRDGRAPEKVGEATTWPGCSSEMDGTKRVVGGEWWAAIAKPSTAKATQPTGLDERHHQTND

SEQ ID NO: 59083 - protein, 62 aa, Zea mays
  Coding DNA Sequence Number=SeqID_17304
MRSSDPSRTAATTHLAEPNLSWNDSEYNPTQTKKILYCLVTIWALINKNHSRKARMDEWKTR

SEQ ID NO: 59084 - protein, 235 aa, Zea mays
  Coding DNA Sequence Number=SeqID_17305
  Subcellular localization annotation: CTP_CleavageSite=60; ConfidenceScore=5.42e-01
MVALQRGHPPFKDGPPYSRPQLSRAESSPTHSKVLPYGVGAGSHTSCKPTQGRRSQTAARGAHNRPTVTSDPPLFAQTNGRKGGQPCRRHATAPSGRAPPTPNTPDIEAQAHASCNRCAVCYVRSRRRFPFAKMNASKKGPGKGDTPKRILPREGTRLRAPLLIRGSKAGPPEGFNSRFRSRGPYTHYWSGVRRPAPRKGSTTASGCSGSAPNTDQGFEGWPPKGSQPPQTPSEG

SEQ ID NO: 59085 - protein, 122 aa, Zea mays
  Coding DNA Sequence Number=SeqID_17306
  Gene Ontology: Mol. function=structural constituent of ribosome; Cellular component=ribonucleoprotein complex; Biological process =translation
  Homolog annotation: Hit_ID=O48557; Match level="QueryCoverage=82%, HitCoverage=88%, E-value=6e-19, Identity=40%"; Hit description=60S ribosomal protein L17
  Pfam annotation: Domain name=Ribosomal_L22; Domain location=13-100; Score=-4.2; E_value=2.7e-05; Accession=PF00237.9; Description =Ribosomal protein L22pL17e
MGAPAREDRVSVAIIRSTMWAVRNIRETTFVLHKLSMAKAKRYLDDIIAHRQSIVFRRYCGLVVDNLYVSLIQVNLAQKQHRHIDTYMSSPCHSELFLLEKEDPMKKEVRKRVKRSESRWGR

SEQ ID NO: 59086 - protein, 88 aa, Zea mays
  Coding DNA Sequence Number=SeqID_17307
MQAACNRARWARPSDFQCTPSMEAQAHTSCNRRAGCYVQSIAPPLAPLPRLLDCGTSTATRGNPADRERGIPRKGSFSVKETGPEPPY

SEQ ID NO: 59087 - protein, 72 aa, Zea mays
  Coding DNA Sequence Number=SeqID_17308
  Subcellular localization annotation: CTP_CleavageSite=66; ConfidenceScore=5.59e-01
MARRTAPASLPSFSLTPDSLAVPLSWISSWTLPRPTVRRSRRHTLRHRTEPVPTRHRPPPPRAPPRSAKGSQ

SEQ ID NO: 59088 - protein, 259 aa, Zea mays
  Coding DNA Sequence Number=SeqID_17309
  Gene Ontology: Mol. function=sialyltransferase activity; Cellular component=integral to Golgi membrane; Biological process=protein amino acid glycosylation
  Homolog annotation: Hit_ID=Q4JEZ1; Match level="QueryCoverage=99%, HitCoverage=59%, E-value=3e-67, Identity=49%"; Hit description =Sialyltransferase-like protein
  Pfam annotation: Domain name=Glyco_transf_29; Domain location=1-247; Score=-31.1; E_value=3.2e-05; Accession=PF00777.9; Description =Glycosyltransferase family 29 (sialyltransferase)
MAELVDLIKRPLDRWHYGVGAGATDSDDGRRPYASCAVVGNSGILLAREHGALIDGHDLVIRLNNAPAGAGRYARQVGARTGLAFLNSNVLSRCTTAGCRHCRAYGDRVPILTYMCNAAHFVEHAVCSAGASAPVIVTDPRLDSLCARLAKYYSLRRFVRETGRPAEEWGTRHEEGMFHYSSGMQAVVAAAGVCGRVSVFGFGKDPGARHHYHTLQRGELDLHDYEAEYEFYRDLEARPEAIPFLRDSGFRLPPVVVYR

SEQ ID NO: 59089 - protein, 37 aa, Zea mays
  Coding DNA Sequence Number=SeqID_17310
MKLKNHKYLPSCIDIQDIGWKEYNHNFPGRSGHRAVV

SEQ ID NO: 59090 - protein, 328 aa, Zea mays
  Coding DNA Sequence Number=SeqID_17311
  Gene Ontology: Mol. function=hydrolase activity; Cellular component =nucleus; Biological process=metabolic process
  Homolog annotation: Hit_ID=Q0ZPV0; Match level="QueryCoverage=93%, HitCoverage=96%, E-value=2e-55, Identity=38%"; Hit description=CXE carboxylesterase
  Pfam annotation: Domain name=Abhydrolase_3; Domain location=96-305; Score=162.1; E_value=1.4e-45; Accession=PF07859.3; Description =alphabeta hydrolase fold
MEAGAGEAAPSAPRRLTLPWKVRLLLLCLDVVAGLSMRRDGTINRSIFNLFDLRATASTRPDRQGVRSADVDASRGLWARVFWPSPESSAAPLPVVVYFHGGAFTLLSAASWAPSSCPSTTASHPSTAGPAAYEDGVAMLRYLASAGLPDSVDVPVDLSRCFLAGDSAGANIAHHVAQRWTTASSPPRSIPVHLAGAILVQPYFGGEERTEAEVRLDGNVPVVTVRGSDWMWRAFLPEGADRNHSAAHVTDDNADLADGFPPVMVVIGGFDPLQEWQRRYADVLRRRGKEVRVVEFPDAIHTFFLFPELTDHGTLVEAMKAFIREQRI

SEQ ID NO: 59091 - protein, 53 aa, Zea mays
  Coding DNA Sequence Number=SeqID_17312
MAFRCFQALLSNSLEIAESKEGNTREAYRSMKKDYTRKLKRLVWLPSKDSRSI

SEQ ID NO: 59092 - protein, 75 aa, Zea mays
  Coding DNA Sequence Number=SeqID_17313
MTWQGHRTVRFALFTPPLGDYQHFRNQGCQTDKEDDPPPPLPALGLDNLSNIEKISLADLDKLLEGFGDALGGDA

SEQ ID NO: 59093 - protein, 46 aa, Zea mays
  Coding DNA Sequence Number=SeqID_17314
  Gene Ontology: Mol. function=acyltransferase activity
  Homolog annotation: Hit_ID=Q2QX46; Match level="QueryCoverage=80%, HitCoverage=13%, E-value=5e-14, Identity=97%"; Hit description =Expressed protein
MGTLGRAIFTVGKWIRGTGQAMDRLGSTIQGGLRVEEQGPASARSG

SEQ ID NO: 59094 - protein, 179 aa, Zea mays
  Coding DNA Sequence Number=SeqID_17315
MLELETLSLSKCADQDTRFLDAQGRNRDLRLLDIPDRVLVALAIVQLHIGSDLHSAISLLKGLSFTLLPCILSVGMRGGEPYHTFLDGLSMALGEIKMGNSSETLVLGSHQRKGPLVFTPFRRQGQLEGYPGSESYVTCFIELIQRVLEAQVIPFIHIRLHLWGAILKIDGEDRRPHKP

SEQ ID NO: 59095 - protein, 75 aa, Zea mays
  Coding DNA Sequence Number=SeqID_17316
  Gene Ontology: Mol. function=RNA-directed DNA polymerase activity; Biological process=RNA-dependent DNA replication
  Homolog annotation: Hit_ID=Q8W0Y2; Match level="QueryCoverage=98%, HitCoverage=3%, E-value=5e-20, Identity=65%"; Hit description =Putative gag-pol
MVKTKQSEGLVSDLGLTFDRLKANNIKLNPKKYLFGVPRGMLLRFLVSERGIEASPEKVAAILNMGLIEDLKRVQ

SEQ ID NO: 59096 - protein, 345 aa, Zea mays
  Coding DNA Sequence Number=SeqID_17317
  Gene Ontology: Mol. function=hydrolase activity; Cellular component =nucleus; Biological process=metabolic process
  Homolog annotation: Hit_ID=Q0ZPW9; Match level="QueryCoverage=96%, HitCoverage=94%, E-value=1e-67, Identity=42%"; Hit description=CXE carboxylesterase
  Pfam annotation: Domain name=Abhydrolase_3; Domain location=85-316; Score=248.1; E_value=1.9e-71; Accession=PF07859.3; Description =alphabeta hydrolase fold
MSSLPWMVRIQAAAFQVAQRRDGSIWRPLLFLGDLKTAASRATPSPDTSEVRSTDITIDVSRGLWARVFCPTAIADDAPAPLPVFVYFHGGGFMLFSASFGPYDTFCRRLCRKLRAVVVSVNYRLAPEHRFPAAYDDGVATLRYLDETPTPLLADIVPAPVDLASCFLIGDSSGGNMVHHVAQRWASMSSATSLQPPLRIRRLRLAGAVLIQPFFGGEERTEAEVRLDKACRILSVARADRYWREFLPEGASRDHPAARVCGEGVELADTFPPAMVVTGGIDLLKDWHARYVETLRGKGKLVRVVDYPDAFHGFYVFPELADSGKLIEDIKLFVDDHRTKASGSD

SEQ ID NO: 59097 - protein, 162 aa, Zea mays
  Coding DNA Sequence Number=SeqID_17318
MRHPSAAASPPSAPPGLSLEQNRVWVVASGSEPVEERAGKGRMSMEGLPDPGNEEERGQARAEEVSGGGTEQMALGLECWRNGGDGRAYLRRRRCELMVAVEGGVQTLKANTYGHGIAVASSRRGASAASGRSVVARLHPEAWPTDAAQEVARLGTLDSFWW

SEQ ID NO: 59098 - protein, 103 aa, Zea mays
  Coding DNA Sequence Number=SeqID_17319
MALGKSATFAECLGHDTRQRKVPRALGIVPLPSARAKALGKASTFVKCYVQSTQQRKALGDLSIVPVPSVRGRHSAKPPLPSALALALDKLGFFAECNTRQSG

SEQ ID NO: 59099 - protein, 124 aa, Zea mays
  Coding DNA Sequence Number=SeqID_17320
MGKSKKGGSSSHHSGDKRKREPTPPSEDFGDSEYSEEEFSSESEDVWTYIRAIECAGLEGSDESEVSSNEENSSNSSEEGGGDGDGEGDDDDGGDDDGDGGEGGDKGGSGDGEGGSKGSNRASG

SEQ ID NO: 59100 - protein, 123 aa, Zea mays
  Coding DNA Sequence Number=SeqID_17321
  Pfam annotation: Domain name=DSS1_SEM1; Domain location=56-118; Score= 111.3; E_value=2.8e-30; Accession=PF05160.4; Description=DSS1SEM1 family
MNRKRGDEALAEPITTIFWVASKDERTERNFSPELSLELGSRMEKPAFMAATPADAKTEAAKMDLLEDDDEFEEFEIDQEWDEKEEGNEAVQQWEDDWDDDDVNDDFSLQLRKELEGSNAQKS

SEQ ID NO: 59101 - protein, 319 aa, Zea mays
  Coding DNA Sequence Number=SeqID_17322
  Gene Ontology: Mol. function=methyltransferase activity; Biological process=metabolic process
  Homolog annotation: Hit_ID=Q00TN0; Match level="QueryCoverage=75%, HitCoverage=31%, E-value=2e-42, Identity=36%"; Hit description =Homology to unknown gene
MDAAVRKAAGAGIARAPALVLALVAAGAFLISYNFFTMLFHGGGGIGAAVTAGTRDPVVAMPAWMRAAADTEARRRPFHVALTATDAPYSRWQCRVMYFWYKRMQARPGGEAMGGFTRVLHSGKPDGLMDEIPTFVVDPLPAGKDHGYVVLNRPWAFVQWLQKAKIEEEYILMAEPDHIFVKPLPNLAHDDDPAAFPFFYITPSEHEKIIRKYYAKERGPVTDIDPIGNSPVIIKKPPFDTKLQNTFIIHFTYGCDYSLKGELTYGKVGEWRFDKRSFPDRPPPRNLTLPPPGVPESVVTLVKMVNEASANLPRWDDGI

SEQ ID NO: 59102 - protein, 98 aa, Zea mays
  Coding DNA Sequence Number=SeqID_17323
MALLYVKLPTHLIPHDLPNYHVSSSSWTICFWLPFGTAHVFRCKGEKRRFYWGDLKMAICSDFRVVGEDRPINDLSWSALKFNTPLRALQCVPRWTEV

SEQ ID NO: 59103 - protein, 78 aa, Zea mays
  Coding DNA Sequence Number=SeqID_17324
MVTSADDNCCGCTDIAVVEAGPDVATIAGCTMTRAMSLYPSYEEEEARPVEGKLGAAIDEGCERLRVVARVIGGAWEV

SEQ ID NO: 59104 - protein, 69 aa, Zea mays
  Coding DNA Sequence Number=SeqID_17325
MEEGATYLERGERMTSGRSGGWSGCVWRLGELTKFINQCNEIKAANLASKEGGDLNIVKADGEESKSKK

SEQ ID NO: 59105 - protein, 184 aa, Zea mays
  Coding DNA Sequence Number=SeqID_17326
  Subcellular localization annotation: CTP_CleavageSite=91; ConfidenceScore=5.04e-01
MALIMLIGDSSTTCHAVWHLAHTPSPGHSPVVPKPPILLVIHVVPNTAALPPMPAAVPTVMLKVTLPPMPTVVPKVGALPLMPVVVPKACEDASGVSEPETQMYARAYLGGPRDAEILKLKQLLDEKAEKNNSAATGFPCLAPEAVLENSTPLSPKRKTPFSHGKGIGQQRFGVLICFLCCFNL

SEQ ID NO: 59106 - protein, 253 aa, Zea mays
  Coding DNA Sequence Number=SeqID_17327
MAKLGTRRRDRGGQTAEGDLGRTEDHFGEQYPPRWGIIWRTEADMSFEERRGEVPYLEAAHGAAWHNTGDFDWPDDEESRGRAHDWLTVTITLNQARSAALPKVTISRGGPSKGATTHTSGVLREGQHEDLRGPLRRPTARLHIMKAQLVGHVTSPWSLGKVMAAGSPELMAFGVTADDLLQVLPLATAKAERDTTYPFVSEGNNNMPTSNPFNMDATGAVLLHRIGIFGTSNRYDPTYGLVASPEMGLRPLL

SEQ ID NO: 59107 - protein, 57 aa, Zea mays
  Coding DNA Sequence Number=SeqID_17328
MTKVYACRRCSKLKKWKTQTNLSSGDKAERERATIQTPSSIVLIFGFSFSSVGIVGL

SEQ ID NO: 59108 - protein, 183 aa, Zea mays
  Coding DNA Sequence Number=SeqID_17329
MGVDVPCAIQHGIGTIDPVPQITSPAILTDWRCVNAITVVSKSRSAMVQEPYPRLSQLVTGSPEHSGDSSTDMADTSLKTMSGPGVQTESVSGTAEPAGSVALESLPTYVLHPNIPPQQLAGQTPPERVPHATANVDHENMHAPATSPRIEDDLVPSSTPSDANTGHAHPYGTRLRHNLRQPK

SEQ ID NO: 59109 - protein, 121 aa, Zea mays
  Coding DNA Sequence Number=SeqID_17330
MDHMGLSHRGSRRGGIRYADSIIHGGNTWMWAPHEISPPRTSWDYGSWHTACKRSPRADAPHAVSLVQIAHRHALRTGIFSLQQLQPHRWLTGWGGARLAGAEAGAGSAGVAGMHGQAVRG

SEQ ID NO: 59110 - protein, 88 aa, Zea mays
  Coding DNA Sequence Number=SeqID_17331
MTQFFEFHEIEDPEHLFGEGNDALLGHLGSGQWGVALSGQKGNHGLWVKDVWFTGGDEDDGYDYAYGTGKEGVEADLQEFQDFDEFED

SEQ ID NO: 59111 - protein, 69 aa, Zea mays
  Coding DNA Sequence Number=SeqID_17332
MARQSGFDPTCRLVTSPKVGAGATVGTLEQGYPLLKYEGADPHDPPDGTRTRLRAVRITHGKVPGWRIP

SEQ ID NO: 59112 - protein, 197 aa, Zea mays
  Coding DNA Sequence Number=SeqID_17333
  Pfam annotation: Domain name=zf-CCHC; Domain location=85-102; Score =20.5; E_value=0.0004; Accession=PF00098.13; Description=Zinc knuckle
MGQEEEPTSSNPYAFACNEHKNMKGKKKAPSSSSSSEEEDKREDGDDEEDDQASTSSSEDEETVWHIGKVEDLLFNIDKKKQRKISCFACGEKDHFRDNCPISVKPKKRSNDKSLTSIKTWDHSSSEDDPPRTRSHRSSSCCSWSSHKCLIARDLIDDSNPYNQVVVKNVVIDTCFEEVSLENELLKQEVARLSKGL

SEQ ID NO: 59113 - protein, 92 aa, Zea mays
  Coding DNA Sequence Number=SeqID_17334
  Subcellular localization annotation: CTP_CleavageSite=38; ConfidenceScore=5.32e-01
MAPKKANTRVNSTLDEATKASLIVKKGKVTSPTQSTTSAENATNATEHKTTNYLGPKATSPQREASTSAAPKACPKSLSQTQKASSSSQCVA

SEQ ID NO: 59114 - protein, 163 aa, Zea mays
  Coding DNA Sequence Number=SeqID_17335
  Gene Ontology: Mol. function=DNA binding; Cellular component=nucleus; Biological process=DNA integration
  Homolog annotation: Hit_ID=O24587; Match level="QueryCoverage=93%, HitCoverage=14%, E-value=3e-65, Identity=75%"; Hit description=Pol
  Pfam annotation: Domain name=rve; Domain location=60-162; Score=-7.9; E_value=0.027; Accession=PF00665.16; Description=Integrase core domain
MGWLWHRRLAHVGKKNLRKLLKGEHVLGLINVCFEKDKSCVDCQAGNQVGSSHHPKNIMTTSRLLELLRMNLFGPIAYLSIGGSKYGLLIVDDYTRFTWVIFLQDKSDTHVTLKRFLRRDQNEFNLRINKIRSDNSSAFKNMEVEEYLEEKGICNIPKKVAKG

SEQ ID NO: 59115 - protein, 101 aa, Zea mays
  Coding DNA Sequence Number=SeqID_17336
MEGERRGNGRGGFWLLTWLGGVQAIRIARCFLVGLLAWRGRRLGRSWRHSGVLGAVLGTAAQARGRARGCAVGVGARGWALLGGSAGWDRLLAARFGEAER

SEQ ID NO: 59116 - protein, 365 aa, Zea mays
  Coding DNA Sequence Number=SeqID_17337
  Gene Ontology: Mol. function=N-acetyltransferase activity; Biological process=metabolic process
  Homolog annotation: Hit_ID=Q6K836; Match level="QueryCoverage=60%, HitCoverage=82%, E-value=1e-101, Identity=81%"; Hit description=GCN5- related N-acetyltransferase (GNAT) family protein-like
  Pfam annotation: Domain name=Acetyltransf_1; Domain location=242-334; Score=73.8; E_value=5.5e-19; Accession=PF00583.14; Description =Acetyltransferase (GNAT) family
MGNKTGVPSGSPRAQALLRRAMTPHGQGLQHLSDSHIDTGFSEKGQWLSVSHPYPFPTIPSLLSCAAAGPARPPCSFSTRASQAASPEAMRGPCPGGGVSASFAPSFNGSRAMIWYELLNFPPFSPPPVKTNPFEISQAGNRICYASQAVELLPTLYPEIVVRDARLEDCWEVADTHCSSFFPGYKFPLDLVLRIDRYIALLSGFSVPPGCMRTCLVAVNSNSVNSSFNIECGDATDANFEKYNLSRGSVAGILTLDTVADYLPRRGPLKQRRTGIAYIANVAVRKEERRKGIAKMLVQEAEARARSWGCRSMALHCDVNNVAALRLYRNQGFKCIRVPEGAKWPEPKIAKGAEYNFMMKLVPKA

SEQ ID NO: 59117 - protein, 334 aa, Zea mays
  Coding DNA Sequence Number=SeqID_17338
  Gene Ontology: Mol. function=nucleotidyltransferase activity; Cellular component=endoplasmic reticulum membrane; Biological process=biosynthetic process
  Homolog annotation: Hit_ID=Q7EYE4; Match level="QueryCoverage=85%, HitCoverage=91%, E-value=1e-136, Identity=84%"; Hit description =Putative CTP:phosphorylcholine cytidylyltransferase
  Pfam annotation: Domain name=CTP_transf_2; Domain location=58-188; Score=144.5; E_value=2.8e-40; Accession=PF01467.16; Description =Cytidylyltransferase
MKPAEDEDAPATAAAQTVWYDPMTSPQAPAPQQQPAIEAAMRGASPSVSSNARPLRVYADGIYDLFHFGHARALEQAKKSFPNTYLLVGCCSDEITHMYKGKTVMTEDERYESLRHCKWVDEVIPDAPWVINQEFIDKHDIDYVAHDALPYADTSGAANDVYEFVKAIGKFKETKRTEGISTSDIIMRILKDYNQYIMRNLTRGYSRKDLGVSYVKEKQLRVNMGISKLREKVKEHQEKVIELLRGYFEAELRVIRKTLTPSVLLRAQFHSAAKIAGTNPVEWMENADRWIVGFLEKFEEGCHMMETAIKGRIQEGLKRQGRSESNLSGEESDS

SEQ ID NO: 59118 - protein, 111 aa, Zea mays
  Coding DNA Sequence Number=SeqID_17339
MPARLACQCIRRLSPPNLVFLEDLPPVFAAIIRGFLFLVGFFVFCWYSIYSSLADTDRKACKSFDDFDISSKAKPDEVHNHPFGNMAETTIASMVYTSVTASQPVMHQTMG

SEQ ID NO: 59119 - protein, 67 aa, Zea mays
  Coding DNA Sequence Number=SeqID_17340
MEYVRVACRTSKFRRQKSQRSPARMLIVNDHAWEIKEEIIYRKKIVWLLLHSTAAEEDTGIDTSDVT

SEQ ID NO: 59120 - protein, 196 aa, Zea mays
  Coding DNA Sequence Number=SeqID_17341
MGSARVAFVLLLEERNLTEVGTLQPSLGFKGFSSGSPAAFPHQWSPRMVAAIVGAKVVAAGEGFSADETVGATRGLTSGSLALIACPRPSSGDVDEGLVAAASVMRSSLLLFSRRERRSLSLLQWSAASQLELVVRRPSDVENLRLLCDEPEPEAAVSAWTEAESARGEASSAWEHMASLAEEVQQRRLELGQVVR

SEQ ID NO: 59121 - protein, 61 aa, Zea mays
  Coding DNA Sequence Number=SeqID_17342
MAMEAAAGRGSHPVEAKDRWELDGPPVPAHERVIVGFKRMVHGPDEDEDTPARQHEYKLSI

SEQ ID NO: 59122 - protein, 99 aa, Zea mays
  Coding DNA Sequence Number=SeqID_17343
MPDPGLGATVFDRGRVVSGLTEFFLLLPFFSIGSLCLCGGVDNALINEEIANIRCGVGRKWSMTKVKVMWVCVDGPEAVKENCWFLTEELEKPSDRYDG

SEQ ID NO: 59123 - protein, 104 aa, Zea mays
  Coding DNA Sequence Number=SeqID_17344
MAPRSAYVPVCLVALLLLASLRPSSARLLRPPMGRDGAIDVAMEVKDAVVDKWDPYPHVCRLNPIGGSQSSTCTVWTPIGRSRTSPYAIRTPGKGHMTSSQYAL

SEQ ID NO: 59124 - protein, 58 aa, Zea mays
  Coding DNA Sequence Number=SeqID_17345
MKPGERFRVCLVGLWLWKKLLWAFHPKATKSRSSGAFSFALRESRLLEKAAFWIQPFG

SEQ ID NO: 59125 - protein, 488 aa, Zea mays
  Coding DNA Sequence Number=SeqID_17346
  Homolog annotation: Hit_ID=Q945F5; Match level="QueryCoverage=26%, HitCoverage=28%, E-value=1e-31, Identity=56%"; Hit description=Auxin- regulated protein
  Pfam annotation: Domain name=DUF966; Domain location=36-354; Score =162.7; E_value=9.3e-46; Accession=PF06136.4; Description=Domain of unknown function (DUF966)
MAASSSIQRGERRGRWGSPERTVVWTEPKPKPARKVAVVYYLCHRDGHLDHPHFLEMELSQHQQSHSSRPAPGLYLRDFKARLNALRGDGMPGMYSWSSKRSYKNGYVWQDLTEDDLIHPAHGNDEYVLKGSPLLLFPQPPPQQEDADKWAGRHRKNWSSFDLGDCDSKLVVVAQHQQSAATRVDRDDADPSSTELAIDEISPPPSSSSPDEPESCGREVGVVAGGRMWASAVLMQIFSCGSTAAVRRGRHARTRSDLVMSSASNRRAKKEADADADADASARAAECLSVSGVVERDYFSGSLIESGKKRGGDDALLLKRSSSCNADRGAAKLKLPPVPAKEVRPGRLASRGSPAPNKRLGLGLSPGRRRTPLRPNQGSDSGSVPEDDELRSARPMARTRAQPRKTTNSAPPNPRARDSGSAPEDDELRSTRPQGSDSGSAPEDDELRFARPQGSDSALASADGLRLARLRGSDSTSASEDRLYLDLR

SEQ ID NO: 59126 - protein, 160 aa, Zea mays
  Coding DNA Sequence Number=SeqID_17347
MHGGCWESGGTRVASQTNWCTEASMEVVQWGMARAGVDARMAGFSGGSRDGTRGFGGGFWEWRARRIVRRQVWISVAVVVGLGDGASALGDGDGAAARSGRGGFLGAAARSALGARRRSRTGMLWCLGRGWRLQGRAAGSAGMAAAGSADASAGSEVKVA

SEQ ID NO: 59127 - protein, 94 aa, Zea mays
  Coding DNA Sequence Number=SeqID_17348
  Subcellular localization annotation: CTP_CleavageSite=53; ConfidenceScore=5.12e-01
MKSELLRQGWWLGNDDIRRTPFFVDLIVSQATSSSFGHAQPVLESQSFSSLVRLAILTDLAVTTSLVCLGINSQFSTHFICSNNRTLSMSPFAG

SEQ ID NO: 59128 - protein, 452 aa, Zea mays
  Coding DNA Sequence Number=SeqID_17349
MDSDQDSLYEWFVLAPSLSDDDERAIALSSGCTTPNSSRVVSGTDSGSDPEPDHAAGSSMSKLFLPYAAADDPDDAEGVYALSDAEDTDATPPPSSPLPRPLSGLFHHTMDGDVAYAAFDPVHPTAAPLRGGGGHHDAKQPVPDPTFSAFFDEPVVALASTRGLLCLRGAYSAAYYVANPATLARERLPAPERDHRAQGDPAVVIVFDLDPRDADPERADGSGKGFYRHYHIVVAFPLAEGIYAFESFSSRAWAWRFGRGVGSAEAVLPSSGVGALGCAFWRTTMGPFLCYNPFARRAELVPAPVEVMQWPYWELGEMEGTLCATCMDARVEVVVVLRLNFARRATSGAISWTLAGYFEGGCLRGRQDVTLLRSQGKAEVVMWDPSSETVVAMDLEGRTTRTIRFIPGSDYCDDFIPYVSTFTAVSGFGKRAHAERSIVATNKVGAELAVDA

SEQ ID NO: 59129 - protein, 486 aa, Zea mays
  Coding DNA Sequence Number=SeqID_17350
  Gene Ontology: Mol. function=nucleic acid binding
  Homolog annotation: Hit_ID=Q2QLR6; Match level="QueryCoverage=99%, HitCoverage=100%, E-value=0.0, Identity=79%"; Hit description=Zinc finger family protein, putative, expressed
  Pfam annotation: Domain name=IBR; Domain location=261-332; Score =34.4; E_value=3.9e-07; Accession=PF01485.11; Description=IBR domain
  Pfam annotation: Domain name=zf-C3HC4; Domain location=194-242; Score= 14.7; E_value=0.0047; Accession=PF00097.15; Description=Zinc finger, C3HC4 type (RING finger)
  Pfam module annotation: Pfam domain module=IBR::zf-C3HC4; Domain location=261-332::194-242
MEERPSSEAGAGNSRAEDDFRSCCGDEEEWEDTEESFTAGVTKGELDEASVRLFFKGVSSPEAEGKKLSGIGVVMERSPGVPVLKVQKKLDFYVEELVADHLALMDGLLVALQNGIRKIFAFTNSEKLYFQIAEAEILEDQLLVALGHRILELVDKLEDFDLILLPSFELERPLQLAKEAIGIRYLSPYEVGTCPICREEKLGSQMIKAGCSHTYCYNCLTGYVEEKLLTSKLPIRCPQLRCKYIISASECNSFLPVSSYDSLERAFAEAGTSGMERFYCPFPNCSVLLDLSQHFSRASSSSQSDLSCVECPECHRDICINCGVPWHIMMGCDEYQSLPAEERDAGDLSLHRLAQNNRCGHEFCYSCGADYASGVQTCQCVFWDDEAMEPSSAARSTQAASEIWAWDTFDCMPTAVEGYSEQERAQLALIQRFLAGGFSLGENPCQSPPRCADSYIVDTMKDLHQLPWLERFVSVISDTYNDDYMQ

SEQ ID NO: 59130 - protein, 179 aa, Zea mays
  Coding DNA Sequence Number=SeqID_17351
MAELRPRRAAGHPTAREGNQGGRDEGGEGGEAYHGTGVEQTDTTVAVLGDESDGERRKKRRGGEGDEQGVTPGLIGGAPHAAAGGCQTASRTKQGERAAPTRWRLDRAELGRRGSGPRREGEGGEGEAGRGKKTAAQPLTPGRPTTRKRGRGKGQAVAGLRQGSGPKRGGFGVFFLFSI

SEQ ID NO: 59131 - protein, 165 aa, Zea mays
  Coding DNA Sequence Number=SeqID_17352
  Gene Ontology: Mol. function=RNA-directed DNA polymerase activity; Cellular component=mitochondrion; Biological process=RNA-dependent DNA replication
  Homolog annotation: Hit_ID=UPI00004C1733; Match level="QueryCoverage =84%, HitCoverage=10%, E-value=5e-74, Identity=92%"; Hit description =UPI00004C1733 related cluster
  Pfam annotation: Domain name=rve; Domain location=52-165; Score=47.3; E_value=5.3e-11; Accession=PF00665.16; Description=Integrase core domain
MEAYCDEVWRLEDKFYGLELNHISRRIVRSCQGCQFYARQTHLPAQALQTIPITWSFAVWGLDLVGPLQKAPGGFSHLLVTIDKFSKWIEVRPLTSIRSEQAVAFFTNIIHRFGVPNSIITDNGMQFTGKKFLDFCKDHHIRVDWAAVAHPMTNGQVERANGMIL

SEQ ID NO: 59132 - protein, 320 aa, Zea mays
  Coding DNA Sequence Number=SeqID_17353
  Gene Ontology: Mol. function=transporter activity; Cellular component= mitochondrial inner membrane; Biological process=transport
  Homolog annotation: Hit_ID=Q6ZA15; Match level="QueryCoverage=92%, HitCoverage=89%, E-value=1e-113, Identity=62%"; Hit description =Putative mitochondrial carrier protein
  Pfam annotation: Domain name=Mito_carr; Domain location=53-189; Score= 76.7; E_value=7.3e-20; Accession=PF00153.17; Description =Mitochondrial carrier protein
  Subcellular localization annotation: CTP_CleavageSite=45; ConfidenceScore=5.37e-01
MVGCSRGSLPTWMTAAAARVDLSGGVTPSHQGPSSSSPSSGPSPAAGADQELGMYERAFSAAGAAFVSAIIVNPLDVAKTRLQAQAAGVLYNQPAQMAALGPDAHFQILSEFRCSPSCTRGLVLGSEPVCPPDCFQYKGTLDVFLKVVRQEGFVRLWRGTNAGLALAVPTVGIYLPCYDIFRNWIEDFTRSNAPGLTPYAPLVAGSVARSLACIACSPIELARTRMQMRRKLLGFVGEEGNAGSVLGVNFAAGFVAGSLAAGATCPLDVAKTRRQIEKDTEKAMRMTTRQTLAEIWRFEPYIWLSQLSNMLLPCCPAVPQ

SEQ ID NO: 59133 - protein, 168 aa, Zea mays
  Coding DNA Sequence Number=SeqID_17354
MRIRFKMMKMKIKRMSHLKRRTLIKGEMTTKKTRKRIKKLDVGRKPTVPLSPFAGLSSISTDRHDRRVVATAAAGQPITRFAHAERPGHAQLSTSYRVVLFKTGSWRLFRREHRQPLVPSSGRKIESRREGNSEVGGTQAFVLRPTSSAWPKKGGGGRAALNSPPTLL

SEQ ID NO: 59134 - protein, 90 aa, Zea mays
  Coding DNA Sequence Number=SeqID_17355
MALDTASRASTRRLLQCGPGGNQWLIHRSQGLREEGEVHGQGATRKGNGGAVSAQQRSAGGGGASRSGFGFIVWRRDKLDRLNSGLRRDF

SEQ ID NO: 59135 - protein, 429 aa, Zea mays
  Coding DNA Sequence Number=SeqID_17356
  Homolog annotation: Hit_ID=Q5JLN0; Match level="QueryCoverage=90%, HitCoverage=94%, E-value=1e-142, Identity=63%"; Hit description =Lysine ketoglutarate reductase trans-splicing related 1-like
  Pfam annotation: Domain name=DUF707; Domain location=105-422; Score =420.7; E_value=2e-123; Accession=PF05212.3; Description=Protein of unknown function (DUF707)
MDIKCVILYHLIGSMGRFRELGPSETDPVSKGAWQKRFFSVAPPAALVFFFVLIFVAGAAVTLDHKESRVSVLQLQPKLVTAAAEMRPPATTSELRAGPAEEPDICEVKDGSEALPRGIVQDKSNLEMESMGGNPEREENGSGRRSKSLLAIPVGIKQKAVVDKLVSKFPDTKFTVMLFHYDGEVDGWRDLEWSGRAVHVAARDQTKWWFAKRFLHPDLVAEYDYVFLWDEDVEVDSFDPLRYLRVVRKEGLEVSQPALDRRSQIHHGLTARARRGGGVHRRYYKTKGHGRCYGNSTGPPCTGWVEMMVPVFSRAAWRCAWRMVQNDLVYAWGMDYKLGYCAQGDRRRNVGIVDSQYVLHRGIPTLGGGGGNGNGKPSFSASASALGADRLAVRQRSYTELQVFNRRWKKAVSEDGCWTDPYPNTATTG

SEQ ID NO: 59136 - protein, 255 aa, Zea mays
  Coding DNA Sequence Number=SeqID_17357
MGRRVWVVPTRTRTRTRLPNGMTVSSADDDPRDVGVMTREELKLDFSKSDTRNTENAEITKRRRVLFRENIPVDSKLCAKTSLLYCYKRSTRASVFSLEQLQWDNFADSFEVTSQKMDVQVYDPFFILRFSIHTLHMGYIEPAQFARLGLLAITLVSIASPDHELRMLGYECLGTFKKSLESIPLFPTLLQSSFVHFKAERLWMLRLLSAGSNLADDAKIYKRGRVLELALAFCSSPISDFESKVLVLKVLKKCV

SEQ ID NO: 59137 - protein, 145 aa, Zea mays
  Coding DNA Sequence Number=SeqID_17358
MWGLGRPAARFLSLSFFSFNIEHINYSKKKKLEHPTGHYLKQMVCIQNKNSAPTGEIQLWTCARGGQATVSKGWPGSWPVGGGRRNLGGKGRRVGTSMEKDEEVVALANRGAVMRQRWRELADGATQSRERKTVERGGEHRLARA

SEQ ID NO: 59138 - protein, 192 aa, Zea mays
  Coding DNA Sequence Number=SeqID_17359
MANVKMKLCQILRFVYEKMVLDDIESSREMCFHRRGLALPDLAPLGAKMLIDGISESDYLLMLRNQFSLVGNKIFNYPDFLWQNTTRPRMIKGANGILLGRVQVIRSNYERVFNRTGYSFCKQLAYGILSGERVPSSLHLQTSPSFPWMNIGITEYWMHCYVCVLQCAPKSFDLQFGFTNKNSPAADIFRDT

SEQ ID NO: 59139 - protein, 397 aa, Zea mays
  Coding DNA Sequence Number=SeqID_17360
  Gene Ontology: Mol. function=phosphatidylinositol N-acetylglucosaminyl transferase activity; Cellular component=integral to membrane; Biological process=GPI anchor biosynthetic process
  Homolog annotation: Hit_ID=Q2HRH2; Match level="QueryCoverage=99%, HitCoverage=61%, E-value=2e-64, Identity=32%"; Hit description=N -acetylglucosaminyl transferase component
  Pfam annotation: Domain name=Gpi1; Domain location=246-397; Score =94.9; E_value=2.3e-25; Accession=PF05024.5; Description=N -acetylglucosaminyl transferase component (Gpi1)
MPVSLQESAAFTILGDCVRHPPKELEGYCFNKLEQLPLDANFVQKEHFGTRRNNVMIGSVGNGDQGPSYDHRRWGCDCCVLDGFLEVCRKSAVKEGSWVHLYWKFGENFKSNLNQVPVLHHLYLDGQQIENNRCHVILYEVPTIGRNHFSLGLDAPRTLNVSFKKPNWINDLQKQPSFLDLDSIVLALNCSNAARLPDTQECSTTCSGAYFIFASVCQILYWPIVFQDASLSSTVNVEYAHKAAIRKHALWSSIIVDLLMGFVLGAAFLLNTETICIWTIALVHHMTEAILRSGCVWLMGVPAGFKLNTELAELLGMISLNAVQIYSTLWFFVGGYLRHIIQGIAVSGIILGLTAPVSFFIDIIQLATLHVTILHWLISSLYSRQIQTVASLWRLFR

SEQ ID NO: 59140 - protein, 103 aa, Zea mays
  Coding DNA Sequence Number=SeqID_17361
MAQGLLERKWVDDIRAPLIVPVIQEYLHLCPGLRINIVGDLMGLDLSNQVPGSMGSRNGNVLAKQVDRRSNERASHYPVMQSEHRRPTQNSYDRQERYDNGSD

SEQ ID NO: 59141 - protein, 68 aa, Zea mays
  Coding DNA Sequence Number=SeqID_17362
MGGSGEIEIGVDPFSSAPMTNCPADRRRCFHVTVLRVYGSKGKYLSQRDGSKSTNHQVIHEKLENVFP

SEQ ID NO: 59142 - protein, 130 aa, Zea mays
  Coding DNA Sequence Number=SeqID_17363
  Homolog annotation: Hit_ID=Q6Q625; Match level="QueryCoverage=26%, HitCoverage=11%, E-value=1e-07, Identity=77%"; Hit description =Putative root hair defective 3
MKSRVITIHLLDWQIAMTAYLHSRKHAHIRSSTQFSRDAGSMPKVWTGKEDIKAITKTVRSVNLTQKFSLEIQVDFEKYEGMIKVMEKVVIQLILWSSLEEHYLLPVACKNVIGIRCASWRIVSSIEYRE

SEQ ID NO: 59143 - protein, 223 aa, Zea mays
  Coding DNA Sequence Number=SeqID_17364
  Gene Ontology: Mol. function=RNA polymerase II transcription factor activity; Cellular component=transcription factor TFIIE complex; Biological process=transcription initiation from RNA polymerase II promoter
  Homolog annotation: Hit_ID=Q6S7C3; Match level="QueryCoverage=48%, HitCoverage=41%, E-value=4e-10, Identity=39%"; Hit description=TFIIE- alpha 2
MTLLLVAEHLRALSAAKEPSLSLMASQPLVISPPRPWALQPSIQSLLFDLRPIVGDDDPASLSTSLLPNSYRNSQEQYGTPMPHIGQTTVEVDLLNYGVIEGDESCKHFSELKVLHPWMIKDGMNLTKEQRLEKIESQKLEKYEAKGDKRHDLKDDQSVQEEYINAYYEALRKSWKRKKQKAECSMKARFLSLMLKGNAKLTINTSRMMMKKALNSKSINLQL

SEQ ID NO: 59144 - protein, 107 aa, Zea mays
  Coding DNA Sequence Number=SeqID_17365
MSVELHLRRSGEAATAAGPGHHEVRRRRVGGEWEVAHGSRTRLAMLDMCGMWRMRMGREVGLRDIRPLAADADGARRTDEAGGVDAAGVWGGVCRMGLLADSVDLMI

SEQ ID NO: 59145 - protein, 575 aa, Zea mays
  Coding DNA Sequence Number=SeqID_17366
  Gene Ontology: Mol. function=zinc ion binding; Cellular component =nucleus; Biological process=transcription
  Homolog annotation: Hit_ID=Q1SW42; Match level="QueryCoverage=91%, HitCoverage=75%, E-value=1e-166, Identity=53%"; Hit description =Heavy metal transport/detoxification protein
  Pfam annotation: Domain name=FAR1; Domain location=80-288; Score =232.7; E_value=8.2e-67; Accession=PF03101.5; Description=FAR1 family
MGRVAPHRQAPLKVPHRWKKFASIASRYFDMVDEYEGDGEGEGDCSAVEHDDETGSKHSKKEPPLPTIGLEFDSFDEAYDFYNIYAKEQGFGIRVSNSWFRTKKKERYRAKLSCSSAGFKKKSEANNPRPETRTGCPAMVVIRLVDSKRWRIVEVELEHNHQVSPQIKRFYKSHKKMILAARKARPPAEPVTEIHTIKLYRTAAMDAVSNGFSNVSEREGIHQPDHSKHLELKEGDAYAVYNFFCRMKLTNPNFFYLMDFDDDGPLKNVFWADARSRAAYGYFSDTVAIDTTCLTNKYELPLISFVGVNHHGQSVLLGCGFLGHKSVEYFVWIFRAWLKCMLGHQPQVIVTDQCKSLQIAVSEVFPKARHCFCLWYIMQRVPEKLGGLRGFEEIKRQLNKAVYNSLKIIEFETSWTEMIKKHGLGDNKWLQTLYEERKQWVPVYLKDTFFAGMIPIRENESLNAFFDGYVHKHTSFKEFVDKYDLALYRKHLKEATADVQSKNSSFELKTRCNFEVQLSKAYTKEIFDKFQSEVEGMYSCFNTRQVTANGPIITYIVKERVEIEGNEKEACFERS

SEQ ID NO: 59146 - protein, 181 aa, Zea mays
  Coding DNA Sequence Number=SeqID_17367
MSTTLLVRLKDNNLLEHSYCEVALISKSDWFGVKVFTDGQYQFRVNSHLDDFNWVLRLLRKARSAIFNLLRCNLGRQGWKARSAIFNLLRYNPGRQGWCKKARSAIFNLLRYNPGRQGWKAISAIFNLLRYNPGRQGWKARSAISNLLRYNPGRQGWKARSVIFTDLLSEEHDLYNEPNYV

SEQ ID NO: 59147 - protein, 757 aa, Zea mays
  Coding DNA Sequence Number=SeqID_17368
  Gene Ontology: Mol. function=transferase activity, transferring glycosyl groups; Biological process=sucrose metabolic process
  Homolog annotation: Hit_ID=O22060; Match level="QueryCoverage=92%, HitCoverage=75%, E-value=1e-157, Identity=68%"; Hit description =Sucrose-phosphate synthase 1
  Pfam annotation: Domain name=Glycos_transf_1; Domain location=384 -548; Score=24.6; E_value=3.8e-05; Accession=PF00534.10; Description =Glycosyl transferases group 1
MAGNDWINSYLEAILDVGPGIDEAKSSLLLRERGHFSPTRYFVEEAAATRGPKERNTRLENMCWRIWNLARKKKQFKATGTRLNQSDRSAGSNNIGAGFGVECLRGRKFNAMLSVTLNVKEAAGRQLLTCLKTFQKERKETFPVMVQLMAILSSCSLHGLLRGENMELGRDSDTGGQVKYVVELARALGTMPGIYRVDLLTRQVSAPDVDWSYAEPTEMLTPRTTESSMQELGESSGAYIIRIPFGPKDKYIPKELLWPHIPEFVDCALSHIRQMSKVLGEQIGGGQPVWPVAIHGHYADAGDSAALLSGALNVPMLFTGHSLGRDKLDQILKQGRQSRDEINTTYKIMRRIEAEELSLDSSEIVITSTRQEIEEQWRLYDGFDPVLERKLRARIKRGVNCHGRFMPRMVTLIMGNRDNIDEMSGTNATVLLSILKLIDKYDLYGQVAYPKHHKQYEVPDIYGLAAKTKGVFINPAFIEPFGLTLIEAAAYGLPIVATKNGGPVDIHKVLDNGVLVDPHDQQSIADALLKLVSDKQLWARCRQNGLKNIHQFSWPEHCKTYLSRIAMCKARQPQWQRSNVGFEYPEPNSPGDSLRDIQDLSLNLKLSLDGEKNEGTGTFDNSLDSIDRKSNLENAFLKLSNGIIGGTEKASLMEKAEQNVSGSRFPVLRSKKYIFVIAVDCDSVSDIPKIIKTIMDVAGKENSIGLILSTSLSISEGNTQAEKEVCNNCQDGYSVNIAKLGILGNVESWLGMFQIWV

SEQ ID NO: 59148 - protein, 126 aa, Zea mays
  Coding DNA Sequence Number=SeqID_17369
IEAEDKLKMMKYLNQVRPKTIMAQTLVTEREVDDIMVNEIKKDPKVYLEWGKKIELVFECHNYSEAKKVNSKKEPLLHYNFKKRRFEMIEREGTVEWLWLNHSLWVICPNLETFETIETLATEIDN

SEQ ID NO: 59149 - protein, 89 aa, Zea mays
  Coding DNA Sequence Number=SeqID_17370
MAQLLAFARSEAFAPGSRVTFGTLDFLATAIGELRFSAPAFPPPPDQARCLEAERSWPRKVHDQLAESSDGAQYFLILGQNMATVAMML

SEQ ID NO: 59150 - protein, 245 aa, Zea mays
  Coding DNA Sequence Number=SeqID_17371
  Gene Ontology: Mol. function=protein phosphatase type 2C activity
  Homolog annotation: Hit_ID=Q1S8C9; Match level="QueryCoverage=53%, HitCoverage=18%, E-value=9e-21, Identity=44%"; Hit description =Protein phosphatase 2C, putative
MGSHLELAVTGACLVVVLLRDDDVYVMNLGDSRAIVAQRWDDEDCLIGSMWVEDIGVGLETETRIPGYSAIGLEALQLSTDHSTSIEEEVQRIRREHLDDDQCVVNDRVKGRLTVTRAFGAGYLKQSLIEELLSRAAKKAGKLIVWSSSSKPDAPRTTPSKPSSESAIRKWWRSLALALLAAALAITVAALQQTTEHADTKERPLLRVERPSGMKASVYAGRLGGALTLVVLRVTNFGVDSDGAT

SEQ ID NO: 59151 - protein, 110 aa, Zea mays
  Coding DNA Sequence Number=SeqID_17372
  Subcellular localization annotation: CTP_CleavageSite=42; ConfidenceScore=5.24e-01
MEAQVKKKVSRQISRSSRTSTSSRIRLATSPSQLPVPEFAVSANDIKDPTAKAIALSRKFYSEVWLKGGREITDEAIRKNEEESHTALEEAKKAEEATERERLIGMFVVI

SEQ ID NO: 59152 - protein, 75 aa, Zea mays
  Coding DNA Sequence Number=SeqID_17373
MEAFPSVFAVADAYDAARAAAAEAHSAATIAEKEAIAVVQPVNKVVSTLSRTAGPPGVAIFEFSIIELASTGDTL

SEQ ID NO: 59153 - protein, 167 aa, Zea mays
  Coding DNA Sequence Number=SeqID_17374
  Gene Ontology: Mol. function=DNA binding; Cellular component=nucleus
  Homolog annotation: Hit_ID=Q6YZE8; Match level="QueryCoverage=66%, HitCoverage=27%, E-value=3e-18, Identity=53%"; Hit description=SBP -domain protein-like
  Subcellular localization annotation: CTP_CleavageSite=5; ConfidenceScore=5.16e-01
MPPVSAASPVAASGITAAAAMPSPTTVPSRAECSVDLKLGGLGEFRATDGTTTKEPATAIAAPSASPMKCPRSGPDGGGGAQCPSCAVDGCKADLSKCRDYHRPTRSTRRTPRRPSSAAAARCASASSAAVFVSTRAYQEHQHLKVVSLCNLVTMKMKENTYTTFLK

SEQ ID NO: 59154 - protein, 228 aa, Zea mays
  Coding DNA Sequence Number=SeqID_17375
MVRRKNVSAPGGGDDEDPPCPFRQEGRKKRRLDRAAQVALAATAAAEQAERGGKLQISSDQIGYRVRHLASRPRSSAPSTPAIATTPPPTSLAPVAPEPSTTSAIPTNSTIPSSIVPPPAPISAPPIPPARFRERDETEVRPLAVDPCLIDLQRATVARIALQAHRLLDLPAFLLAAGANSEGTSIPDDDDDDFGIPPPPPMPPRSHDHEAQHALIASEQARQSVIQQ

SEQ ID NO: 59155 - protein, 124 aa, Zea mays
  Coding DNA Sequence Number=SeqID_17376
MKENARRRITLQVPQVKKRKKKKVMMMKIINQQHHPPRMKKQCDVSERGGWRRERALAVEVIMGGSNIGEESIGGDGGDAAAILAITASAGGSTGAGGFASSVALDATSLTEKAIAILPLALAA

SEQ ID NO: 59156 - protein, 99 aa, Zea mays
  Coding DNA Sequence Number=SeqID_17377
MIPYHSCFATEPTTRNRITGEEPPSDSGGRVSSRPTPITPLTPFSPLAGTWARAHGTVSRAAPSGGPCWAACPRGRARALARPKSPPGPEKRDPILRNL

SEQ ID NO: 59157 - protein, 149 aa, Zea mays
  Coding DNA Sequence Number=SeqID_17378
MGEKLTGNRTRRSSAHRIRRTRNYVEEFPARRMLIELGEATSTIPVTSWSSPTGFQGPSTGDHVNHPRRLISLIPIASSQQALDSFVPGGGTLLSLSARTTTDAWAYSPPRSGSTGSGMRTTTTCTASCAASVERRDATDPKSGEGRSS

SEQ ID NO: 59158 - protein, 139 aa, Zea mays
  Coding DNA Sequence Number=SeqID_17379
MVSRVPAPYLFLALALARLIAEFQNQRCSSARPNPSHDSHHALCRHAGPMLSSFFILIFASTSRGARPCTAACHRRPYELLVVAHVHLHMMGGVGGNVLVRYSFGVEDVLEPEIFKVDAGRSCTVDTLKIHSILRCSIP

SEQ ID NO: 59159 - protein, 105 aa, Zea mays
  Coding DNA Sequence Number=SeqID_17380
MVVTLSFAGKCRPWHREDRAELELGSRAKGEKWGERMGAGDLRATWREAERSSVRERAEGAGSGSRCYGARHRTWGSREAPSRRVREELEREEGVSSIGALRINA

SEQ ID NO: 59160 - protein, 46 aa, Zea mays
  Coding DNA Sequence Number=SeqID_17381
MPAIPLASPETCEAPQSFRPSAPSPEPESPSPDFFRSPDSVDRQNS

SEQ ID NO: 59161 - protein, 126 aa, Zea mays
  Coding DNA Sequence Number=SeqID_17382
MLRESRAAVFFDQRAGRRELGGCGRWLEMVDWWPTLEEADGAGEDEHPEQVGASSRCSWPGRFLAGQGRAGDAMGESAGLLLKGRCRGSSRYPMNGRGSTADLQTWRAEHVAQGAEASAMAASGQE

SEQ ID NO: 59162 - protein, 313 aa, Zea mays
  Coding DNA Sequence Number=SeqID_17383
MAPATGEGRRVRRCCASARAGRGGRRGGGTTGHEPGLWQRLARAWLAATGHPWLHARTCTGRWGRGKACRCRSTGATAAGERPCLGAADGAVGGVLAACVRAAAREATREVAGGGLQGAGPATREGREAGRQRPGRRRGGPDGRDWPWAATGRGRGPPAWPELPAEGEAGDGARVDPQHRQRLARPGGKADGVGERPKEGGLGGQGRVPAAGGQRLTAGWGKGGGCGCLPRETAAAAGRKEAAPGREGWASQGQQRWQAAAGWEGAGGGCSGRRGGRNPKPNPLIPCRIVKCCIDNRWSTIYRLNPNPNESAA

SEQ ID NO: 59163 - protein, 143 aa, Zea mays
  Coding DNA Sequence Number=SeqID_17384
  Subcellular localization annotation: CTP_CleavageSite=68; ConfidenceScore=5.30e-01
MALNRTWSRGIRISALASPVTSAWPSGPLDAATIPSARRTPSLVPPRVRGISAASPNLQVPDAPRLPRAAPVVCGLGENLGDHRTTAAWNSMSCLGCSLGRVDGVGVLESRICGAERLQFVAGVGAQPDTRPDRGQPRLPRKP

SEQ ID NO: 59164 - protein, 73 aa, Zea mays
  Coding DNA Sequence Number=SeqID_17385
MPRNPEPSHQSKLLRREALWIVVRMFGRANHASGQSEFGATIAPIACLTGVRRRMPPVRVLGEVKDWLRTVDA

SEQ ID NO: 59165 - protein, 178 aa, Zea mays
  Coding DNA Sequence Number=SeqID_17386
  Subcellular localization annotation: CTP_CleavageSite=68; ConfidenceScore=5.30e-01
MALNRTWSRGIRISALASPVTSAWPSGPLDAATIPSARRTPSLVPPRVRGISAASPNLQVPDAPRLPRAAPVVCGLGENLGDHRTTAAWNSMSCLGCSLGRVDGVGVLESRICGAERLQFVAGVGAQPDTRPDRGQPRLPRAQIGRIAWLRRGSAVTSGGAAVAGRELGKTPWSSDPR

SEQ ID NO: 59166 - protein, 143 aa, Zea mays
  Coding DNA Sequence Number=SeqID_17387
MKKSSKKKIARDWGFAGNWARGAGFMQRTIEVAKNLWISAGGRSGKVWGLRLDYFGGGRSDERSVVNLALKAWILAWRWRRVVPSAVVRGYCAPLSTQQGTLKDTLKFRVSASAAICREILFVLYPQSKRYDLTLVHVTTTVD

SEQ ID NO: 59167 - protein, 105 aa, Zea mays
  Coding DNA Sequence Number=SeqID_17388
MATKAASVFFPLAKCVEEARQMGVRAELWSPPRSLHRLGEEASAGGTQPSAKPEKRSKPTAGKKSDGMDGHHEYADVIVDVTPQLITLNQRIKSDKYHKNKHSNT

SEQ ID NO: 59168 - protein, 192 aa, Zea mays
  Coding DNA Sequence Number=SeqID_17389
  Homolog annotation: Hit_ID=Q10A56; Match level="QueryCoverage=31%, HitCoverage=6%, E-value=2e-25, Identity=88%"; Hit description =Glycosyl hydrolase family 38 protein, putative, expressed
  Subcellular localization annotation: CTP_CleavageSite=80; ConfidenceScore=5.06e-01
MDQNIYLTIDNNIVIGHRTLRAEPSPEPTVSSTTPTPGAGANQTPTPISNSKSEETNTQTQRFVRIVGQPAPTPLPVPFCARHRRGRPGKPSAAVMVMAPAILLAVLVLAAVAAATASAFAVASNNATVVAGKLNVHLVPHSHDDVGWLKTVDQYYVGSNNSIQGACVMNTLDSVVDALARDPARKFVVVEQ

SEQ ID NO: 59169 - protein, 96 aa, Zea mays
  Coding DNA Sequence Number=SeqID_17390
MTVCEGERYRRHESRASTKLDNPGAKSMGRKLTGAALGRTPTAPPSRGELCSPWLAVGRLMTTGGRWIKMNGCDQLLCRDSAGSFGTMDHRIEGRD

SEQ ID NO: 59170 - protein, 139 aa, Zea mays
  Coding DNA Sequence Number=SeqID_17391
MGRGKRGKGWPRRADGKRKHPPSPPSEDFGDSEYSEEASSEYDRSPVPASPVASSEDSDDSMGLSTHAGLGGSDDSEEVEDSSDSEEWSGGEGDGGEDNGSSGDDDGKGGDDSDSEDGRGDGKGDDRGDGKGDDSGKGI

SEQ ID NO: 59171 - protein, 91 aa, Zea mays
  Coding DNA Sequence Number=SeqID_17392
  Gene Ontology: Mol. function=pyridoxal phosphate binding; Biological process=ethylene biosynthetic process
  Homolog annotation: Hit_ID=Q84UX4; Match level="QueryCoverage=52%, HitCoverage=9%, E-value=2e-13, Identity=75%"; Hit description =Alanine aminotransferase
KSDNPQRLGSWCLLFLHRATEVMLTIATTFHDHLTGNVNNINEGSVFGKKEGVFHHRTTILIAEEYFPTIISSFKKFNDSFMEQYEGYSRM

SEQ ID NO: 59172 - protein, 59 aa, Zea mays
  Coding DNA Sequence Number=SeqID_17393
MPITKVQLPNDASKFHGRRDVELEDDAAMREVESVADLQGKEGVEAGLQEFQDFDEFED

SEQ ID NO: 59173 - protein, 142 aa, Zea mays
  Coding DNA Sequence Number=SeqID_17394
MQEGCKAYLLDDSAASLLMRCHTCSKGVLDFFPELPPCVVNMQNSGSLIGLDIRNSGSGERRQKRITMMYARCLVAALLGSVLRLIADGVTVVEASARRCVRASTKHSSRQPPARQQMQIADRRSQHVVVATPNEKRRKRNR

SEQ ID NO: 59174 - protein, 124 aa, Zea mays
  Coding DNA Sequence Number=SeqID_17395
  Subcellular localization annotation: CTP_CleavageSite=27; ConfidenceScore=5.03e-01
MSLLDRGWTLQPPTGASPCRRCPPVTEAGLASRLSEPPSHPDVPRSAPCAHRPPQVTPPSHVRSAAPYCFAAAMNFGEDDEEDNDGFYDYDYAYGFWYSFHLERVKKVSRQILQEFQDFNEFED

SEQ ID NO: 59175 - protein, 867 aa, Zea mays
  Coding DNA Sequence Number=SeqID_17396
  Gene Ontology: Mol. function=protein binding; Biological process =protein metabolic process
  Homolog annotation: Hit_ID=Q6Z517; Match level="QueryCoverage=99%, HitCoverage=83%, E-value=0.0, Identity=64%"; Hit description=101 kDa heat shock protein; HSP101-like protein
  Subcellular localization annotation: CTP_CleavageSite=59; ConfidenceScore=5.64e-01
MREASFSSAAVKTTIEQSLPSPSAAAVVSTPTVAATTPVAPSPSPFPRVGPTNAYINPRLAAAAGVGGGRDDVRKVLDVMLKPARRNPVLVGDAGPDAVLREAVRRIPTSDSHALAGAKVLPLEADLAKLAGDKAAMAARIGDLGAMVQRILADHGAVVLDLGDLKWLVDGPAAAASEGGKAVVSEMARLLGPFGSRKVWAVGTAACATYLRCKVYHPTMEADWDLQAVPIARSAPLAGAALRPGGIGILGNSVGMLSPALRPMPVTPTALRWPPGAGSDHPLKAKPAMCLLCKGSYDRELAKLLAEQKEKPASSPEAAKPGLPHWMQPSRDQPQTKEQELKQNEAAEELEKKWHETCARTHSNRTVAPALSLPLAALAPRPPVEPKLQPASGGVPTLKMNTNWKEPEGTPTSELRKSPPGSPVKTDLALGPLDPDATMEKDQKENYTEGLTAMQKAKIAGISDIESFKRLLKALTEKVSWQSDAASAIAAAVIQCRTASGKRRNIGTRGDIWLLFVGPDQAGKRKMANALSEQMVNAEPVVINFGGDSRWGKDGNGRPNPGFWGKTSLDRVTEAVRQNPCSVIVLEGIDQVDAVVRGKINRAMDTGRLPDSRGREVSLGNVIFVLTTDWLPEELRRPKFDTPLQDEGKMLEAAHSDWQLELSIGDKQQLKHQADWLCNDARPAKVARELSGGHGLSLDLNLAVGASDDTEGSRNSSDLSVEQEQEKGHVAVKCSTPAPDSDLLNLVDDAIVFRPVDFAPFRKAVTDCVSAKFDSVTRGSSSFRVDEDAVDRMAASVWLTDEKLEDWAEEVLTPSIERLWRNVKRCSGRAVVRLAAVAVTADRAMPRWGGGREGRLPGTVPIAVDGM

SEQ ID NO: 59176 - protein, 172 aa, Zea mays
  Coding DNA Sequence Number=SeqID_17397
MANNCLHVLPWMENGEEGVQGSKGLVPFLGLASSFYRPKRGLDSVGFLKEPRGDGLVSIDHECAAGPGVCGPINVSQPEEFIGYEWEADHTPLMWLVRRSQCDRSLMTGASRVNVSGPSLGGFLAFFGHPVPMYPTKMDPRSVGAVSVEIHGIIRGRVEDVEPTTSVYEHFG

SEQ ID NO: 59177 - protein, 146 aa, Zea mays
  Coding DNA Sequence Number=SeqID_17398
MEEMTMKESQEVGTLGLVESQEVGDFCGRCWAGTWIYKTFMGTGHYKQKRYKLPKNGSYDLNARYMFEYNTDDVVVDAIYYAWIQAIKSCGLPLSSTPFFERNMGNRGTEMFHNYDDDGHVHLAKRITAYQEQMVERHGQDYDRKN

SEQ ID NO: 59178 - protein, 129 aa, Zea mays
  Coding DNA Sequence Number=SeqID_17399
MENMRYAEELVREFLVFRGFTSIEESTFSLEHPYKGATPLGPCKKSALYELVLRRSASSAAAASSLHSGKMSTLSEEDQQVLVTEEEFPEVKVDFQLLIGTANGGIKAWNADAKRVVCDLSTSRNFPRL

SEQ ID NO: 59179 - protein, 239 aa, Zea mays
  Coding DNA Sequence Number=SeqID_17400
  Homolog annotation: Hit_ID=Q6QP51; Match level="QueryCoverage=85%, HitCoverage=90%, E-value=3e-43, Identity=44%"; Hit description =Putative growth-regulating factor 1
MRDRERGYFERDPSQRRKRASSPHTDQGLAPRKGSTTAPEHSGSKPTTDQGFEGWPLGRVRQPPQSTRAPHPLLIRGSKAGPSEGFDSRPEHSGSAPTTDQGFEGWPLGRVRQPPRARRVRDDSGYVRYMAEARATLPSHFALSLTDLTGKQRRSPRSDCCATHQGETDNSRVQPRAQQEAPPRPTLGLGLGRRSPPRPTPGLGLSLGLGRNRVLARPRPRPQEKLRGNKTGVPSGSPR

SEQ ID NO: 59180 - protein, 128 aa, Zea mays
  Coding DNA Sequence Number=SeqID_17401
  Homolog annotation: Hit_ID=Q7XE52; Match level="QueryCoverage=64%, HitCoverage=9%, E-value=2e-10, Identity=44%"; Hit description =Nucleolar protein, putative, expressed
  Subcellular localization annotation: CTP_CleavageSite=67; ConfidenceScore=5.21e-01
MEDDEASASPPLPWMQNKSAAAIEASSGPLSAVASRLSARSRALPSSRDFHFYINLPAFKSSVGAVAAKADASLGVLGGASILPMRSASREGGAWTASGLVVRIGEWDFSIGSDGLDRRRIKRAAEIV

SEQ ID NO: 59181 - protein, 447 aa, Zea mays
  Coding DNA Sequence Number=SeqID_17402
  Gene Ontology: Cellular component=microtubule organizing center; Biological process=microtubule cytoskeleton organization and biogenesis
  Homolog annotation: Hit_ID=Q94GC4; Match level="QueryCoverage=83%, HitCoverage=93%, E-value=1e-57, Identity=36%"; Hit description =Tubulin family protein, related
MEAAASSLSTLLSTLRVNGPWTPPGTWESVIPESGAARVSHLGGRPRLQPIYELASVTDDALIHLALHALYGVKTSLDEIEELSALSSSNPADRTSNRVPNVWLRSSSTTSMGSILKSFRSTGLAVFFLCKFVHFYLFQSREMNCASREVHEHEDSGDKDTKQHQPYTLVNQAFAAAVNKVLEGYFCSLNTLLASIRLRRSVGQSGIASKISNGMSCDPTSEVTLLEVYLHTEELRRHVKSLGNICFPKFAGLTLCQEGLNTDANVEFENFPRGTDLLSYLYVHIRDADPVHYGLLKYLFIRSCEPYFNFIKSWIYRASVDDPYEEFLITQTENKGAQGISSDITDDFILFPLKEICHPLLRTGQQLQVLMNLLKYCNLAATEGDVYPSRNIIHMEGVLPWFDTPIESSMNSFTFSKSAIEALTCKRDAMYKLMMEKLQHFFSNVEV

SEQ ID NO: 59182 - protein, 128 aa, Zea mays
  Coding DNA Sequence Number=SeqID_17403
MADSTGTRRSLRAIRGAATDVTRLYRRAAGPPLFPFPFALHATREIEHREANLGGIEVAAGFCFLAGVQLLEAAPEGGAWAEGLGAGLGRRVVFRAGASAAAGVSAAELRLEVGDVWWTVRFCLGGRD

SEQ ID NO: 59183 - protein, 128 aa, Zea mays
  Coding DNA Sequence Number=SeqID_17404
MADSTGTRRSLRAIRGAATDATRLYRRAAGPPLFPFPFALHATREIEHREANLGGIEVAAGFCFLAGVQLLEAAPEGGAWAEGLGAGLGRRVVFRAGASAAAGVSAAELRLEVGDVWWTVRFCLGGRD

SEQ ID NO: 59184 - protein, 338 aa, Zea mays
  Coding DNA Sequence Number=SeqID_17405
  Homolog annotation: Hit_ID=Q10MT6; Match level="QueryCoverage=81%, HitCoverage=53%, E-value=7e-31, Identity=34%"; Hit description =Expressed protein
  Pfam annotation: Domain name=TFIIS; Domain location=54-130; Score =9.2; E_value=0.0011; Accession=PF08711.1; Description=Transcription factor S-II (TFIIS)
MADEQSGLPLRRWRPFFGAFEAIDGVIEACGYPRAEYRDVRGEIVVLLRGATDDGVADQLCAVLDDVMVESLKTLLVAPVPHDLLASTELARTVGALGSHGSSRIRSLARDVVRGWRVAVEASFATAVAVKKKLDNLSADQIPLPRAAVDKVHVPSAKMLPAAAEVHNKKPDIPPAKMISTATAAEAHNKRPHVPPAKTLAAAVAEVHNKRPQVPPAKMLSTAEEHKKQHYVPPTKTLPTTSILSNQQKNMSETKKPVVAESEKIEATKRKLRESYQEADGVKRRRSIQTIKEEEGKLLEQKQCKNHASHRMERGPVGCRTRTSSGVSRSRPPPSHVL

SEQ ID NO: 59185 - protein, 257 aa, Zea mays
  Coding DNA Sequence Number=SeqID_17406
  Homolog annotation: Hit_ID=Q10MT6; Match level="QueryCoverage=71%, HitCoverage=34%, E-value=1e-22, Identity=39%"; Hit description =Expressed protein
  Pfam annotation: Domain name=TFIIS; Domain location=63-139; Score =8.2; E_value=0.0013; Accession=PF08711.1; Description=Transcription factor S-II (TFIIS)
MNLLKVLQHNGGPWLRAPTNSVRRAQVLTKAIDGVIEACGYPRSEFRDVRGEIVVLLRGATDDSVAEQLCATLDDVMVESLKTLLVAPVPHDLLASTDLARTVGALGNHGSFRIRSLARDVVRGWRVAIEASRATAVAVKKKLDSLYANKIPLPRAAVDEKKMLPAAAEVHNKNPHVPPAKTLPAAAAEVHSKRLQVPPAKMLPTAEEHKKQHYVPPTKTLPTAAILSNHEKNMSETKKSSVADNEKMVATKRKLRE

SEQ ID NO: 59186 - protein, 194 aa, Zea mays
  Coding DNA Sequence Number=SeqID_17407
  Homolog annotation: Hit_ID=Q10MT6; Match level="QueryCoverage=37%, HitCoverage=13%, E-value=6e-09, Identity=54%"; Hit description =Expressed protein
MSRAATSSEAVGGEGRGEEEGDWNGCGTAASSEAPRQATPTLIGRSVLFPSDFNSKEISSSCTRSSTVRIRRAALARIRRPYPSVGPRLYHGRRAERASPAEVEAILPRFRGDRRLIEACGYPRAEFRDVHGEIVMLLRGATDDGVATEQLCAVLDDVMVESLKTLLVAFVPHDLLASTDLARTVGALGSHGST

SEQ ID NO: 59187 - protein, 99 aa, Zea mays
  Coding DNA Sequence Number=SeqID_17408
MDLPPAKMLPAAEVHKNTHIPSANMLPAAEVHNKRPHVPPASMLPTAEEHKKQHYIPPPKTLPTVAILSNQQKSMSETKRPAAAESEKMEATKCKLREG

SEQ ID NO: 59188 - protein, 381 aa, Zea mays
  Coding DNA Sequence Number=SeqID_17409
  Homolog annotation: Hit_ID=Q10MT6; Match level="QueryCoverage=78%, HitCoverage=93%, E-value=3e-31, Identity=33%"; Hit description =Expressed protein
  Pfam annotation: Domain name=TFIIS; Domain location=54-130; Score =10.2; E_value=0.00085; Accession=PF08711.1; Description =Transcription factor S-II (TFIIS)
MANEQSGLPLRRWKPFYSAFQAIDSAIEACGYPRAEYRDVRGEIVVLLRGATDDGVAEQLCAVLDDVMVESLKTLLVAPVPHDLLASTELARTVGALGSHGSSRIRSLARDVVRGWRVAVEASFATAVAVKKKLDNLSADQIPLPRAAVDKVHVPSAKMLPAAAEVHNKKPDIPPAKMISTATAAEAHNKRPHVPPAKTLAAAVAEVHNKRPQVPPAKMLSTAEEHKKQHYVPPTKTLPTTSILSNQQKNMSETKKPVVAESEKMEATKRKLRESYQEADGVKRRRSIQTIKEEGKLLEQKQCKNHASHRMERGPVGYRTRTSSGIRLWVVDVLVVHPWSERGRRGRGGFDTLVLFVALGAIVGAVRRFLNRNNDDYDDDF

SEQ ID NO: 59189 - protein, 84 aa, Zea mays
  Coding DNA Sequence Number=SeqID_17410
MEYLAVYLQLSLTISLNDNTLFLPVISHTEKESPYSSNNGAQRHKEDERVEATADPDGHARTGGEQGEQQPPVVVSVGAEELAP

SEQ ID NO: 59190 - protein, 32 aa, Zea mays
  Coding DNA Sequence Number=SeqID_17411
MGDLVSGRMRRAICGQVHSGIRTLILIPFSIL

SEQ ID NO: 59191 - protein, 139 aa, Zea mays; identical to SEQ ID NO: 52514
  Coding DNA Sequence Number=SeqID_17412
  Pfam annotation: Domain name=zf-CCHC; Domain location=80-97; Score =15.8; E_value=0.0024; Accession=PF00098.13; Description=Zinc knuckle

SEQ ID NO: 59192 - protein, 118 aa, Zea mays
  Coding DNA Sequence Number=SeqID_17413
MALVGGAVEVGDERGLAVLRAAGWLVAAEVAEELEVSDRRDRDTRLSRALESREGGPRLRRSYPRSVFSGEVLPLFRRLESCRENGGNDCVIAFITKEPATRLYSLRCNRKGKLIPLI

SEQ ID NO: 59193 - protein, 72 aa, Zea mays
  Coding DNA Sequence Number=SeqID_17414
MDPEHPATTLEDELQTCASWKRKGGRGQRNFARSHGREKLGAAESSGGEGELEPGHPSRKRKGAEGDRRAEE

SEQ ID NO: 59194 - protein, 87 aa, Zea mays
  Coding DNA Sequence Number=SeqID_17415
MAMLDGGCNTVDAGADLDVLPSVLLEQQVGLEVECRDETNSCGFDNRWGEEEGVRFYGRLGVGRPPKTDLGDIESNRGGGGYAESYN

SEQ ID NO: 59195 - protein, 68 aa, Zea mays
  Coding DNA Sequence Number=SeqID_17416
MDILRPLNYSDHRTKLVTDASDEFAGDCRFTTLRHVPRHKYRITVTRLSHPIIAGELATVYSTNPLRQ

SEQ ID NO: 59196 - protein, 87 aa, Zea mays
  Coding DNA Sequence Number=SeqID_17417
  Subcellular localization annotation: CTP_CleavageSite=9; ConfidenceScore=5.23e-01
MAQLTPPPRQSPAARACMTLLTTIVTAKRRLGFPSTPRGLGVDQLCRKVRWKVKIEMVRDFGAQEVSVAPKLLVGDTLHRGFVPCCG

SEQ ID NO: 59197 - protein, 88 aa, Zea mays
  Coding DNA Sequence Number=SeqID_17418
MAKTVLAASLGETTFTSLAIFYSSLYGCRNEVFGRDLRFWRGPAMAPPWLVTAPATGWRSERVRKWEKILAVGQLGNGTDFIRCSGLK

SEQ ID NO: 59198 - protein, 107 aa, Zea mays
  Coding DNA Sequence Number=SeqID_17419
MPWNSPPLTESLPGRVLGFFAEKKTLYAILDHPALSADRPEACRGGYAPAPMSRTVRPCDVDHPSLRKERRQTVCSGVGADLGANTLFGDCAGDKVHRMQELLGLRN

SEQ ID NO: 59199 - protein, 40 aa, Zea mays
  Coding DNA Sequence Number=SeqID_17420
MSKDDHNDTLMEVQQQLEGHAATITQINATLQALNTTLNE

SEQ ID NO: 59200 - protein, 158 aa, Zea mays
  Coding DNA Sequence Number=SeqID_17421
  Gene Ontology: Mol. function=DNA binding; Cellular component=signal recognition particle, endoplasmic reticulum targeting; Biological process=DNA integration
  Homolog annotation: Hit_ID=Q7XYU1; Match level="QueryCoverage=86%, HitCoverage=61%, E-value=5e-64, Identity=64%"; Hit description =Integrase
IGIGAVLMQDKQPIAYFSEKLNGAQLNYSTYDKELLALVRALQVWQHYLLPNEFVIHTDHESLKWLKGQGKDNVVADALSRRYALMTTLNAKVLGLCIPKCSMRDLLIHEAHSGGLMGHFGVAKTLDILHEHFHWPHMKKDVEKMMLHMWQTYSLKKW

SEQ ID NO: 59201 - protein, 165 aa, Zea mays
  Coding DNA Sequence Number=SeqID_17422
  Subcellular localization annotation: CTP_CleavageSite=31; ConfidenceScore=5.10e-01
MALGYLGMATPVLSLVSFLPDRVNPYAVGAKQSSGGGIDRLCGYSSSRGMVEERPQRPLRAGFGAFLGTKRRGLLGLLLSYRFFATRGHTCRSDREYLCHTVAPLMARELPLYKMVANAPLERTRLGAPPPSDVDIACWLREAIEVRKGLDPLADGFCDLCLPTL

SEQ ID NO: 59202 - protein, 179 aa, Zea mays
  Coding DNA Sequence Number=SeqID_17423
MESSAKTRLPLCSTGIFYPSPSLYITLTLGTDFQALYGELDEMSDDIEKVLQVNLHQFSIVRRKLESLVGTSVGKFGFPYEQRRAWERLATDLQAKRSEAANACAHTESIQKAYESLAEVAKRDEETVALARLECVKVNFRLHVLEQGKEVAKAQIMALEEVSNRVKDGWGGASCLSKR

SEQ ID NO: 59203 - protein, 80 aa, Zea mays
  Coding DNA Sequence Number=SeqID_17424
MVEASEPFGRKLTDALFSGAPRRDAPHYRAYSEVARKEAQNTSIKLTGYMSAGVLGGSNAFRVFVVSSHPELGEVNVENV

SEQ ID NO: 59204 - protein, 224 aa, Zea mays
  Coding DNA Sequence Number=SeqID_17425
PGPASIIGAISSGLLDSERPILHDTSFNVAAFEEAGGYQRLGQGPESLCADASGRASVPFSHVPHVPDVPADNAAQVRNPWDIIKYSLQAKPPCFKVYSRRRDTVPVQSQEVSSPSPTPLQEFSQHISKAINGLLSPPPIPKRRKKTLLRNFRPRRSRRVAKFPPELGSEAAASVCKKLGFCDDHGIITLEDASKYVVLFNSPLSREHIAALAALFGWDTSELA

SEQ ID NO: 59205 - protein, 274 aa, Zea mays
  Coding DNA Sequence Number=SeqID_17426
  Homolog annotation: Hit_ID=Q84M48; Match level="QueryCoverage=48%, HitCoverage=48%, E-value=3e-36, Identity=59%"; Hit description =Putative phytocyanin
  Pfam annotation: Domain name=Cu_bind_like; Domain location=33-142; Score=105.9; E_value=1.2e-28; Accession=PF02298.8; Description =Plastocyanin-like domain
MGMKKGVLMLALGLAMAVTSSAVVYKVGDASGWTILGNVNYTDWTSKQNFRVGDTIGKCSDECMCFSFGIDRWSDEVLVSLQEFTYPPGIHNVLEVNKADYHSCTNSTPIATHTSGDDKIVIKSPGHRFFICGVPGHCAAGQKLSIRVLKTRSSDAPSPAPAARSASAASPSPSGSTSTDPSGRRRLGVAACVVHGQHARRDDHHRARARRQWRGGQCRPPGRRRCHGTGGGRLHGDAVLDHQALLTPSGREHLSTWDSFVIHDAYMWIFSCYI

SEQ ID NO: 59206 - protein, 47 aa, Zea mays
  Coding DNA Sequence Number=SeqID_17427
  Homolog annotation: Hit_ID=Q5XLE2; Match level="QueryCoverage=70%, HitCoverage=31%, E-value=4e-13, Identity=97%"; Hit description=Brain protein 44-like
MATALKSFLNSPVGPKTTHFWGPVANWGFVVAGIGHTLKQTRPLHYQ

SEQ ID NO: 59207 - protein, 214 aa, Zea mays
  Coding DNA Sequence Number=SeqID_17428
  Gene Ontology: Mol. function=protein serine/threonine kinase activity; Biological process=protein amino acid phosphorylation
  Homolog annotation: Hit_ID=Q851M7; Match level="QueryCoverage=91%, HitCoverage=39%, E-value=3e-40, Identity=54%"; Hit description =Putative receptor-like protein kinase
  Pfam annotation: Domain name=B_lectin; Domain location=44-131; Score =15.0; E_value=9.8e-05; Accession=PF01453.15; Description=D-mannose binding lectin
  Subcellular localization annotation: CTP_CleavageSite=27; ConfidenceScore=5.74e-01
MPLGSTLSPGNSATWTSPNSTFSLGFTASASSPSLFVAAITYADGVPVWSAGNGAAVDLGSSLRLSSNGDLQLVNGSGAVLWSSNTVGQNVSAAAVQESGNLVLKDNLGAATPPQRSGRPWRTSASYNGTSPVCGCPSLNFQLRVGCTRKVELASCPGNSTMLELDNTQFLTYPPEITTEQFFVGITACRLNCLSGGCFFANPAPNFFNNCEPV

SEQ ID NO: 59208 - protein, 410 aa, Zea mays
  Coding DNA Sequence Number=SeqID_17429
  Gene Ontology: Mol. function=nucleic acid binding; Cellular component= chromatin; Biological process=DNA integration
  Homolog annotation: Hit_ID=Q8W0X5; Match level="QueryCoverage=70%, HitCoverage=92%, E-value=1e-155, Identity=91%"; Hit description =Putative pol protein
  Pfam annotation: Domain name=RVT_2; Domain location=37-261; Score =394.1; E_value=2e-115; Accession=PF07727.4; Description=Reverse transcriptase (RNA-dependent
MGGGPMQEGVKQLQSANEVGTLGASSEAKCCGTKVGVPQQPGRARGGDENKARLVAKGYAQVAGLDFEETFAPVARLESIRILLAYAAHHSFRLFQMDVKSAFLNGPIKEEVYVEQPPGFEDERYPDHVCKLSKALYGLKQAPRAWYECLRDFLIANAFKVGKADPTLFTKTCDGDLFVCQIYVDDIIFGSTNQKSCEEFSRVMTQKFEMSMMGELNYFLGFQVKQLKDGTFISQTKYTQDLLKRFGMKDAKPAKTPMGTDGHTDLNKGDSDYAGCKVDRKSTSGTCQFLGRSLVSWNSKKQTSVALSTAEAEYVAAGQCCAQLLWMRQTLRDFGYNLSKVPLLCDNESAIRMAENPVEHSRTKHIDIRHHFLRDHQQKGDIEVFHSRRRIEREKVDLDHERLPLHSDER

SEQ ID NO: 59209 - protein, 222 aa, Zea mays
  Coding DNA Sequence Number=SeqID_17430
  Homolog annotation: Hit_ID=Q32WR6; Match level="QueryCoverage=21%, HitCoverage=14%, E-value=3e-10, Identity=68%"; Hit description=BZIP transcription factor
  Pfam annotation: Domain name=bZIP_1; Domain location=130-190; Score =59.3; E_value=1.2e-14; Accession=PF00170.11; Description=bZIP transcription factor
  Pfam annotation: Domain name=bZIP_2; Domain location=130-184; Score =44.1; E_value=4.7e-10; Accession=PF07716.5; Description=Basic region leucine zipper
  Pfam module annotation: Pfam domain module=bZIP_1::bZIP_2; Domain location=130-190::130-184
  Subcellular localization annotation: CTP_CleavageSite=61; ConfidenceScore=5.38e-01
MEDDEDIWANTASSPSASPPQPVAAGSVSTCSAFISTQLSLNSRLHLLSSAAAGGGSSPVRGGAYGADGVRHHHMALGGGFRNAAASQGSFFPYNLAGAGADVAPFDGGRGVLEDDMSVGAAASGTWAGGGTDRRKKRMIKNRESAARSRARKQAYVRELETKVQLLQQENESLRVKYDELWRGGKPVISTIGNKKWIEFWDPFAFLKDGTEGKQILTIGRI

SEQ ID NO: 59210 - protein, 394 aa, Zea mays
  Coding DNA Sequence Number=SeqID_17431
  Subcellular localization annotation: CTP_CleavageSite=53; ConfidenceScore=5.24e-01
MMQPHLPSPARLGAHSLVAVAPAQSGPLESHILAFTRAAPNPNHLARRCYRFLAAAFRARNRCSQLISSLASNLLELSANRAAWISAYRGSLPTFLPSASSAPPLATPISSTKDALSLVTTLQTQLFEAVAELQETLDLQDARARLVREARGKDAALLAFAKKLHEAHQVLDRLVDDYADYRRDPKRPRGAAAADDPEPASEGDFGTSLHSSLKLDDILTYAHRISYTTFAPPEHGAGLPLRVSLPPVPQENQMRASQLYLFADLDVGVPKKPLDAKDGIAAEVEVAPLYEAPQEGPSRLPNTLPPMFPKELKPPPGWKPGDPITLPLDEILPGIKGEEREAQAPVPQAPVSVRPVAPMGPETIQVKPVQLDFGSSSSDEYSSDVGSSEEDDED

SEQ ID NO: 59211 - protein, 476 aa, Zea mays
  Coding DNA Sequence Number=SeqID_17432
  Gene Ontology: Mol. function=protein binding; Cellular component =nucleus; Biological process=regulation of transcription, DNA -dependent
  Homolog annotation: Hit_ID=Q8LPU3; Match level="QueryCoverage=79%, HitCoverage=99%, E-value=0.0, Identity=93%"; Hit description =Nucleosome/chromatin assembly factor 104
  Pfam annotation: Domain name=WD40; Domain location=156-195; Score =33.4; E_value=7.9e-07; Accession=PF00400.22; Description=WD domain, G-beta repeat
  Pfam annotation: Domain name=WD40; Domain location=205-244; Score =27.8; E_value=3.9e-05; Accession=PF00400.22; Description=WD domain, G-beta repeat
  Pfam annotation: Domain name=WD40; Domain location=248-287; Score =33.8; E_value=6.1e-07; Accession=PF00400.22; Description=WD domain, G-beta repeat
  Pfam annotation: Domain name=WD40; Domain location=292-331; Score =33.0; E_value=1.1e-06; Accession=PF00400.22; Description=WD domain, G-beta repeat
  Pfam annotation: Domain name=WD40; Domain location=349-388; Score =31.8; E_value=2.4e-06; Accession=PF00400.22; Description=WD domain, G-beta repeat
  Pfam module annotation: Pfam domain module=WD40::WD40::WD40::WD40::WD4 0; Domain location=156-195::205-244::248-287::292-331::349-388
MDGGSSTPASPPPTVSASAANMEEYRNWKKNAAVLYDLVISHPLEWPSLTVQWLPSESSARSHRLVVGTHTSDEAPNNLMVLDAVLPLPPRLAAAVAASGGAVPFPSVSVSRVAPHRGEVNRARCMPQRPYTVATKTCVDEVHVYHLGDDDGSGKSGAEVVLKGHEAEGYGLSWSPMKEGWLLSGSYDKKICLWDISSGSGAPVLDAQQVFVAHEDLVEDVAWHLKDEHIFGSVGDDCKLMMWDLRTNKPEQSILAHRKEVNSLSFNPFNEWILATASGDTTINLFDMRKLSRSLHTFDSHEAEVFQVEWNPNLATVLASSAADKRVMIWDINRIGDEQSEEDADDGPPELLFVHGGHTDKISELSWNPSEKWAIASVSEDNILQIWEMAESIYCDDLSMQSTESDGQTFVAENARTSTWKEVNHGACHIAIIRVAWLSGRPPLLEKMEEEKVVRHWYGTDERSRLHQPYACSKHD

SEQ ID NO: 59212 - protein, 252 aa, Zea mays
  Coding DNA Sequence Number=SeqID_17433
  Gene Ontology: Mol. function=protein binding; Cellular component =nucleus; Biological process=multicellular organismal development
  Homolog annotation: Hit_ID=Q7XYF8; Match level="QueryCoverage=59%, HitCoverage=89%, E-value=2e-41, Identity=59%"; Hit description =SKP1/ASK1-like protein
  Pfam annotation: Domain name=Skp1; Domain location=94-170; Score =128.3; E_value=2.1e-35; Accession=PF01466.9; Description=Skp1 family, dimerisation domain
  Pfam annotation: Domain name=Skp1_POZ; Domain location=12-71; Score =62.9; E_value=1e-15; Accession=PF03931.5; Description=Skp1 family, tetramerisation domain
  Pfam module annotation: Pfam domain module=Skp1::Skp1_POZ; Domain location=94-170::12-71
MAAEAAAAGKEKMRTLVSSDFKKFDVEESVARESLIILNLMADCDDSDIPVFNVNANILDKVIAYCRKHASAPRADGGDAEPSAASNKASADDLKSFDAEFVDVDLVTLLELIKAADYLEINGLLDLTCQAVADMIKGKTPEEIRETFDIENDFTPEEEAKFDYLQHAQARQGGQQFDYLIPPIGMDKCSVNSVDSGNIHKAGMVMNGLPISVYTSETLSACAVSCTLKWDVATVMEYKGLPLQQVVDYYVR

SEQ ID NO: 59213 - protein, 248 aa, Zea mays
  Coding DNA Sequence Number=SeqID_17434
MTMSGLADCSAGHGCGAVKNILHLSEQIPRQPSARPAWLSLHRKAEQEATKPTEGACRMARPREEELVEAALVAAAAALIVSGVKRLVAPPEPVAPWWWPASLSVPSPALFLLLNVIIASIVVASVQPRRGGAAASASSGGAIDDEREARGDAAKRRRSKSKSKSKKRTAAEAAIPDGCYMALVVTGEPIETAAVMEEVAAADEDAAAEVNKRAEEFISAFRHHLRVDSFSSTTTRRSNARAAAPCSI

SEQ ID NO: 59214 - protein, 86 aa, Zea mays
  Coding DNA Sequence Number=SeqID_17435
MAYHLKSKKCIGSTVPQEENPEPGNAIVEMMFNDNVLKINVKRCVRLAIKLRKKYLYKVCWISIDLKYGTCPRSGIIQDCKMKLWN

SEQ ID NO: 59215 - protein, 282 aa, Zea mays
  Coding DNA Sequence Number=SeqID_17436
  Gene Ontology: Mol. function=pyridoxal phosphate binding; Cellular component=chloroplast; Biological process=cysteine biosynthetic process from serine
  Homolog annotation: Hit_ID=Q5JNB0; Match level="QueryCoverage=89%, HitCoverage=64%, E-value=1e-122, Identity=88%"; Hit description =Putative plastidic cysteine synthase 1
  Pfam annotation: Domain name=ADH_zinc_N; Domain location=75-255; Score=-15.1; E_value=0.084; Accession=PF00107.16; Description=Zinc -binding dehydrogenase
  Pfam annotation: Domain name=PALP; Domain location=19-282; Score =364.1; E_value=2.2e-106; Accession=PF00291.15; Description=Pyridoxal- phosphate dependent enzyme
  Pfam module annotation: Pfam domain module=ADH_zinc_N::PALP; Domain location=75-255::19-282
MEEIAALAWACHLDELLLECDLIGKTPMVYLNNVVKGSVANVAAKLEIMEPCCSVKDRIGYSMINDAEQKGLITPGKSVLVEATSGNTGIGLAFIAASKGYKLILTMPSSMSMERRVLLRAFGAELVLTDAAKGMKGAVDKATEILNKTPNSYMLQQFDNPANPKVHYETTGPEIWEDSKGKVDILIGGIGTGGTISGAGRFLKEKNSGIKVIGIEPSESNILSGGKPGPHKIQGIGAGFVPRNLDSDILDEVIEISSDEAVETAKQLAVQEGLLDIVLTYH

SEQ ID NO: 59216 - protein, 607 aa, Zea mays
  Coding DNA Sequence Number=SeqID_17437
  Gene Ontology: Mol. function=Rab GTPase activator activity; Cellular component=intracellular; Biological process=regulation of Rab GTPase activity
  Homolog annotation: Hit_ID=Q655M0; Match level="QueryCoverage=98%, HitCoverage=79%, E-value=0.0, Identity=75%"; Hit description =Putative GTPase-activating protein
  Pfam annotation: Domain name=TBC; Domain location=372-597; Score= -37.4; E_value=6.2e-05; Accession=PF00566.9; Description=TBC domain
MPQVKSSYDGAGGDYIKWMCGAGGRPGGAMASLHRGVGSLVRDISDPCLNPSPVKVSILHAGDNANVSVAPLSVTLADTPNRCHYTALFFHDTIETSCLVYNSICAAYRITDHLQHLLRHKIPRRGNRMLKPERWHACFDSDGKAICFRKALKFIVLGGVDPSIRAEVWEFLIGCYTLSTTAEYRGKLRAARREKYRYLIKQCQSMHTSIGTGELAYAVGSKLMDVRTLPKETEGGEVSTSQQAEHEVPCSLAENSNLIYGSGCTTRPHKRKICSKSAETVGFNQHNDNSRGSGDCDVIGEPRYDSDAFIDFPSLTGTNLVANGDGDSNGVEENPCNFLVSEHRVRPHDEHMHSFQINNNIDLIIESNTFSNDIFRPSSSDSAIFHSDAYKHDRWLDDTGYSEEIIDSLRISDAPESDLVDGMKSNGSIADKDRVSEWLWTLHRIVVDVVRTDSHLDFYGESRNMARMSDILAVYAWVDPSTGYCQGMSDLLSPFVVIYEDDADAFWCFEMLLRRMRENFQMEGPTGVMKQLQALWKIMELTDAELFEHFSAIGAESLHFAFRMLLVLFRRELSFEESLIMWEMMWAADFDEEAVRHLEENCLEPLL

SEQ ID NO: 59217 - protein, 213 aa, Zea mays
  Coding DNA Sequence Number=SeqID_17438
  Gene Ontology: Cellular component=integral to membrane
  Homolog annotation: Hit_ID=Q5Z407; Match level="QueryCoverage=62%, HitCoverage=65%, E-value=3e-44, Identity=61%"; Hit description =Senescence-associated protein-like
AKGLTACGRRIEELKEHVPVGRGRGEEEEEELVAESDQMVRRQSREGRGLGWPACCLGFLLKLLAFLQAFAAVSALIYAAWILSRWARHHQLHLRDLLSPDLWFPSLVMAAGIFYCLLLLAGYLAAEINTGCCLCFELPEDRTGELHNLLSFIHNNLDLCKWAALAIFATQALSLLLAMTLRAMLSARTMDYDSDEDFVVIRRPLLVAQPPAP

SEQ ID NO: 59218 - protein, 130 aa, Zea mays
  Coding DNA Sequence Number=SeqID_17439
  Subcellular localization annotation: CTP_CleavageSite=51; ConfidenceScore=5.00e-01
MADGIDSLSRDLANTSIAPGAPSVAIASTFLEPPSGMGSTSSPRYWFLYARDEMLSESSEGYSARDEGYDPTRECLHIDSDIPDERDHLGMPLEDDQPPPRVREANGTERGPDPSWEPRGSSRATLGATR

SEQ ID NO: 59219 - protein, 91 aa, Zea mays
  Coding DNA Sequence Number=SeqID_17440
MVMFSVTSEDERTKRNSLPELSLEFGRESNFDKLVIAAYGCELNWWPTIVAWMTMVLLRGFGGDESMIDGLRCSSDMYLYRLGDLVIPIQI

SEQ ID NO: 59220 - protein, 99 aa, Zea mays
  Coding DNA Sequence Number=SeqID_17441
MAERECFDAADTAIAMRWVTGVPEAHAAAGSTHCAIKGNDLILVFLIFFALCGYVELGRDHQSRWIGIAWEGTTVEASAVVVSSVEEEEPITVGWEKDV

SEQ ID NO: 59221 - protein, 149 aa, Zea mays
  Coding DNA Sequence Number=SeqID_17442
MAVREVFGGAERHHDSGNCSSEYLQPHRTAKRCGRPPSTPSPRWPSWAPCHAERECFDAADTAIAMRWVTGVPEAHAAAGSTHCAIKGNDLILVFLILFALCGYVELGRDHQSRWIGIAWEGATVEASAAVVSSVEEEEPITVGWEKDV

SEQ ID NO: 59222 - protein, 249 aa, Zea mays
  Coding DNA Sequence Number=SeqID_17443
  Gene Ontology: Mol. function=diaminopimelate decarboxylase activity; Biological process=lysine biosynthetic process via diaminopimelate
  Homolog annotation: Hit_ID=Q6ZG77; Match level="QueryCoverage=64%, HitCoverage=33%, E-value=4e-48, Identity=63%"; Hit description =Putative diaminopimelate decarboxylase
  Subcellular localization annotation: CTP_CleavageSite=43; ConfidenceScore=5.78e-01
MAAANLLSRSLLPTPNTIRTSHPTPRSPAVVSFPRRRARLSVCASVSMASPSPPPQPAAAGVPKHCFRRGADGYLYCEGVRVEDAMAAAERSPFYLYSKLQILRNFAAYRDALQGLRSIVGYAVKANNNLPVLRVLRELGCGAVLVSGNELRLALQAGFDPASRPTPNSLLPATSPSLPAGSLSPVPVAAGAFGAVAALLLEELRHTLCCWRSCTTRSAAGRAPVPLLEEPLHHCWSRRWPLPLALGAA

SEQ ID NO: 59223 - protein, 326 aa, Zea mays
  Coding DNA Sequence Number=SeqID_17444
  Gene Ontology: Mol. function=protein phosphatase type 2C activity; Biological process=chromatin modification
  Homolog annotation: Hit_ID=Q6YTI2; Match level="QueryCoverage=69%, HitCoverage=52%, E-value=2e-98, Identity=75%"; Hit description =Putative calmodulin-binding protein phosphatase
MATGNVAGGGDTTPSHPPRRRLAMGQIRLGRWTEAADGALMASSDLDLRLRNIPPTEGSLRYKIGPLRCWPGGLCLSRSIGDQDVGEFIVPVPLVKQVKLSTAGGRLIIASDGVWDALSPEVAFNCSRELPPVPAAEQIVKTAVQSKGLRDDTTCIVVDIIAEKTNPSMPLPRRQPGIGVFKNMFGKKKSSDSSSHSHADREYMDPDILEEIFEDGLDSEYPVRNMFKLFICAVCQIELKPNQGISVHEDSSEPGSLRRWDGPFLCQSCQEKKEAMEGKRRSREVAAAYSSHPKRGACLVLSKVLAEECRQLCSALDLDGTYRFKD

SEQ ID NO: 59224 - protein, 1041 aa, Zea mays
  Coding DNA Sequence Number=SeqID_17445
  Gene Ontology: Mol. function=binding; Cellular component =intracellular; Biological process=protein amino acid phosphorylation
  Homolog annotation: Hit_ID=Q2QNV4; Match level="QueryCoverage=81%, HitCoverage=62%, E-value=1e-122, Identity=29%"; Hit description =Pentatricopeptide, putative, expressed
  Pfam annotation: Domain name=PPR; Domain location=163-197; Score =39.7; E_value=1e-08; Accession=PF01535.11; Description=PPR repeat
  Pfam annotation: Domain name=PPR; Domain location=229-263; Score =36.1; E_value=1.2e-07; Accession=PF01535.11; Description=PPR repeat
  Pfam annotation: Domain name=PPR; Domain location=330-364; Score =21.4; E_value=0.0033; Accession=PF01535.11; Description=PPR repeat
  Pfam annotation: Domain name=PPR; Domain location=431-465; Score =32.1; E_value=1.9e-06; Accession=PF01535.11; Description=PPR repeat
  Pfam annotation: Domain name=PPR; Domain location=532-566; Score =30.3; E_value=6.7e-06; Accession=PF01535.11; Description=PPR repeat
  Pfam annotation: Domain name=PPR; Domain location=635-669; Score =12.9; E_value=0.22; Accession=PF01535.11; Description=PPR repeat
  Pfam annotation: Domain name=PPR; Domain location=670-704; Score=1.3; E_value=5.2; Accession=PF01535.11; Description=PPR repeat
  Pfam annotation: Domain name=PPR; Domain location=737-771; Score =42.3; E_value=1.7e-09; Accession=PF01535.11; Description=PPR repeat
  Pfam annotation: Domain name=PPR; Domain location=772-806; Score=2.7; E_value=3.6; Accession=PF01535.11; Description=PPR repeat
  Pfam annotation: Domain name=PPR; Domain location=808-842; Score=0.8; E_value=6; Accession=PF01535.11; Description=PPR repeat
  Pfam module annotation: Pfam domain module=PPR::PPR::PPR::PPR::PPR::PP R::PPR::PPR::PPR::PPR; Domain location=163-197::229-263::330-364::431- 465::532-566::635-669::670-704::737-771::772-806::808-842
SSPTPSGAGMRGPARTDSCGLGLPLRGRLGDALVDLYGRSGRVGYAWRALACCTGAPASSAAASSVLSCHARSGSPRDVLDAFQRIRCSIGSTPDQFGIAVVLSACSRLGALEHGRQVHCDVLKSRFCSSVFCQAGLVDMYAKCGEVDDARRMFDGIACPDTICWTSMIAGYHRVGRYQQALALFSRMEKMGSVPDQVTCVTIISTLASMGRLGDARTLLKRIRMTSTVAWNAVIASYSQSGLDSEVFGLYKDMKKQGLMPTRSTFASILSAAANMTAFDEGRQIHATAVKHGLDANVFVGSSLINLYVKHGCISDAKKVFDFSTEKNIVMWNAILYGFVQNELQEETIQMFQYMRRADLEADDFTFVSVLGACINLYSLDLGRQVHCITIKNGMDADLFVANAMLDMYSKLGAIDVAKALFSLIPVKDSVSWNALIVGLAHNEEEGEAINMLKRMKFYGIALDEVSFATAINACSNIWAIETGKQIHSASIKYNVCSNHAVGSSLIDLYSKFGDVESSRKVLAHVDASSIVPINALITGLVQNNREDEAIELFQQVLKDGFKPSNFTFTSILSGCTRPVSSVIGKQVHCYTLKSAILNQDTSLGISLVGIYLKCKLLEDANKLLEEVPDHKNLVEWTATISGYAQNGYSVQSLVMFWRMRSYDVRSDEATFTSVLKACSEMAALTDGKEIHGLIVKSGFVSYETATSALMDMYSKCGDVISSFEIFKELKNRQNIMPWNSMIVGFAKNGYANEALLLFQKMQESQIKPDDVTLLGVLIACSHAGLISEGLHFFDSMSQVYGIVPRVDHYACLIDLLGRGGHLQKAQEVIDQLPFRADGVIWATYLAACQMHKDEERGKVAAKKLVEMEPQSSSTLAQQGFGRSLRLIGLLGKGPGHPLRLTGLLGKGPGRPLLGAGLLDKWAGRRSWVYFGAGIPRLTAIAAKSTQGPPYTDHSPTALAPFGYQDDSSNPRDFTASRSNTSKHGNNIVAREVVLTEGEGGFEDGPRRERHYGGKKVDDEKFRSPEPPIQSRKPKETLPAS

SEQ ID NO: 59225 - protein, 160 aa, Zea mays
  Coding DNA Sequence Number=SeqID_17446
MGTVTRCCVGDEAPAGNSDGEHELRRGSTDSDDDVRMRTGRSAAGAVDSGFHSCAGARQERRGRVTGSRVHGAGVGRPWRCGLDAGRCSGVLVLGSCVGCAREKERTEEKSGGWEQDVQGTATAWPGSCAWKSKEEEREWMAAGRGNQGSDARLGWGRLL

SEQ ID NO: 59226 - protein, 236 aa, Zea mays
  Coding DNA Sequence Number=SeqID_17447
MGTVTRCCVGDEAPAGNSDVGEQGARERKGAWEEESSCVGFYREEEGEGELGRGRNGDQSLQGTIDGVHQWRGEWGWGKGRVDAPLTQGDKRTGARCGHRLGVARSLRSARVAWMRGCAGGRRFAARQQGCSARSPGARQERRGRVTGSRVHGAGVGRPWRCGLDAGRCSGVLVLGSCVGCAREKERTEEKSGGWEQDVQGTATAWPGSCAWKSEEGERRRERVDGGWEREPGERR

SEQ ID NO: 59227 - protein, 107 aa, Zea mays
  Coding DNA Sequence Number=SeqID_17448
MESSRQPDHGSSVAAILSLDLSSTGLTALCCTRWTRCFLYGQGDEDTVVVAGEWSPRTQRLMFAASFVAFCCEFVARRATTGSLAIAELPQRRGEDDSVASAPHARD

SEQ ID NO: 59228 - protein, 154 aa, Zea mays
  Coding DNA Sequence Number=SeqID_17449
MDNEELKDVGMKYLQPTLAHVEDKRLHTLPTSRDLFLPRVDQTLKHYQDNPEAPPVRAPTVRTQRPADVAGAPDCPVRHATDSLPTTTFGGWEAACSKETSLSNVEIAVRVHDPGAPDRYDAPHRTVYMQMFILLWSSLHLRMHTFQVSRYVMA

SEQ ID NO: 59229 - protein, 397 aa, Zea mays
  Coding DNA Sequence Number=SeqID_17450
  Gene Ontology: Mol. function=transition metal ion binding; Cellular component=chloroplast; Biological process=chlorophyll biosynthetic process
  Homolog annotation: Hit_ID=Q9SDJ2; Match level="QueryCoverage=99%, HitCoverage=98%, E-value=1e-168, Identity=77%"; Hit description =Putative ZIP
  Pfam annotation: Domain name=Rubrerythrin; Domain location=151-255; Score=71.7; E_value=2.3e-18; Accession=PF02915.8; Description =Rubrerythrin
  Subcellular localization annotation: CTP_CleavageSite=34; ConfidenceScore=5.39e-01
MELSLLNPAATHRHRGGLAGLPLARRSVVRFRVSASAAAAAPPKSSGPKKRGKTEIQETLLTPRFYTTDFDEMERLFNAEINKQLNQAEFDALLQEFKTDYNQTHFVRNPEFKAAADRMEGPLRPDLRRVPRALLHRRVLRLPPLQGARPQAQGSFLLLSSCISSTAWFLNKGLSDFNLALDLGFLTKARKYTFFKPKFIFYATYLSEKIGYWRYITIFRHLKANPEYQVYPIFKYFENWCQDENRHGDFFSALLKAQPQFLNDWKAKLWSRFFCLSVYVTMYLNDCQRTAFYEGIGLDTKEFDMHVIIETNRTTARIFPAVLDVENPEFKRKLDRMVEINQKIIAVGESDEIPLVKNLKRIPLVASLVSEIIAAYLMPPIESGSVDFAEFEPRLVY

SEQ ID NO: 59230 - protein, 257 aa, Zea mays
  Coding DNA Sequence Number=SeqID_17451
  Gene Ontology: Mol. function=DNA binding; Cellular component=nucleus; Biological process=regulation of transcription, DNA-dependent
  Homolog annotation: Hit_ID=Q0PJJ2; Match level="QueryCoverage=80%, HitCoverage=59%, E-value=3e-15, Identity=31%"; Hit description=MYB transcription factor MYB109
MATLATAAAAWTREEDKAFENAVAAAAAPPDDGPPDDGWFTALVASVPARTAEEVRRHYEALVEDVAAIEAGRIPLPRYAGEESSAATPEGSGSAASAPKDAGGGGGGGGHRREERKSGVGVDVGKSSSKAEQERRKGIPWTEEEHRFLADLHVFSPSKAYTFLVGAGCSCWVWTSSARATAGASRAIRHLTDADAGGEHAQKYFIRLNSMNGPGRPASPTFQVTGEMPPRTHHGGQHGGGYDGPGMNCVTTCCAMH

SEQ ID NO: 59231 - protein, 32 aa, Zea mays
  Coding DNA Sequence Number=SeqID_17452
MALEFAIIVVSRRPANRSPLASCQATPCAVSG

SEQ ID NO: 59232 - protein, 541 aa, Zea mays
  Coding DNA Sequence Number=SeqID_17453
  Gene Ontology: Mol. function=sugar porter activity; Cellular component=integral to membrane; Biological process=transport
  Homolog annotation: Hit_ID=Q9SDI4; Match level="QueryCoverage=76%, HitCoverage=78%, E-value=0.0, Identity=92%"; Hit description =Putative solute carrier family 17 (Anion/sugar transporter), member 5
  Pfam annotation: Domain name=MFS_1; Domain location=101-472; Score =209.0; E_value=1.1e-59; Accession=PF07690.6; Description=Major Facilitator Superfamily
  Pfam annotation: Domain name=Sugar_tr; Domain location=97-505; Score=- 121.1; E_value=0.0044; Accession=PF00083.14; Description=Sugar (and other) transporter
  Pfam module annotation: Pfam domain module=MFS_1::Sugar_tr; Domain location=101-472::97-505
MLLHLLPLSCPAPPFHLRRTRRLAADAAGPGPATGPGHGGSRGTDVEPGDSSAKAPRPRWRRSSSGWERRLLLSEAPAAAEGDSEEEEQGQFPKRWAIVFLCFSAFLLCNMDRVNMSIAILPMSAEFGWNPQTVGLIQSSFFWGYLLTQIAGGIWADTVGGKTVLGFGVVWWSIATALTPVAAHLGLPFLLVVRAFMGIGEGVAMPAMNNILSKWVPVSERSRSLSLVYSGMYLGSVTGLAFSPLLIHKFGWPSVFFSFGSLGLVWFTTWATKAYSSPLEDPGISAAEKKLIASQSTAGEPVKTIPWRLILSKPPVWALIVSHFCHNWGTFILLTWMPTYYNQVLKFNLMESGLICVLPWFTMAVSANVGGWIADTLVSRGVSVTTVRKIMQSIGFLGPAFFLTQLSHVNSPAMAVLCMACSQGTDAFSQSGLYSNHQDIGPRYAGVLLGLSNTAGVLAGVFGTAATGYILQHGSWDNVFELSVVLYLVGTLRRFEAYGIMDELSDAPVPSMPLYIVLSIGIMYSMPDVDKNKETWGWGYY

SEQ ID NO: 59233 - protein, 94 aa, Zea mays
  Coding DNA Sequence Number=SeqID_17454
MGKKQRVANGRGRTEIRQVFIYVDCFLSFLLGLPFDYKAGSLDPLWPNYSGVWLPLALQHFRSPAMLFLLSTSLFGVHSMPPLVAANIFLHGYG

SEQ ID NO: 59234 - protein, 252 aa, Zea mays
  Coding DNA Sequence Number=SeqID_17455
  Homolog annotation: Hit_ID=Q6ETK5; Match level="QueryCoverage=22%, HitCoverage=9%, E-value=3e-12, Identity=71%"; Hit description=RNA recognition motif (RRM)-containing protein-like
  Subcellular localization annotation: CTP_CleavageSite=29; ConfidenceScore=5.52e-01
MAPRTLCDDGGSQPPYGSKRTSARTRQLRQLSFRQAPALLRRPRHHTNRVPKPLRLPRWHGGTIILSGPGGPAVTPQTSELKTLDLLNCVDCRVKVLTPNVPDIVVAPPDDDEHTYYVWRLYSFAQIVEVLTESLTLKETWTPTKVARLMQQRITAEALKTLLNIPLLLLTPTHSSLQTEVEDRLKFLSCSTVNLLRSRVCETRMRLRGRLPVIEGVFSQSEYGLSTSTDGVLTAGGLLVCKKAQQEGHLRI

SEQ ID NO: 59235 - protein, 53 aa, Zea mays
  Coding DNA Sequence Number=SeqID_17456
MAAVAQERARRRTPGRWLRWLRFPDPDARWARFRVGPILGFLSIMLHGYKGKI

SEQ ID NO: 59236 - protein, 631 aa, Zea mays
  Coding DNA Sequence Number=SeqID_17457
  Gene Ontology: Mol. function=metal ion binding
  Homolog annotation: Hit_ID=Q2QZH3; Match level="QueryCoverage=93%, HitCoverage=95%, E-value=1e-160, Identity=54%"; Hit description=Von Willebrand factor type A domain containing protein, expressed
  Pfam annotation: Domain name=VWA; Domain location=79-268; Score=61.8; E_value=2.2e-15; Accession=PF00092.18; Description=von Willebrand factor type A domain
MEIFQLQLMILPSLLTCFFSTLLLTQLMAAAGAEATVKVSTTPIFPEIPLGQARKDFQVLLRVEAPAAVVRPEARVPIDVVAVLDVSGSMNDPTAVPPERRTTTSRLDLLRTAAKFMVDKLEDGDRLSIVAFSDRPVRELSSGLLYMTADGRRNAIRSVDRLEARAGSGTALVPAFEEAVNILDERVGDGRDRLGFIILLTDGEGTTVSALSERRREVIRRALGRYPVHAFGLGAAHDPEVLLHMAQESHGTYSFVDDDSIGDVAGALAVCLGGLSTIAAVETRVVLKADELNGVRIDRVDAGGYDSSVSCGGTSCEVSVGNVLYAGEAKHFVVHLHVPAALPSSSAKGGYYCDGLGACDRYYHHRHEQHLLAVDYSYRNHPSARAIEGEGHDVYVRRSPAVLDGGRQAPAPVPSPVVLQHIVRSELLEVVAGVVQGELTINDRARAADVLQLRWEEFAACHQFWGGGHDLMSGLEKEVGGMVSSLRAGVAAYAYAWVSSHQMQRATSMGSAEKVTVEFLTPAMRLLLEEARKLPRWWNWNPPHTGCVDHGFEMIDRRLELWSKMKRDMQNLGSFQEQSAAAVDDEQQRMAAVFQEASLEAIDRAMHRDIYLAVVYASKQRQCRHLVAAQN

SEQ ID NO: 59237 - protein, 89 aa, Zea mays
  Coding DNA Sequence Number=SeqID_17458
MASLPGRVVGFFAEKKTLCAIVDHSTLGADRPEVCKGGSTPAPGRGPSGPMPQIVHASAESSARRFVPVFGTWIGANTLFGDSAGNKGV

SEQ ID NO: 59238 - protein, 108 aa, Zea mays
  Coding DNA Sequence Number=SeqID_17459
MPCHLMNTGLNILRPPKSLRDVEQEVVALIGHIAHISDIPERKADRMMSGNLRFPHTNLMEGCQTWWKELGMRKFAPCSLYLIPKARDLNPIILEAKWSRAAWSHKAR

SEQ ID NO: 59239 - protein, 639 aa, Zea mays
  Coding DNA Sequence Number=SeqID_17460
  Gene Ontology: Mol. function=protein serine/threonine kinase activity; Cellular component=membrane; Biological process=protein amino acid phosphorylation
  Homolog annotation: Hit_ID=Q33B66; Match level="QueryCoverage=95%, HitCoverage=90%, E-value=0.0, Identity=59%"; Hit description=Protein kinase domain containing protein, expressed
  Pfam annotation: Domain name=DUF26; Domain location=189-243; Score =60.1; E_value=7.3e-15; Accession=PF01657.8; Description=Domain of unknown function DUF26
  Pfam annotation: Domain name=Pkinase; Domain location=349-621; Score =146.3; E_value=8.3e-41; Accession=PF00069.15; Description=Protein kinase domain
  Pfam annotation: Domain name=Pkinase_Tyr; Domain location=349-621; Score=142.3; E_value=1.3e-39; Accession=PF07714.7; Description =Protein tyrosine kinase
  Pfam module annotation: Pfam domain module=DUF26::Pkinase::Pkinase _Tyr; Domain location=189-243::349-621::349-621
MTMNVVVAGVLLLVLGGLNNPPSVAADFCDNLKQVAATLPKNTSTSPLHFATATFGQAPDVVYALALCRGDVLDDTTCGDCVANTFDKVKPPPPQVCYPAAYYYGGACRLVYSGDNILAPPNTTAANGDDTPYPLWNIKNITAADADDVRLIVRLVHELVVETVQLAASTAPRRFATGVMDSGAMFPKVYSLAQCTPDLSAAGCLACLQRLLGMVNSTMALRMGAQIHVIRCYFRYEAYAFYDSKPMLQVGPSAPAPAPSPNPVEHKRRSSKLWVIPVVVVPLAAVAFLCFIFYSPCFRRYRRGKAMRLQAGSRRTQGLHGDEELVWDGKNSDFSVFHFEQVLEATDSFSEENKLGHGGFGAVYKGQFADGLQIAVKRLASHSGQGFTEFKNEVQLIAKLQHRNLVRLLGCCSQEEEKILVYEYLPNKSLDFFIFDESRRAMLDWSKLLVIIEGIAHGLLYLHKHSRLRVIHRDLKPSNILLDSEMKPKISDFGLAKIFSSNNTERNTTQRVVGTYGYMAPEYASEGIFSIKSDVFSFGVLVLEILSGKRNSGSDQCGDFINLIGYAWQLWDEERWIDIVDASLVNKSQSSEMMRCVNIALLCVQENAADRPTMADVVAMLSTETTTVLAEPKKPAYFN

SEQ ID NO: 59240 - protein, 181 aa, Zea mays
  Coding DNA Sequence Number=SeqID_17461
MEARMMAEREAERAARLADQQRMAEMFQYMQSLGATQAKSQFIGIGIHSLPRVLALALGKKARFAECHTEHSTKNLTKGPVDGFFAECWDVVYRPALGKEALGKAPDSRSERGCHPAYRGVTSACDVAVGRSGIQGRGSEVGVWRSRLPETAKAGVPCTSAMMKEDTARMEGTISDRQDPK

SEQ ID NO: 59241 - protein, 424 aa, Zea mays
  Coding DNA Sequence Number=SeqID_17462
  Gene Ontology: Mol. function=damaged DNA binding; Cellular component =nucleus; Biological process=nucleotide-excision repair
  Homolog annotation: Hit_ID=Q7EY71; Match level="QueryCoverage=99%, HitCoverage=55%, E-value=1e-175, Identity=65%"; Hit description =Putative xeroderma pigmentosum group C protein
  Pfam annotation: Domain name=Rad4; Domain location=16-349; Score =144.4; E_value=3e-40; Accession=PF03835.5; Description=DNA repair protein Rad4
  Subcellular localization annotation: CTP_CleavageSite=45; ConfidenceScore=5.41e-01
MALSATAAETQNNKLATHMNQLTVSLQDSSSPLKKLRQNVEALSSSSAVWSRSAGAPLYWAEVYCGGQASTGRWVHVDVVNNLIDAEQNVEASSAVCKKPLRYVIAFAGNGAKDWHRIAQGRVNSEWWDNVLAPLKQMELAATNNYEDMELQTRALTEPLPTSQQAYKDHHLYALEKWLHKNQIFHPKGPVLGFCKGHPVYPRSCVQTLQSRHGWLREGLQVRENELPAKVVTRPKRTFNAQSVQSSGNEDGLKPTLELYGEWQLEPLQLPHAVNGVVPKVAKRLGIDYAPAMVGFDYRSGRCLPVFDGIVVCTEFRSAILEEEAQALSRWYQLLCSIVTRQRLKDSYKTPSHGIGNEGLPENDNVHRSTLSSRSSEREPSSSKLQTDHDHDHEFPKEDQSFDEETFVRTKRCPCGFSIQVEEL

SEQ ID NO: 59242 - protein, 106 aa, Zea mays
  Coding DNA Sequence Number=SeqID_17463
  Gene Ontology: Mol. function=nucleic acid binding
  Homolog annotation: Hit_ID=Q7EY69; Match level="QueryCoverage=99%, HitCoverage=44%, E-value=7e-17, Identity=46%"; Hit description =Putative transcriptional coactivator
  Subcellular localization annotation: CTP_CleavageSite=61; ConfidenceScore=5.65e-01
MKKEVIGNDLGLPMTSRINVVGASNGRATRTVVMTPEFSPRGRGSSSRPLSNRFNNRGCLQAGRGRGQFQGRGRGRGRGRGRKPEKTADELDKDLESYHAEAMKTD

SEQ ID NO: 59243 - protein, 45 aa, Zea mays
  Coding DNA Sequence Number=SeqID_17464
MEAGRWAQTADACGSWAARESEINDQDYIARARARLTGGARASAS

SEQ ID NO: 59244 - protein, 1249 aa, Zea mays
  Coding DNA Sequence Number=SeqID_17465
  Gene Ontology: Mol. function=zinc ion binding
  Homolog annotation: Hit_ID=Q2QSD0; Match level="QueryCoverage=95%, HitCoverage=91%, E-value=0.0, Identity=40%"; Hit description=PHD -finger family protein, expressed
  Pfam annotation: Domain name=PHD; Domain location=264-319; Score =15.2; E_value=0.0017; Accession=PF00628.19; Description=PHD-finger
  Pfam annotation: Domain name=zf-CCHC; Domain location=685-702; Score =6.7; E_value=0.077; Accession=PF00098.13; Description=Zinc knuckle
  Pfam module annotation: Pfam domain module=PHD::zf-CCHC; Domain location=264-319::685-702
MAWLEWGVDHRSQGNKYSGIRSYFCFLLRKKEGKVSAECMVLCRSKLHIIVESVLRHTVRNTDRAPRSSGRRNNVLSWISEVKDTSNVGVRKKRGRRAPPSAKRLRDKRVDKAIESDGAVDSDSDDTDGQVDKNQPSAHIEEHVDGRTGDDLATAGHSGNSSNGPSSASEEQDHSTNSKDKLQKASSQNTKKVFGNSTNGKQGASNLEQECANEDGSHVLVAAVYKDIDNERSSQKIRDDVSDAQLDTASSDDKSSEEVEDVKVCDICGDVGEEEKLAVCSRCNDGAEHTYCMQTRYCMRVMMEEVPDSEWLCEDCQTAVESENENRLQKSQVKAGTSKELSLEGEINKPAIAAKGRSSSDCELKAGNIENKESNTTNERNGTVKTRTEEDAVTTSSTRDIFSETGGLYMGADSRKRMEPSHETFVSDADKGKQPSHQVSTSLVVNALKNQAPQSRDLNFLHKILSSLEFNLWYYVTFRACPGGMQSNETVVPKVKQLLNEVPQKPKFLKESWSSIINKKEGPISMTTKSATFKKPKPCEPTNKAKSSVLSPVEEPRVPNQLASHNVTNGQCSILGPPSATSSMVAPVLRTDSTTQLLSTRNNTVDSNNLGSVHLQGGNSELKKPRLAKVPGSMMLSNAERSAGGILGSGAHREVIQNSDPSHRDAKIKDQTGFRQGASSSNRTIRCQRCNEYGHSTHFCEVEKLRLSSGKPLSERNLKDASAKRNKTSEVSTLASSEKTPSREPEHVVKCAINQNLINGPNDGIPAPFSHVKKHSLSPRANVSIPGSGVDCSKPKFKNNDPSLSGTAGIFVHNGRIMPNDHRDEPAQGFSAGDEPTSSTVPELGWIWQGGFELQRTGSSPELCDGFQAHLSCSASQLVLDAVKKFPSKVQLEEVPRKNSWPTQFQKNGPTYDNIGLFFFARDVQSYENHYSKLVENMLKNDLVLRGSVGTVELLIFPSNILSKNFQRWNMLYFLWGLFRVSKKDSSNLPSYLSTSRVERNFNDDLQAMDWMPSTHSFSQNRSDLAEPDPDLLKSTNFEPSLEASREVCLDGENSLNQLVRRRALDDHLDSDAKACSTISNGAMGSSAMSMQRKHQKPDYPEHQDKKRDTFGGNVSERDFDVNTVPVTCSVSLTHLQEEPGKLSTAIDLMDIDHGVSAGALDRSHASGGAGKRSFETAEVAAEVPEHKKTKLDNNVVPISSGPRENACTNDGNSDKLMPGSSSSDGKRVFPLDLNAVGDEDIVNIPAFR

SEQ ID NO: 59245 - protein, 199 aa, Zea mays
  Coding DNA Sequence Number=SeqID_17466
  Homolog annotation: Hit_ID=Q60CZ4; Match level="QueryCoverage=48%, HitCoverage=25%, E-value=1e-11, Identity=53%"; Hit description =Uncharacterized plant-specific domain TIGR01589 family protein
MGHERRRSMWARSARNAGDRRCMPAASPSLYLSEEEDCHPNLLAAGVGKKQRGANGRGRTERYDSYQCTNGISSTSVFSNLSGPLPANLTWTQWHVVSSGHVVNGISAPVGYHPMWMNFGNDMVVDNGVLEAPRAGATASIMSYEMAMSPSLAIGSSYALFLYGFCLCPWNEMHSEVSVLATKFVLPFSFIHYLRLKFQ

SEQ ID NO: 59246 - protein, 45 aa, Zea mays
  Coding DNA Sequence Number=SeqID_17467
MAVPDFCARWRAFNALQISADFSLQVSRRSFFAFYFGGISVYFSL

SEQ ID NO: 59247 - protein, 173 aa, Zea mays
  Coding DNA Sequence Number=SeqID_17468
MTTASTRATQRKQGGWEQFVRETGERLRLEKRMQAGAGRVMSSRASARRARRGHSRWRKTWLECAGSVARAAGYWHAAGTRCLPRNGGAAWAAGRPRGEARWAAGGENDLGRSEERAGRSAARASVPEMNKEVKRKRYKKVDQFIVVVGPNSIKALTELGVEPSPEVVPLLLI

SEQ ID NO: 59248 - protein, 302 aa, Zea mays
  Coding DNA Sequence Number=SeqID_17469
  Gene Ontology: Mol. function=L-lactate dehydrogenase activity; Cellular component=cytoplasm; Biological process=tricarboxylic acid cycle intermediate metabolic process
  Homolog annotation: Hit_ID=P29038; Match level="QueryCoverage=99%, HitCoverage=100%, E-value=1e-119, Identity=68%"; Hit description=L -lactate dehydrogenase
  Pfam annotation: Domain name=Ldh_1_C; Domain location=126-300; Score =18.8; E_value=3.6e-08; Accession=PF02866.8; Description =lactatemalate dehydrogenase, alphabeta C-t
  Pfam annotation: Domain name=Ldh_1_N; Domain location=42-182; Score =220.8; E_value=3e-63; Accession=PF00056.13; Description =lactatemalate dehydrogenase, NAD binding do
  Pfam module annotation: Pfam domain module=Ldh_1_C::Ldh_1_N; Domain location=126-300::42-182
  Subcellular localization annotation: CTP_CleavageSite=43; ConfidenceScore=5.21e-01
MKKASSLSELGFDANGASSGFFRPVTDGGVTPTSPHHRRRLTKVSVIGAGNVGMAIAHTILTRDLADEIALVDALPDKLRGEMLDLQHAAAFLPRTRLVSGTDMSVTRGSDLAIVTAGARQIPGETRLDLLQRNVALFRKIVPPLAEQSPDALLLVVSNPVDVLTHVAWKLSGVAGMPVLKTLRDSHSSFGEEALEGIRRAVVDSAYEVIGLKGYTSWAIGYSVANLVSSLLRDQRRIHPVSVLAAGFHGIPDDQEVFLSLPARLGRAGILGVADMELTEEEARRLRRSAKTLWENTQLLGL

SEQ ID NO: 59249 - protein, 452 aa, Zea mays
  Coding DNA Sequence Number=SeqID_17470
  Homolog annotation: Hit_ID=Q5VS79; Match level="QueryCoverage=93%, HitCoverage=92%, E-value=1e-88, Identity=43%"; Hit description =Calmodulin-binding protein-like
MSRDRYFHRLLDLHLHANDDLFFPFPTPASSCPYITASSAHHRFLLDDHPFYPTSCPLGITSRSPIDDTFDLDLLLPLPLHAAVSAPPCAAFDFNPFLLDTLGHRISVLERALALAPPRRKKLKWTAEDRPAGGRNLKWEAELRTPHTDGFDRKWKWESKESATGSTKVKWAKEIKGKGCLEPWSNSYSVEETYGEDDHADDDREKKKPTGVQKKVKGENKQQQKKQGNVEIVEIEDNTAGCVAIRKAFEMNHCKGKRKELSPQDAALLIQMNYRAHLAHRSQVLRCLRDLAVAKAKLKEIRSFFYNITYRRRIAYDNEERQRFAEKIIVLLLTVDALEQMTNLVPLILIYDCSHKNLFSPLRYTQRFMINGYTKVPCKFKVILKKKNCIICILKGPDYMVRNARRSMLEELEGMLEIVEPQPPGKPRTLSRRRFDLPEGGAIEKETREEGK

SEQ ID NO: 59250 - protein, 402 aa, Zea mays
  Coding DNA Sequence Number=SeqID_17471
  Gene Ontology: Mol. function=protein prenyltransferase activity; Biological process=protein amino acid prenylation
  Pfam annotation: Domain name=PPTA; Domain location=115-140; Score =19.9; E_value=0.0091; Accession=PF01239.12; Description=Protein prenyltransferase alpha subunit repeat
  Pfam annotation: Domain name=PPTA; Domain location=78-108; Score=2.7; E_value=3.3; Accession=PF01239.12; Description=Protein prenyltransfera se alpha subunit repeat
  Pfam module annotation: Pfam domain module=PPTA::PPTA; Domain location=115-140::78-108
MHSILSDEVGFLHPTQFCSLDCARDGDSASQSTEFHCARYFWCRDHKLAISAEILPELYHAARDAYYNARDAPLSRTNLMRHTKALLILCPDLLTAWNSRKMVLSALYDFTKLKDELQLCALILSYSPKNESTWSHRQFPSIWDFGADFDIIKLNCMEFEITVCHRRWVIKQVAEQHQDMLELIGNESILVKEIAESLLLALLDNFFGNEEDSLSWESDICLLWKEELRWDEMLIKRYQGREFLLGGRYGTTGRFLSHLVDTTLAKDEGNWPATTSQMDMFVIQEIQLLSECLHDPVDEFEESRVQAELSALYIMWITKAISSWFYPASCLSQVPDVKGKLEERLHFASMGRLKDVLAGACRPEKRFWMNLLNLADQSSDKCDSKMPYVRSRQAGRDDAENN

SEQ ID NO: 59251 - protein, 58 aa, Zea mays
  Coding DNA Sequence Number=SeqID_17472
MAPRTLYDDGGSQPPYGSKRTDPPGSKRRQIGIVDAGSNNSDLKRDVDHLSVDLCVSP

SEQ ID NO: 59252 - protein, 84 aa, Zea mays
  Coding DNA Sequence Number=SeqID_17473
MERPTSRLFYLRFKPQPPYIIWYVDELISRANTNTIVLAWQIDAPGHGRTVRAFARTVRPLCRPSDFPCRTVQDLYQGYRVALQ

SEQ ID NO: 59253 - protein, 222 aa, Zea mays
  Coding DNA Sequence Number=SeqID_17474
MGGVAECYVSSGERASALGRRGGSSEAEVESVFRCRGRARAPESGEAEIRLAEARAESEPWGRARRSFVVFRVLARVRALGSGGAEFAVFRVLARVRALGSGGAEFAVFRVLARVRALGSGGAEFVVFRVLARVRALGSGGAEFVVFRVLARVRALGSGGAEFAVFRVLARVRALGSGGAEFAMAPLARPDCLSDSLCRVALQSEWRMRRCPSVRLVSGAVE

SEQ ID NO: 59254 - protein, 241 aa, Zea mays
  Coding DNA Sequence Number=SeqID_17475
  Gene Ontology: Mol. function=protein binding; Cellular component =spliceosome; Biological process=mRNA processing
  Homolog annotation: Hit_ID=UPI0000DA43ED; Match level="QueryCoverage =61%, HitCoverage=98%, E-value=1e-18, Identity=32%"; Hit description =PREDICTED: similar to keratinocytes proline-rich protein
  Subcellular localization annotation: CTP_CleavageSite=50; ConfidenceScore=5.22e-01
MAGSVRGGMRRGARKKTAGTESTNTSLRVLRLPKTDPSKALDASRPVLRNAASKSGPRRHGKLHFARPQGSDSGSAPEDDELRFARPQGSDSGSAPEDDELRFARPHGSDSGSALEDDELRFARPQGSDSGSAPEDDELRFARPQGSDSDSALEDDELRFARPQGSDSGSAPEDDELRFARPQGSDSGSAPEDDELRFARTQGSDSGSTPEDDELRFARPQGSDSGSAPKDNECNTPGVTQ

SEQ ID NO: 59255 - protein, 170 aa, Zea mays
  Coding DNA Sequence Number=SeqID_17476
MAPLQRKLGIVACARLLCLGPPSPIGAIQSVTWQSSGGRDKITITTKGDLLKIGTGAANHVDRRKAKGLHVEVVIVTAVLHTLHLILLVVCDIIVNHDSTELTVYAIVGCNNCRFYTLKILYLQGSQQERYLVRKALKCALSHLKADHAGDFLSCHGQRVQAFNKANSHT

SEQ ID NO: 59256 - protein, 161 aa, Zea mays
  Coding DNA Sequence Number=SeqID_17477
  Subcellular localization annotation: CTP_CleavageSite=78; ConfidenceScore=5.43e-01
MGNAGWCRRTGHASRRSASQLPTALPVRHVLPRLSVEDACPATRRSPFGGPREAPRTRRPVTGVNVIIIFVRLVSVIRCFPQVGRVIADGDRDAALRQGAPAGRHVWRRMGATGAEIDNILGYVSRHHWPRAMSPFAFLCFETFQRRKERIQVYNGGVAEC

SEQ ID NO: 59257 - protein, 221 aa, Zea mays
  Coding DNA Sequence Number=SeqID_17478
  Homolog annotation: Hit_ID=Q6K990; Match level="QueryCoverage=31%, HitCoverage=7%, E-value=4e-18, Identity=86%"; Hit description =Putative phragmoplast-associated kinesin
MVGGSVEILGSLAIEADGGRHDRREVEWAGKHEGRDGGWGNAELDARGAGLQSWAGQDPRMSARRAGWRLARLTARRSSWWLPGWCGARPTEIVATRRMEVAERIGDAVDPGAHEPAVEPLEVLLLRHRDAVEGEVATPVGVAAHGTAVPPHANSSADETPEVRFRMRPITSTGCSVAPPPSSALLHRHLPSRPPCAQQAMESPPGVAAWLEAEQTAPSSP

SEQ ID NO: 59258 - protein, 451 aa, Zea mays
  Coding DNA Sequence Number=SeqID_17479
  Gene Ontology: Mol. function=pyridoxal phosphate binding; Biological process=amino acid metabolic process
  Homolog annotation: Hit_ID=Q2JIS3; Match level="QueryCoverage=49%, HitCoverage=65%, E-value=5e-70, Identity=54%"; Hit description =Aluminium resistance protein
  Pfam annotation: Domain name=Alum_res; Domain location=68-379; Score =265.2; E_value=1.3e-76; Accession=PF06838.2; Description=Aluminium resistance protein
  Pfam annotation: Domain name=Cys_Met_Meta_PP; Domain location=112 -356; Score=-296.0; E_value=0.069; Accession=PF01053.10; Description =CysMet metabolism PLP-dependent enzyme
  Pfam module annotation: Pfam domain module=Alum_res::Cys_Met_Meta_PP; Domain location=68-379::112-356
MAVEEGRRGRRRHGAPGRGDRPHPEPHLGCLIRAGVRVGRDGRAVRGDADGCRDFTLDGVSVSEEEDLEGFYRRAVYRCSYMFAICVLAVLSILIKLGIRAPLRFTLVLCLASELTPQHFGGSTGYDHDDGGGREALDSVFADIVGAEAAIVRPQFFSGTHAIACALFALLRPGHELLAVAGPPYDTLEEVIGIRGSANVGSLKDFGVTYREVPMQNPNCMVMVDNCYGEFVEISEPAMVGADLIAGSLIKNPGGTIAPCGGYVAGKEHLVEAAAARLSAPGLGVEFGSTPGHVMRALFQGLFLSPQMVGEAVKGGLLIAEVMSAKGYKVEPLPRVPRHDIVQIEMTITKAKIGVDPSGCVELAKHVRLNNPNLVLSGLMIIGMLDYSSTPKNFKALANCREDVCKELGIPEEQLELFVDMSSDFEQTIEMGSTNVRVGSTIFGAREYPKN

SEQ ID NO: 59259 - protein, 109 aa, Zea mays
  Coding DNA Sequence Number=SeqID_17480
MTFFVETRIKYSKTGVFSVGLSDREQFCALLSYSELLDRLGDTHQAEGAQNRWTKRISDRDGVNGLQDEEKDVHNTSVKSQRLKAFWRFSSLATTTEEDAMLGADNISH

SEQ ID NO: 59260 - protein, 724 aa, Zea mays
  Coding DNA Sequence Number=SeqID_17481
  Gene Ontology: Mol. function=RNA-directed DNA polymerase activity; Cellular component=intracellular; Biological process=RNA-dependent DNA replication
  Homolog annotation: Hit_ID=UPI00004C1731; Match level="QueryCoverage =94%, HitCoverage=53%, E-value=0.0, Identity=71%"; Hit description =UPI00004C1731 related cluster
  Pfam annotation: Domain name=rve; Domain location=436-595; Score=3.3; E_value=0.0032; Accession=PF00665.16; Description=Integrase core domain
MKESDQLATSFITPFGMYCYVTMSFGLRNAGATYQRCMNHVLGEHIGRMVEAYVDDIVVKTRKVSDLLSDLEVTFRCLKAKGVKLNPEKCVFGVPRGMLLGFIVSERGIEANPEKIAAITSMGPIKDLKGVQRVMGCLAALSRFISRLGERGAPYKALLVYVAATTQVVSAAIVVERQEEGHALPVQRPVYFIGEVLSETKIRYPQVQKLLYAVILTRRKLRHYFESHPVTVVSSFPLGEIIQCREASGRIAKWAVEIMGETISFAPRKAIKSQVLADFVAEWVDTQLPTAPIQPELWIMFFDGSLMKTGAGAGLLFILPLGKHLRYVLRLHFPASNNVAEYEALVNGLRIAIELGVRRLDARGDSQLVIDQVMKNSHCRDPKMEAYCDEIDDTPEPEAPSAQPEAPSARPEAPSVQPEVPSAPEGEALDVEEEQSGATPDRNWQAPYLQYLRQGELPLDQAEARRVARRAKSFVLLGDEEELYHRSPSGILQRCISIAEEGARGYSHLLVAIDKFSKWIKDHHIRVDWAAVAHPMSNGQVERANGMILQGLKPRIYNDLNKFGKRWMKELPSVIWSLRTTPSRATGFTPFFLVYGAEAILPTDLEYGSPRTRAYNDQSNQASREESLDQLEEARDKVLLHSARYQQSLRRYHARGVRSRDLQVGNLVLRLRQDARGRHKLTPPWEGPFVIAKVLKPGTYKLANNQGEVYGNAWNIKQLRRFYP

SEQ ID NO: 59261 - protein, 44 aa, Zea mays
  Coding DNA Sequence Number=SeqID_17482
  Gene Ontology: Mol. function=DNA-directed RNA polymerase activity; Cellular component=RNA polymerase complex; Biological process =transcription, DNA-dependent
  Homolog annotation: Hit_ID=Q6F2V1; Match level="QueryCoverage=91%, HitCoverage=28%, E-value=2e-16, Identity=97%"; Hit description =Putative DNA-directed RNA polymerase II subunit
MKELRARKIPFTIRRYLPDGSYEDWGVDELIVEDSWKRQDGIAA

SEQ ID NO: 59262 - protein, 649 aa, Zea mays
  Coding DNA Sequence Number=SeqID_17483
  Gene Ontology: Mol. function=nucleic acid binding; Cellular component= proton-transporting two-sector ATPase complex; Biological process=DNA integration
  Homolog annotation: Hit_ID=Q7XBC6; Match level="QueryCoverage=97%, HitCoverage=34%, E-value=0.0, Identity=78%"; Hit description =Putative copia-type pol polyprotein
  Pfam annotation: Domain name=rve; Domain location=386-540; Score =91.0; E_value=3.7e-24; Accession=PF00665.16; Description=Integrase core domain
MEVDSNACDDPIPNIRDDNISLLAKIEELNVSLASLKNENEKLIAKAKDLDVCNVTISNLKSENDSLHANIIELKSCKPSTSTVEHVSICTRCRDINVDAIHDHLALIKKQNNHIAQLNAKINEHDLENEKFKFARSMLYSGRRPGIKDDIDFQKGDNVKLNTPPKRLSNFVKGKTLMPQDNEGYILYPAGYPEHKIRRIHSRKSHSGPNHAFMYKGETYSSRQSTRAKLHKKKTPVASNDSNISFKTFDASYVLTNKSGKVVAKYVGGKHKGSKTCVWVPKVLVSNVKGPKIVWVYASGGSSWIIDSGCTNHMTGEKKMFSSYEKNQDPQRAITFGDGNQGVTAFRRSDDSIAFKGVLEGQLYLVDFDRAELDTCLIAKTNMGWLWHRRLAHVGMKNLHKLLKEEHILGLTNVHFEKDREKSHTQETLKGFLRRAQNEFYLRIKKIRSNNGMEFKNSQIEGFLEEEEGIKHEFSSPYTPQQNGVVEKKNRTLLDMARTMLDEYKTSDRFWAEAINTACYAINRLYLHRILKKTSYELLTGKKPNVSYFRVFGSKCFILVKRGRKSKFAPKAVEGFLLGYDSNTRAYRVFNKSSGLVEVSCDIVFDETNGSQVEQVDLDELDDEEAPCVALRNMSVGGLRLPKVLKNII

SEQ ID NO: 59263 - protein, 1099 aa, Zea mays
  Coding DNA Sequence Number=SeqID_17484
  Gene Ontology: Mol. function=protein serine/threonine kinase activity; Cellular component=integral to membrane; Biological process=protein amino acid phosphorylation
  Homolog annotation: Hit_ID=Q2R440; Match level="QueryCoverage=90%, HitCoverage=94%, E-value=0.0, Identity=39%"; Hit description=Leucine Rich Repeat family protein
  Pfam annotation: Domain name=LRRNT_2; Domain location=32-77; Score =52.8; E_value=1.1e-12; Accession=PF08263.3; Description=Leucine rich repeat N-terminal domain
  Pfam annotation: Domain name=LRR_1; Domain location=105-127; Score =15.1; E_value=0.26; Accession=PF00560.23; Description=Leucine Rich Repeat
  Pfam annotation: Domain name=LRR_1; Domain location=129-151; Score =11.5; E_value=2; Accession=PF00560.23; Description=Leucine Rich Repeat
  Pfam annotation: Domain name=LRR_1; Domain location=153-175; Score =15.5; E_value=0.2; Accession=PF00560.23; Description=Leucine Rich Repeat
  Pfam annotation: Domain name=LRR_1; Domain location=178-200; Score =15.9; E_value=0.14; Accession=PF00560.23; Description=Leucine Rich Repeat
  Pfam annotation: Domain name=LRR_1; Domain location=202-224; Score =3.7; E_value=58; Accession=PF00560.23; Description=Leucine Rich Repeat
  Pfam annotation: Domain name=LRR_1; Domain location=227-249; Score =10.0; E_value=3.9; Accession=PF00560.23; Description=Leucine Rich Repeat
  Pfam annotation: Domain name=LRR_1; Domain location=251-273; Score =5.1; E_value=31; Accession=PF00560.23; Description=Leucine Rich Repeat
  Pfam annotation: Domain name=LRR_1; Domain location=276-298; Score =10.4; E_value=3.3; Accession=PF00560.23; Description=Leucine Rich Repeat
  Pfam annotation: Domain name=LRR_1; Domain location=300-322; Score =13.9; E_value=0.6; Accession=PF00560.23; Description=Leucine Rich Repeat
  Pfam annotation: Domain name=LRR_1; Domain location=355-377; Score =6.7; E_value=16; Accession=PF00560.23; Description=Leucine Rich Repeat
  Pfam annotation: Domain name=LRR_1; Domain location=380-402; Score =12.7; E_value=1.2; Accession=PF00560.23; Description=Leucine Rich Repeat
  Pfam annotation: Domain name=LRR_1; Domain location=404-426; Score =9.3; E_value=5.1; Accession=PF00560.23; Description=Leucine Rich Repeat
  Pfam annotation: Domain name=LRR_1; Domain location=428-450; Score =16.8; E_value=0.079; Accession=PF00560.23; Description=Leucine Rich Repeat
  Pfam annotation: Domain name=LRR_1; Domain location=452-474; Score =9.2; E_value=5.4; Accession=PF00560.23; Description=Leucine Rich Repeat
  Pfam annotation: Domain name=LRR_1; Domain location=476-499; Score =16.0; E_value=0.13; Accession=PF00560.23; Description=Leucine Rich Repeat
  Pfam annotation: Domain name=LRR_1; Domain location=501-523; Score =5.5; E_value=26; Accession=PF00560.23; Description=Leucine Rich Repeat
  Pfam annotation: Domain name=LRR_1; Domain location=525-547; Score =16.8; E_value=0.078; Accession=PF00560.23; Description=Leucine Rich Repeat
  Pfam annotation: Domain name=LRR_1; Domain location=549-571; Score =9.2; E_value=5.5; Accession=PF00560.23; Description=Leucine Rich Repeat
  Pfam annotation: Domain name=LRR_1; Domain location=573-595; Score =6.9; E_value=14; Accession=PF00560.23; Description=Leucine Rich Repeat
  Pfam annotation: Domain name=LRR_1; Domain location=597-619; Score =12.5; E_value=1.3; Accession=PF00560.23; Description=Leucine Rich Repeat
  Pfam annotation: Domain name=LRR_1; Domain location=621-644; Score =11.6; E_value=1.9; Accession=PF00560.23; Description=Leucine Rich Repeat
  Pfam annotation: Domain name=LRR_1; Domain location=81-103; Score =3.2; E_value=71; Accession=PF00560.23; Description=Leucine Rich Repeat
  Pfam annotation: Domain name=Pkinase; Domain location=754-1062; Score= 103.0; E_value=8.7e-28; Accession=PF00069.15; Description=Protein kinase domain
  Pfam annotation: Domain name=Pkinase_Tyr; Domain location=747-1062; Score=57.8; E_value=5.1e-16; Accession=PF07714.7; Description =Protein tyrosine kinase
  Pfam module annotation: Pfam domain module=LRRNT_2::LRR_1::LRR_1::LRR_ 1::LRR_1::LRR_1::LRR_1::LRR_1::LRR_1::LRR_1::LRR_1::LRR_1::LRR_1: LRR_
  Pfam module annotation: Pfam domain module=Pkinase_Tyr; Domain location=32-77::105-127::129-151::153-175::178-200::202-224::227 -249::251-273::276-298::300-322::355-377::380-402::404-426::428 -450::452-474::476-499::...
  Pfam module annotation: Domain location=501-523::525-547::549 -571::573-595::597-619::621-644::81-103::754-1062::747-1062
MAITPQTMVLLSLLLSLSSLPIALALAEAGAESEDTAALLAFKAAAVGSSSGTSGAVLASWNGSGAGPCTWDGVKCSRIGRVVALRLRSLGLSGTLSPAVGNLSSLRELDLSSNWLRGEIPASLGRLRRLRTLDLSVNTLSGAVPGNLTACTSLRYLNLGSNRLSGHVPAGLGGALARLEVLWLTNNSVTGALPASLANLTSLRQLGLGLNALDGPIPPELGRNMARLEYVDLCHNHLRGEIPAPLYNVSSLASLDVGQNALHGGIPAGIHVQLPRLRYLALFENHFSGAIPPTISNLTQLVELELSENRFSGLVPRDLGRLQDLWKLLLDDNMLEAGDKMEGWEFMESLANCSKLNLFGLGGNDFTGDLPASVAKLSTTLEWLYLENLAISGSIPSEIGNLVGLKVLVLTDTDISGAIPDSIGRMENLVELHLDNNSLSGPVPSSVGNLTKLMKLSASGNSLGGSIPRNLGKLTDLTSLDLSSNHLNGSIPEETFQLQSLSLLLDLSHNSLSGPLPPNVGRLANLNTLRLSGNQLSGQLPAGIRDCVVLEELLLDSNSFQGSIPEALGDIKGLRVLNLTMNGFSGAIPDALGSIRSMQQLYVARNSLSGPIPADLQNLTSLSDLDLSFNDLQGEVPDRGFFRNLPRSSVAGNENLCGGMPRLRLHPCPTSASGKNSRSKRWPPLKHVEMALATVGAVVFLASLLAAATQLVVCRSRKQRRQQTKRQPLGAPAATGERYERVSYKELSEGTKGFSDANLLGRGSYGTVYRCVLSRLTDDGGRTVAASAAAVAVKVFDLERSGSTRSFVAECEALRSARHRCLVRTITCCSSVDRQGQEFKALVFELMPNGNLSRWLHPSPNEADPESTLSLIQRLDIAVDVVDALDYLHNHCRPPIVHCDLKPSNVLLAQDMSARVGDFGLSRILSDSDSACRAKAADPNSSSVIGIRGSVGYVPPEYGEGSGVSTLGDVYSLGILLLEMFTGRSPTDDAFGDSLDLRGFSEAGFPGRILEIADPNLWAHLPDTVTRNRVRECLLAVIRLALSCSKRQPKDRTPVRDAATEMRAIRDEAYLMMLAGSVVVRMEGEVVGGAVAPSLTSQS

SEQ ID NO: 59264 - protein, 80 aa, Zea mays
  Coding DNA Sequence Number=SeqID_17485
MGCAGVKGWWAEIVSLRPRLSSTNYKLGITNPTPLKNNLVLEINLSWCLSFLDEVDNLRSPSSVSNLGVSIYVNLLGLYG

SEQ ID NO: 59265 - protein, 605 aa, Zea mays
  Coding DNA Sequence Number=SeqID_17486
  Gene Ontology: Mol. function=transcription regulator activity; Cellular component=nucleus; Biological process=regulation of transcription
  Homolog annotation: Hit_ID=Q2VWB7; Match level="QueryCoverage=32%, HitCoverage=24%, E-value=7e-31, Identity=40%"; Hit description=Prf interactor 30137
MARFVGATYAQGGHKSAGGSAMGEKIRLIEWSHASVTCREPGNTGPQDRVGVAPIEGKLIQHRLRWFGHAQRRPLEPVHRGVLEQVDNVKKTVLLVPVVPHGVLQLGSLDTVFESAVLVALIKDMFHKICDASVSHASLSTGSAYSNNLSLPTATLSINHPDVNLIYSSAQIVNADHHSLTHPFSTSEIPILEDITIGSYRTIPTGWPNGLLGDNGTIGHEYFEGFSLTDMAHWNQENTHGSTIVVNDGAMLSNTSIHSEFHGDVMVMSREEHELFTWRCRLKQEPTSPALPQLNDNSADLYVQLETNNYAELLLDTIIYQTGHTSNIESAPSAESPISCKTQVKKDHSLRVDESPISDIPGRQDLSPISINEGFISCAMTDGRVEINKTIPEECLVENTHRINSAEIKRRCRKVELQRPRPRDRQLIQDRMKGLRELIPNASKCSIDALLDKTIAYMLFLQSVSEKAEKRRCPMPYFCFAVTLRQIQNTLEDKESHDETKKQLERCPLRVEELNQPGHLLIELHDSRSFRDSLFACFILIQMLCEDYEVFLEMAHVLKGLKVSILKGVLEYRSDKFCARFVIEGSDGFNQMQILCPLMHLLRRR

SEQ ID NO: 59266 - protein, 65 aa, Zea mays
  Coding DNA Sequence Number=SeqID_17487
  Subcellular localization annotation: CTP_CleavageSite=31; ConfidenceScore=5.09e-01
MKLWKETSRSSKTTTSSRRGLAATPSRLPVKAAVIYVSFPHFDLLKRRSGKSYDCSQPCLWLLDR

SEQ ID NO: 59267 - protein, 132 aa, Zea mays
  Coding DNA Sequence Number=SeqID_17488
LKLFAFGNSRKPARYNSPDCPVCTGHVRCSKEARPPELASLGFARQPLRYNSPDCPVCTGLSGVPAEQRLPAAPTAPCGALNARAARAEVRIAHTGAPDIKQGTGLSGVHRTVRCAIAQKPPANGQVWWLGL

SEQ ID NO: 59268 - protein, 633 aa, Zea mays
  Coding DNA Sequence Number=SeqID_17489
  Homolog annotation: Hit_ID=Q6K431; Match level="QueryCoverage=15%, HitCoverage=10%, E-value=2e-09, Identity=34%"; Hit description =Trithorax-like
MRGARLGGAGAGPREREVDRGGGSGRGRARWAASAVGWSGQVGREEQAAEAGERGALGKGLLAQVGAPLSSDSIPLLNLPPIRGSDLLAARRLSRHFFSRSVCETLSASPTVDPADATGARWLVAYSDGEDTLSERESVGAKDGPALPNGSGKEAHASSPSAANKRKHNDLGSNQMELNEPGTPSSSSGDSTWSINGLDDCHQLSLSRNKNDDSEHSVTSAGVTVIRQPRGVLRLRKLAQNVSTESWTGGHNTSQANGVPRSSQHPRRNNKRESIPSQENRVSGDEPVSCLRTENGTCDQDTGTKFCSKTEFLAEKQSHLSGEPPKAVHVDKGVYDYVKDDDGDSLEENAAWMLCSLSDNKCAGSPRKGTDRLSKRSFSQNSNHFKNSYEKIKDICSPARLLRKRDGKVPFLKRRQRRHFYEVSPSDVDPFCIVKERIRVFWPLDETWYFGMVKEYNPVTRLHHVRYDGKDEEWINLQNERIKLLFLPAEAPNKSKCTNSRSAFESKHEQGDREDMHRSGSNTESFESGPISSWLARSNQAKSAALCDINKQDHSHSNTVPVSFDQKQCRASDAKESIDSAPCSSLANGGVERNGNGNTFKESFNINVPKGSCLKIPQNVQVEELFLQWVSSL

SEQ ID NO: 59269 - protein, 481 aa, Zea mays
  Coding DNA Sequence Number=SeqID_17490
  Gene Ontology: Mol. function=oxidoreductase activity, acting on the CH-OH group of donors, NAD or NADP as acceptor; Cellular component =glycerol-3-phosphate dehydrogenase complex; Biological process =glycerol-3-phosphate catabolic process
  Homolog annotation: Hit_ID=Q8H2J9; Match level="QueryCoverage=52%, HitCoverage=98%, E-value=1e-124, Identity=93%"; Hit description =Putative glycerol-3-phosphate dehydrogenase
  Pfam annotation: Domain name=NAD_Gly3P_dh_C; Domain location=328-472; Score=202.9; E_value=7.6e-58; Accession=PF07479.4; Description=NAD -dependent glycerol-3-phosphate deh
  Pfam annotation: Domain name=NAD_Gly3P_dh_N; Domain location=129-311; Score=140.9; E_value=3.5e-39; Accession=PF01210.13; Description=NAD -dependent glycerol-3-phosphate deh
  Pfam annotation: Domain name=PPI_Ypi1; Domain location=18-53; Score= -10.8; E_value=0.051; Accession=PF07491.2; Description=Protein phosphatase inhibitor
  Pfam module annotation: Pfam domain module=NAD_Gly3P_dh_C::NAD_Gly3P _dh_N::PPI_Ypi1; Domain location=328-472::129-311::18-53
MAAAAAVFFPSTPNPRHRLAAAARRPPPSFTGATDAVPLPEDEDSSDDDADDDGAPRRSGRRDRRRAVRVAWEKLVRWSRSWRRRNRSDVLETTRKVDSLAPSMCGLGRVASSFAGSDREGLHGESLLFQVVVLGGGSFGTAMAAHVAAKKADLEVAMLLRDDHICRSINNAHVNWLVTSAAFVFSIHELLAFYCSKYLSEHRLPENIVATTSAADALAGADFCFHAVPVQFSSSFLESISTHVDPKLPFISLSKGLELNTLRTMSTIIPRALGNRRQPFVVLSGPSFAVELMNKLPTAMVVASKDNKLASSVQQLLASPNLRISTSSDVTGVEIAGALKNVLAIAAGIVEGMSLGNNCMAALVAQGCSEIRWLATKMGAKPTTLSGLSGSGDIMLTCFVNLSRNRTVGLRLGSGEKLDRIMGSMNQVAEGVSTAGAVIALAQKYKVKMPVLTAVARIIDNELTPTKAVLELMNLPQVEEV

SEQ ID NO: 59270 - protein, 551 aa, Zea mays
  Coding DNA Sequence Number=SeqID_17491
  Gene Ontology: Mol. function=nucleic acid binding; Cellular component= intracellular; Biological process=DNA integration
  Homolog annotation: Hit_ID=Q8H6I0; Match level="QueryCoverage=98%, HitCoverage=31%, E-value=0.0, Identity=69%"; Hit description =Putative gag-pol polyprotein
  Pfam annotation: Domain name=zf-CCHC; Domain location=235-252; Score =30.3; E_value=6.6e-06; Accession=PF00098.13; Description=Zinc knuckle
MRQQTPSAGDEDYDEDEVAQIEHFNSQATTILLTSLSREEYNKVQGLKSAKEIWDALKTAHEGDEVTKFTKWETIEGELGRFMLNQGEDPQAMYNRLKTLVNQVRNLGSSKWDDHEMVKVILRSLVFLNPTQVQLICGDPRYKLMSPEEVIGKFVSFELMIKGSKKIIEQGASSTPDVQPVAFKATEEKKEDSTPSRVPIDASKLDNEEMALIIKSFRQILKQRRGKDYKPRSKKVCYKCGKPGHFIAKCPLSSDSDRGDDKKGKRREKKRYYKKKGGDAHVCREWDSNESSTDSSSDEDAANIAVTKGVLFPNIGHKCLMAKDGKKKKVKSRSSTKYATSSDEASSSDDEDDLLTLFANLNMQQKEKLNELISAIHEKGELLDTQEDFLIKENKKHVKVKNAYALEVENCEKLSSELSTCHDVISNLRNENAKLISKVEKSNVCNDSIDNLRNDNASSITKIEKLNASLASLRNENEKLIAKAKELDVCNISISNLRDENDILHAKIVELNSCKPSTSTVEHVTICTRCRDVNIDAIHDPIALLNNKMII

SEQ ID NO: 59271 - protein, 609 aa, Zea mays
  Coding DNA Sequence Number=SeqID_17492
  Gene Ontology: Mol. function=nucleic acid binding; Cellular component= intracellular; Biological process=DNA integration
  Homolog annotation: Hit_ID=Q7XBE2; Match level="QueryCoverage=91%, HitCoverage=63%, E-value=0.0, Identity=66%"; Hit description =Putative copia-type polyprotein
  Pfam annotation: Domain name=zf-CCHC; Domain location=26-43; Score =30.3; E_value=6.6e-06; Accession=PF00098.13; Description=Zinc knuckle
MALIIKSFRQILKQRRGKDYKPRSKKVCYKCGKPGHFIAKCPLSSDSDRGDDKKGKGREKKRYYKKKGGDAHVCREWDSDESSTDSSSDEDAANIAITKGLLFPNVGHKCLMAKDDKKKKVKSKSSTKYATSSDEASSSDDEDNLLTLFANLSMQQKEKLNELISAIHEKDELLDTQEDFQIKKTKNMLRNENAKLIAKVEKSNVYDDSIDNLRNDNASSIAKIEKLNASLASLRNENEKLIAKAKELDVCNVSISNLRDENDILHAKIVELNSCKPSTSIVEHVTICTRCRYVNIDAIHDHIAMIKQQNDHIAKLDAKIAEHELENEKFKFARSMLYSGRRPGIKDGIGFQQGGNVKLNAPPERLSNFVKGKALMPQDNEGYILYPASYPEHKIRRIHSRKSHSGSNHAFMYKSEASSSRQSTRAKLPKKKTLTASNEHNISFKTFDASYVLTNKSGKIVAKYVGGKHGGSKTCVWVPKVLVSNVKGPKTVWVYASGGSSWIIDSGCTNHMTGEKKMFSSYEKNQDPQRAITFGDGNQGLVKDSLDYNLLSLEEVGVHHPHKNIMTTDRPLELLHMDLFGPIAYISIGERKNLKPQDTLKGFLRRAQK

SEQ ID NO: 59272 - protein, 106 aa, Zea mays
  Coding DNA Sequence Number=SeqID_17493
MVATDVKADLDVDCVSAGILGALFEGSKQTLPPGLAGPTVRSRTGQSVSDLGSAVEAGAGNDSDVGCGAGSVGAGAVTDTVTAAVTSATEYLSIGPALLPDEPTAE

SEQ ID NO: 59273 - protein, 244 aa, Zea mays
  Coding DNA Sequence Number=SeqID_17494
MKGRVNQKSRHPSIDLFPRAKAQGMPSQTTLKVPVEDQIEPIKNLEHKLSPCPTLSSASGAISVSPDAGFGLGYLLHLESCGRPLHRLWHMSRDGSSNASKRLPLRPSRALISINAVRNHDVTPHRDADAPRKQAFTHTMVLVQQLRYGQPLPRELGRMANPSASTSALSRKSTGTSQQCSAPPRRLTGRQDISPWNTMTPGFTAYISYMHSGASNISLTPSIGSRALHCSNQDKTPCVNSHTI

SEQ ID NO: 59274 - protein, 81 aa, Zea mays
  Coding DNA Sequence Number=SeqID_17495
MAQTSITFLKTRLGGKDRPLGTALWTFSFHHEILLWLLHTFEATFRMQLYNSSWPMAVRFTGLQMHWCLVFATIICSDMIV

SEQ ID NO: 59275 - protein, 82 aa, Zea mays
  Coding DNA Sequence Number=SeqID_17496
MVSHSGYGGYKCGHYTTAVELGTHLVSHPILEGKPNANHVRARIRTHVHCAYIVGHHHTMLEINSGKVLTERYSGKSLSPLK

SEQ ID NO: 59276 - protein, 130 aa, Zea mays
  Coding DNA Sequence Number=SeqID_17497
MPLPINARPRTGVAVAIHRLRPNHDLCCVAAPAPTSAWKREVDKFPAVLRIYRDTLITVMKASIKATVAELLPVLTARPIDSDSVTGGRATDADAGGQSLANKLRSLSSEGFVQLLSAIFRIVQRRRTAR

SEQ ID NO: 59277 - protein, 117 aa, Zea mays
  Coding DNA Sequence Number=SeqID_17498
MEQADGGGAWLEEEAARCTGWRRRRRGAPAGGEAARRVEGRRRDEWRRGGAALQERPHDYIRALQSANPKTLYARKAAKAPTLKRFCGVRGGNWTPWRRLGAFGDAILISGMARATP

SEQ ID NO: 59278 - protein, 88 aa, Zea mays
  Coding DNA Sequence Number=SeqID_17499
MEQDFECAGKWGTGHCPVRQPGTLRTSHSREIPGALRYNSPDCLCKCRSQRAPDCSMQQDDKALQRSIAPNPNGCADVARTRQCTVTV

SEQ ID NO: 59279 - protein, 179 aa, Zea mays
  Coding DNA Sequence Number=SeqID_17500
  Gene Ontology: Mol. function=protein dimerization activity; Cellular component=nucleus; Biological process=regulation of transcription, DNA-dependent
  Homolog annotation: Hit_ID=Q6H434; Match level="QueryCoverage=96%, HitCoverage=38%, E-value=8e-28, Identity=46%"; Hit description =Putative bZIP transcription factor
  Pfam annotation: Domain name=bZIP_1; Domain location=123-176; Score =27.0; E_value=6.7e-05; Accession=PF00170.11; Description=bZIP transcription factor
  Pfam annotation: Domain name=bZIP_2; Domain location=123-173; Score =25.3; E_value=0.00021; Accession=PF07716.5; Description=Basic region leucine zipper
  Pfam module annotation: Pfam domain module=bZIP_1::bZIP_2; Domain location=123-176::123-173
MAEFDQALFLYLNSSQDQASVIQDQPQTLNIFPSEPMHVVEPAAPKESMGATTNNTAWNNAGAGPSKQPPSNLPSRTTATPAGPRKDGSKPPAAVKREGSSSGGAMGSGTPSTSNQQEGPTRTSDAKTLRRLAQNREAARKSRLRKKAYIQNLETSRVRLAHLEQEVHRSRTQNQHCFF

SEQ ID NO: 59280 - protein, 251 aa, Zea mays
  Coding DNA Sequence Number=SeqID_17501
  Gene Ontology: Mol. function=protein dimerization activity; Cellular component=nucleus; Biological process=regulation of transcription, DNA-dependent
  Homolog annotation: Hit_ID=Q52MZ2; Match level="QueryCoverage=63%, HitCoverage=31%, E-value=4e-47, Identity=59%"; Hit description=TGA10 transcription factor
MEHARWQEEHGKVMRHLRAALEAEYAATATTPAAAAADAQLRQLVDAAAAHHGALAELKAVAASADAFHLVSGAWVSAAERCFLWIGGFRPSELIKIAARHAEPLTEQQAMSVCGVQQWARDAEAALDHELQAMHSSVSEAISSDAAALLYPYSDVPGFMATMSLAISKLASLEAFVRQADALRLQTLHRLPQILTARQSARCFLAIADYSHRLRALSELWHTRQGHERAASTQAARPSQTPPYQSRDGLL

SEQ ID NO: 59281 - protein, 127 aa, Zea mays
  Coding DNA Sequence Number=SeqID_17502
MVKHRKLKNKKDENRGEHVGYVLRLGQGTELGSNPCALIGGANLLWLWPPVTCAVLTNIGAEMEANSSTLSTTLAATHPERGQFFYQRLMTENRPNSPAMTPVDPNSSMLLVTDVPPQGSNAQGETN

SEQ ID NO: 59282 - protein, 129 aa, Zea mays
  Coding DNA Sequence Number=SeqID_17503
  Subcellular localization annotation: CTP_CleavageSite=39; ConfidenceScore=5.01e-01
MAPDSCGARVARQLKIRRGDKLGQRAFIARRWGRRTGTRSNHRAPASSGRPVGPALVPQIADIGAEVELGSGCADHAKLVTVRLGKNPTGGPSMPVEGGIGARGGVRFTEDRTVGPKGSVRGSAGDGWA

SEQ ID NO: 59283 - protein, 261 aa, Zea mays
  Coding DNA Sequence Number=SeqID_17504
  Gene Ontology: Mol. function=hydrolase activity, acting on ester bonds; Cellular component=cell surface; Biological process=D-amino acid catabolic process
  Homolog annotation: Hit_ID=A0AFE5; Match level="QueryCoverage=60%, HitCoverage=32%, E-value=4e-17, Identity=34%"; Hit description=, complete genome
ELASLGKSRRLLRYNSPDMSARAGVRVAHTGAPDSEQCMSRCATGTSRRAQKSELQRSDSNGTDDVVGAPDMSDALIVTIIVGAPRNGPSKFARQRMTKSPAEQVCETERTTKSPVEQVYEAERMTKSHAEQVYKVEQMTTKSPAEQVYGAERTTKSHAEQVYEVDQMTKSSTEQVCETERTTKSPTEQVYGAERTTKSHVEQVYEAERMTKSPAEQVCETERTTKSPAEQVYETECTTKFPAEQVYKADRTTKLCQTQSY

SEQ ID NO: 59284 - protein, 228 aa, Zea mays
  Coding DNA Sequence Number=SeqID_17505
  Homolog annotation: Hit_ID=Q5GAQ4; Match level="QueryCoverage=90%, HitCoverage=50%, E-value=1e-80, Identity=77%"; Hit description=F-box protein
  Pfam annotation: Domain name=F-box; Domain location=19-66; Score =42.4; E_value=1.6e-09; Accession=PF00646.23; Description=F-box domain
MAATLDGAAGCRKRKRAAPGLADLHDDMLERVLARLPPASYFRLRGVSRRWRAAAESRSFRAACARVTARDPWFLMLEDSDHQDQDQDERRPRPAAVFDSAERALARWRGAPVPLQPVAAASGLVLYRDPSTGGLTVVNPLTGASRALPPPARVAGALQAVAMYGSPYRVVLILGELPELSTVAYDSSTNAWSEQAALSRKTRGGGRPVPGSASRRSATATATTRSTS

SEQ ID NO: 59285 - protein, 272 aa, Zea mays
  Coding DNA Sequence Number=SeqID_17506
  Subcellular localization annotation: CTP_CleavageSite=61; ConfidenceScore=5.01e-01
MAWHRHRRRRRRRHSVADKSNQCLLLLPANSRQADRPGRLCATQVLAGTPTLLSTRPAWVRRSAPAAAPPAPAPSILPPSDRPGVARRVSCRRPCSAALCCEGDTHYRKMIYFRRPLLFPTVPRVPSKIALFPTAQGQPSEIALFPMAHKPPVGNKRISDGWPPRPSEISIFLTAVTPRGPLAAHTANAHTARTHVLHSTPPPPGPDTAAAGHLRRPSSPATCAGPSPAIFPGHLRRTPLCPDAPTPEAPPPRRPKRRHPDTHCRRAFAPNH

SEQ ID NO: 59286 - protein, 169 aa, Zea mays
  Coding DNA Sequence Number=SeqID_17507
  Gene Ontology: Mol. function=glycerophosphodiester phosphodiesterase activity; Cellular component=membrane; Biological process=glycerol metabolic process
  Homolog annotation: Hit_ID=Q6ZFH9; Match level="QueryCoverage=62%, HitCoverage=13%, E-value=3e-34, Identity=61%"; Hit description =Putative glycerophosphoryl diester phosphodiesterase 2
MRSNRRRLGGRGGGWGGQGGGVSVAASFAALLGCVVALVGGAAGQGPRPPSDYKTLSGAAPLVVAKGGFSGVFPDSSQGAYSFAMITSAPDTAMWCDVQLTKDGVGVCLRDINMKNCTSVDQAYPERKRTYVIDGVRKTGWFVSDFTIAELQSVSREYNNTTASLPLKR

SEQ ID NO: 59287 - protein, 96 aa, Zea mays
  Coding DNA Sequence Number=SeqID_17508
MGGEGAHAAGGAGGGGEAGGRVGRHGDLEPTTEHLVAVKKVLRYIVGTIGYDYLLVLAFLSKCIQRESGESVCKVRRGMTISLLIWPLKGTVRGYL

SEQ ID NO: 59288 - protein, 433 aa, Zea mays
  Coding DNA Sequence Number=SeqID_17509
  Gene Ontology: Mol. function=glycerophosphodiester phosphodiesterase activity; Cellular component=membrane; Biological process=glycerol metabolic process
  Homolog annotation: Hit_ID=Q6ZFH9; Match level="QueryCoverage=96%, HitCoverage=54%, E-value=1e-147, Identity=62%"; Hit description =Putative glycerophosphoryl diester phosphodiesterase 2
  Pfam annotation: Domain name=GDPD; Domain location=36-329; Score =53.9; E_value=5.5e-13; Accession=PF03009.8; Description =Glycerophosphoryl diester phosphodiesterase family
MVLGLNKLTCEGIHNCCFTKLNSNKTDHGEPLVISHNGASGDYPDCTDLAYHSAIDDGADIIDCPIQVTNDGVLMCMSSTNLLDTTNVQRTTYNSLVSVVPDIQPQPGIFTFNLTWSDINSNVLKPKISSPVSGYFLVRNPRYTNQGKFLKLSDFLAIAMDKDLSGVMIIIENAAFLVNSLGIDIVDSLTTALSAAGFDNHPTKEVLIKSKDSDVLVKLKQQKTKCKLVYTLPSGIGDASNSSLKDIKKFAEYVAVDSKSVFTLSSDFIIRQNSLVQDLQSAGLALYAEVFQNEFVAQPLDFFGDETVEINYYIQSFNLSGIITDFPKTVRRYKRNTCTVLGKDMPSYMQPPQAGSLAQFLQTFKTQPPSLPPMSTLNSSSVEEPPLPTVALRSVSDGSASGATKTPGTPSDAPTATVNAGMLLVMVFTALLI

SEQ ID NO: 59289 - protein, 613 aa, Zea mays
  Coding DNA Sequence Number=SeqID_17510
  Gene Ontology: Mol. function=protein kinase activity; Cellular component=integral to membrane; Biological process=protein amino acid phosphorylation
  Homolog annotation: Hit_ID=Q5GAP9; Match level="QueryCoverage=95%, HitCoverage=96%, E-value=0.0, Identity=78%"; Hit description=Leucine- rich repeat transmembrane protein kinase 1-like protein
  Pfam annotation: Domain name=LRRNT_2; Domain location=26-67; Score =41.3; E_value=3.2e-09; Accession=PF08263.3; Description=Leucine rich repeat N-terminal domain
  Pfam annotation: Domain name=LRR_1; Domain location=117-139; Score =10.9; E_value=2.6; Accession=PF00560.23; Description=Leucine Rich Repeat
  Pfam annotation: Domain name=LRR_1; Domain location=141-163; Score =16.8; E_value=0.081; Accession=PF00560.23; Description=Leucine Rich Repeat
  Pfam annotation: Domain name=LRR_1; Domain location=165-186; Score =13.4; E_value=0.82; Accession=PF00560.23; Description=Leucine Rich Repeat
  Pfam annotation: Domain name=LRR_1; Domain location=187-209; Score =6.0; E_value=21; Accession=PF00560.23; Description=Leucine Rich Repeat
  Pfam annotation: Domain name=LRR_1; Domain location=70-92; Score=0.1; E_value=2.7e+02; Accession=PF00560.23; Description=Leucine Rich Repeat
  Pfam annotation: Domain name=LRR_1; Domain location=94-114; Score =7.0; E_value=14; Accession=PF00560.23; Description=Leucine Rich Repeat
  Pfam annotation: Domain name=Pkinase; Domain location=313-584; Score =90.2; E_value=6.3e-24; Accession=PF00069.15; Description=Protein kinase domain
  Pfam annotation: Domain name=Pkinase_Tyr; Domain location=313-584; Score=60.2; E_value=3.7e-16; Accession=PF07714.7; Description =Protein tyrosine kinase
  Pfam module annotation: Pfam domain module=LRRNT_2::LRR_1::LRR_1::LRR_ 1::LRR_1::LRR_1::LRR_1::Pkinase::Pkinase_Tyr; Domain location=26 -67::117-139::141-163::165-186::187-209::70-92::94-114::313-584::
  Subcellular localization annotation: CTP_CleavageSite=67; ConfidenceScore=5.25e-01
MAGGVAVGVVALFLAAASFGANANTDSNDVNALNVFYTTMNSPPQLTNWVSQNGDPCGQSWLGVTCSGSRVTAIKLSGMRLNGTLGYNMNQLTALVQLDMSNNNLGGSDIPYNLPPNLQSLNLAVNNFTGTVPYSISQMVALRDLDLSYNTFSGDIPHSFNSLTSLKTLYLQNNKFNGTIDVLTDLPLTDLNVENNQLTGWIPDKLKGINNLQKSWRLSQGQDPEQNEPLSPFASGLKQMKSIKSIKIVSTMGKEELQKTVSMSLKPPTKIDLHKSFDENDTTNKAISRNVSLSSITIPAYTVADLQMATGSFSPDSFIGEGSVGRVYKAKFGDQKVMAVKKINFSVFPSHPSDLFIELVANISMLNHPNLAELAGYCSEHGQCLLAYEFYRNGSLHDFLHLKDEHSKPLSWNNRVKIALGSARALEYLHETCSPSVVHKNFKSSNILLDGELTPHLSDSGFAGLLANQEFQESDENSGYRAPEVILAGQYSLKSDVYSFGVVMLELLTGRKPFDRTRPRPEQSLVRWATPQLHDIDALDQMVDPALQGLYPSKSLSRFADAIALCVQPEPEFRPPMSEVVQSLVRLVQRANMTRMHESQSRRHGESGGDYEF

SEQ ID NO: 59290 - protein, 312 aa, Zea mays
  Coding DNA Sequence Number=SeqID_17511
  Gene Ontology: Mol. function=transferase activity; Cellular component= nucleus; Biological process=protein kinase C activation
  Homolog annotation: Hit_ID=Q9LWW0; Match level="QueryCoverage=88%, HitCoverage=54%, E-value=1e-114, Identity=73%"; Hit description =Pentatricopeptide (PPR) repeat-containing protein-like
  Pfam annotation: Domain name=PPR; Domain location=195-229; Score =33.8; E_value=5.8e-07; Accession=PF01535.11; Description=PPR repeat
  Pfam annotation: Domain name=PPR; Domain location=230-264; Score=3.7; E_value=2.7; Accession=PF01535.11; Description=PPR repeat
  Pfam annotation: Domain name=PPR; Domain location=266-300; Score=6.0; E_value=1.5; Accession=PF01535.11; Description=PPR repeat
  Pfam annotation: Domain name=PPR; Domain location=30-64; Score=1.4; E_ value=5.1; Accession=PF01535.11; Description=PPR repeat
  Pfam annotation: Domain name=PPR; Domain location=92-126; Score=28.2; E_value=2.9e-05; Accession=PF01535.11; Description=PPR repeat
  Pfam module annotation: Pfam domain module=PPR::PPR::PPR::PPR::PPR; Domain location=195-229::230-264::266-300::30-64::92-126
MVFISRRKEIDQGHSFQKRKKFELITRLSPPSSTLVSSYARAGLLAESRRVFDELPAGAAAARNAMLSSYARGGRVGDAERLFAGMPDQSVVSWTAMVSGYAQNGRHEEAVRTFLDMWDGAGVRPNELTVSSVLPACAALGALALGRKVERYARGRGMLRNVYVANALVEMYAKCGSIHRAWKVFRGMGTQRDLCSWNSMIMAFVVHGLWTEALTLFHKLRMTGAKPDGITFVGVILACTHGGLVDEGKLLFNSMRGEFGLKPRIEHYGCMVDLLGRVGLLKEANSLIASMPMEPDAVIWGALLGACTSMAT

SEQ ID NO: 59291 - protein, 279 aa, Zea mays
  Coding DNA Sequence Number=SeqID_17512
MSKMDALPKVVEVSSLEVGANINDLQTKVMKDIPSSFYRINMNINKKIILVHGSADPSAHPPPPLLPAINSTPSRHQRRSCDPGPQQRGHHQRTLNLPSSIHQLCSPPSTLLDLCSGQTHPPWSSPPHPHPLPSFSHPCHAPTNLHGPLPSPSSLAYPFVVSVAIGAERLTRPKEDVDTTAPCLDLCFGQGPHHVPHDPKDDTDAHIFVSRRHRAMPQSLFTPPRVCLLLPTEFPMRTIAWATVLGHIVFGIVDFPSLGAVRCGRRSHRLRSCTPPPPP

SEQ ID NO: 59292 - protein, 91 aa, Zea mays
  Coding DNA Sequence Number=SeqID_17513
MVKACTCRGADLAMAVGCLLGVELRITTHLLGTSAGGDWIGWVVDCSPNLGFILTGRCGASLGHAKQVWGFCGLDLRPGRQEFLAGVAALP

SEQ ID NO: 59293 - protein, 160 aa, Zea mays
  Coding DNA Sequence Number=SeqID_17514
  Gene Ontology: Mol. function=hydrolase activity, acting on ester bonds; Biological process=lipid metabolic process
  Homolog annotation: Hit_ID=Q84M86; Match level="QueryCoverage=84%, HitCoverage=36%, E-value=2e-49, Identity=68%"; Hit description =Putative lipase/acylhydrolase
MAVRRGIPALELPINCSGIGFVGMPPVGCVPSQRTLGGGLATRACEPKRNEAALLYNARAQELIAAFNNNNSDVLVVFLDIYRILDDLMERGEEYGFSETTRGCCGTGTIEVTGLCDSRFVSVCDDVSQHVFFDSYHPTERAYRIIVNDIFLNYGHVLFS

SEQ ID NO: 59294 - protein, 91 aa, Zea mays
  Coding DNA Sequence Number=SeqID_17515
MFKDCTCRGADLAMAVGCLLGVELRIMTHLLGTSAGGNWIGWVVDCSPNLGFILTGRCGASLGNAKQVWGFCGLDLRPGRQEFLAGVAAPP

SEQ ID NO: 59295 - protein, 115 aa, Zea mays
  Coding DNA Sequence Number=SeqID_17516
  Gene Ontology: Mol. function=oxidoreductase activity, acting on the CH-OH group of donors, NAD or NADP as acceptor; Cellular component =chloroplast; Biological process=malate metabolic process
  Homolog annotation: Hit_ID=Q9ZRH5; Match level="QueryCoverage=76%, HitCoverage=46%, E-value=7e-17, Identity=79%"; Hit description=NADP -malic enzyme
GYTLLRDPHHNKGLAFMEKERDAHHLRGLLPPAVVPQELQGTASVVLAGLLAALKVVGRTLAEHTYLFLGAGEAGTGIAELIALEISKQEKRRCYEERVNLKMKVRELLAYIDVR

SEQ ID NO: 59296 - protein, 320 aa, Zea mays
  Coding DNA Sequence Number=SeqID_17517
  Homolog annotation: Hit_ID=Q2L3U2; Match level="QueryCoverage=62%, HitCoverage=55%, E-value=4e-18, Identity=32%"; Hit description =FIMBRIATA-like protein
  Pfam annotation: Domain name=F-box; Domain location=11-58; Score =37.8; E_value=3.7e-08; Accession=PF00646.23; Description=F-box domain
MEHKKARAVEDPARLICDDALTEVFRRLPARALAACRLVCKSWMSVLTDPHFIHEHLSRGQQKLLLFATDRGNDRSLAMVLADNNASMYQLSRPAASRSVFVHNSCNGLLCLGDSTGAVEVLNPTTGESLMLPMPMYTAGSSQFSSCNWHCLGFCPQKREHKVVHFYPGAHNDPFKVHCEIYTIGVGVWRQVGSCHGAPTDRGVHVNGMVYYLTKFRYIASSRINCLNLESEKFDVMMLPPHKSYGGHCSLAELEGKLCLLIVDGALEVLKENTFLVWVIFGDKLAKKLEKDISEPQTPQEVESLLTLFAQISGTFLFLL

SEQ ID NO: 59297 - protein, 162 aa, Zea mays
  Coding DNA Sequence Number=SeqID_17518
MTISVSASQDNNSFDLEFVVPGDESAGPTPKRIAWSARGSQRCGHGCVGSGGQGWSVATDVAVPLGHQVLRLASQADESQDLSSGRGRGYASAEVGSGGEPVPCKFACGGSDLRSRRFTVVEYSRARTCRSVLFRGDGIVWLIEIMTTWTCCERLFAPSFNI

SEQ ID NO: 59298 - protein, 235 aa, Zea mays
  Coding DNA Sequence Number=SeqID_17519
MAATFTPAIAKEKDALTRTHNSTEARKDSDGIPRKVVSTAEFGPAEEDRPVQGVPLAAGVAELKRGESRVVDLVRGSREAVRQHGRECRTAWWVHQVGVELWNGTWDARLTRGPRIAEGWKKEEVLDTPLPKEHDEDAIAAVKNAYRKAIVERKLVEGIEVGSHVIKMLWKFHHELPYAWGEKGLNELCGMLKTSEGDINKNAGSSGHGTTVKSKPNFKKGKSQEKGKAKDMIFK

SEQ ID NO: 59299 - protein, 72 aa, Zea mays
  Coding DNA Sequence Number=SeqID_17520
MKDVLTKEDDLARAKRKNIDWGEPLVRSMNRKHRDEALDETNAAVPSDIADNARIGGFGFGIKLFSRDWMET

SEQ ID NO: 59300 - protein, 48 aa, Zea mays
  Coding DNA Sequence Number=SeqID_17521
MNVCELTLVVLTPQVKNRRVGLEVDLWEMAGAKKMSLLTAPIPSLPAS

SEQ ID NO: 59301 - protein, 52 aa, Zea mays
  Coding DNA Sequence Number=SeqID_17522
MEMRLSDNSPETSGMRSTQKAEPTSTYPPSSAGLDLHLQHGGINHEYSNVLS

SEQ ID NO: 59302 - protein, 174 aa, Zea mays
  Coding DNA Sequence Number=SeqID_17523
  Subcellular localization annotation: CTP_CleavageSite=76; ConfidenceScore=5.09e-01
MTKVSACRGWSKRVHRRWAPMLRTCSQMLRIKNKATQTTNGYSPSSFEALFPLGFNDLRTKRCMGVVIPWQMGNITCGYRVQPLQSVQLRSKFNGPVELNIKNVGTVELNIKNVSTVELNIKNLTLRTVVFKFDGAVEFFSHKFNGTHVLMVKFDGATWSLNLCVLLGSARSAQ

SEQ ID NO: 59303 - protein, 163 aa, Zea mays
  Coding DNA Sequence Number=SeqID_17524
MEFDSTALTNNLIQLEGHEGEMLEHSKQKEQGALMPELLERQAQGAGESIGVAEMGLLLLLSIHGQRRERVWRNALSREAQPEELSSRELSKGSASRTLGHGRREGGASAREGRGAGARPTSWSTSEQQPRAGRGGQGARPGTGAGRAQERWREERGVAGEDD

SEQ ID NO: 59304 - protein, 117 aa, Zea mays
  Coding DNA Sequence Number=SeqID_17525
METPPGAMTSAPAVVIPDDNHEQSPRLSPNSHLGEAVKQLEFQLPCGGTREDRALERIQAGKEKGPRTRERSAEKRRRTRLDRGAPAPGEKSVGRGAPAPIGSKKRGSEMDCRNNAY

SEQ ID NO: 59305 - protein, 63 aa, Zea mays
  Coding DNA Sequence Number=SeqID_17526
METEDWRPYLHAGCWRRRAGDGGGAERDDAAAPEMEEAPEMEEASTHVVGIGKKEAGLGHWAK

SEQ ID NO: 59306 - protein, 121 aa, Zea mays
  Coding DNA Sequence Number=SeqID_17527
MDRALRTYRNREKRWWGKWRGALASCWSWSREKKSQGEALEILGAIVGAEGPVPMEQGGSSSAPWTTEGWMGVVSAAKPKGGAPMGKEDRERRPWRGCWRPWSSCALGKKARRKRVAARKI

SEQ ID NO: 59307 - protein, 241 aa, Zea mays
  Coding DNA Sequence Number=SeqID_17528
  Gene Ontology: Mol. function=DNA binding; Cellular component=beta -galactosidase complex; Biological process=DNA integration
  Homolog annotation: Hit_ID=O24587; Match level="QueryCoverage=76%, HitCoverage=17%, E-value=2e-88, Identity=82%"; Hit description=Pol
MVPLAGPDCLSVSLYQAALQSEWRRRRCPFVRPLYADGGYQLRIRSLEGTPNYGPRQLLYLCASRPDIMLSVCMCARFQSDPKECHLVAVKRILRYLVSMPCFRIWYPKGSTFDLIGYSDSDYAGCKVDRKSTSGTCQFLGRSLVSSSSKKQTSVALSIAEAKYIVVGQCCAQLLWMRQTLRDFGYNLSKVPLLCDNESAIRLADNPVEHSHTKHIDIRHHFLRDHQQKGDIDVYHISTEN

SEQ ID NO: 59308 - protein, 206 aa, Zea mays
  Coding DNA Sequence Number=SeqID_17529
MVRSIGLQQGRWWLGHGKSREGEAGRRPWVRSGKVGACPGAQGEERHGSSSAHIQEQREETVGENGEGRWILAGHGAGGRRARGEALEILGAMVGAEWLAPMEQGGTSSVPWIEEGWMGTVSATKPEGGAPMGKEDRECRPWRGCWRPWSSCALGKKIVEVLETQEIQGQQQNPLIHLDMPFKDKVDKNDVMMPRERASERLEMRD

SEQ ID NO: 59309 - protein, 142 aa, Zea mays
  Coding DNA Sequence Number=SeqID_17530
MAGRKAKVTGDSLTGDGGADEAAHASGMIHGGAPVAVNNSRCSGHQSSLERPRSATRRLPEAPQPFHMPGMASQAKLHGAKRTRGITLSPGRRQSWRKPQQQPNVFAGLLRASIGTATRFGWEKVLACQARLSGSVGSRRGW

SEQ ID NO: 59310 - protein, 115 aa, Zea mays
  Coding DNA Sequence Number=SeqID_17531
  Subcellular localization annotation: CTP_CleavageSite=74; ConfidenceScore=5.02e-01
SVTVSFLVLFTWAPPVIARARSPGEEDGGATAPAVTASTTVAICVVVAKAPPTPCGEVVTPTITVAATASVATRAVAVGSTLAPCGDVATLTIVDGHIDAWWWSGPVASTLLLCP

SEQ ID NO: 59311 - protein, 81 aa, Zea mays
  Coding DNA Sequence Number=SeqID_17532
MGKKTVDTREARWSRHGHESLWWHPGVSYVGLPQTPERAWPIRCYAQSCPEPLSKASWQSKRRPNDEDPRENAYLTWAEGG

SEQ ID NO: 59312 - protein, 359 aa, Zea mays
  Coding DNA Sequence Number=SeqID_17533
  Homolog annotation: Hit_ID=Q8SA97; Match level="QueryCoverage=40%, HitCoverage=19%, E-value=1e-22, Identity=66%"; Hit description =Ornithine carbamoyltransferase
  Subcellular localization annotation: CTP_CleavageSite=73; ConfidenceScore=5.26e-01
MQAACNRAKWAHLSDFQRVRHGGPGPRVMRPAGRSSGHVVSQAYIPSGGSERALSHGVKTTRPCSVPRTARARATTAPRTARLVTLTPRRDRRRLWQEKQATLRLRHNDRVKKGTRKGGYPEKDPSLRRNQAPSLPTDQRFEGWPLEGFNSRLRARGLYTHYWSEVRRPAPRKGSTTASGYSVSVPTTDQGFEGWPPKVRPDLRHHRKAPLPPDPRARTRVKTRKTANSAPPDPRARTRAKTRKTANSALPDPRARTRAKTRKTANSAPPDPRARTRAKTRKTTNSAPPDPRARTQAWPRKTTNSASPDPRARTPPWPLRLCRTISASPDPGARARPRQQKTDSTSASEEPPRRPTSDA

SEQ ID NO: 59313 - protein, 94 aa, Zea mays
  Coding DNA Sequence Number=SeqID_17534
MGERAQDFSRNAFSFSQAQRTITELYPPDRHSNDDEKVGETADSSCQLAATKARCVCSGSSGVGTDETTEDDMTSDTVARPALVPRYRHIALAA

SEQ ID NO: 59314 - protein, 197 aa, Zea mays
  Coding DNA Sequence Number=SeqID_17535
  Homolog annotation: Hit_ID=Q852E9; Match level="QueryCoverage=37%, HitCoverage=29%, E-value=4e-10, Identity=43%"; Hit description =Expressed protein
MNIDYPGILPQLHRPRPTGASGASITCTNTRRVIYYSIITQVSTLVVTLNHGCCRCFTRIRKTVCKLQETEDIRAISFDEVSGTVTISGAFDPLVLPCKLRRKAGCVIRDIQLVAAELKLTPQRPAMPSKPPGPAPAPPCCCGMCICGCGGYGYGYGCRCQFVDHPPCYEGLPLRQYPKIEVTCDCEEASSAACKIV

SEQ ID NO: 59315 - protein, 89 aa, Zea mays
  Coding DNA Sequence Number=SeqID_17536
  Homolog annotation: Hit_ID=Q8LN57; Match level="QueryCoverage=77%, HitCoverage=8%, E-value=3e-14, Identity=60%"; Hit description =Putative oxysterol binding protein
MTQQSQVPKLLQKKDFFTVSLWAIHASSYFTCKQEKLPPTDSRLRPDQRCLEKGEYERANAEKLRLEQKQRQDPLEVFVGHVKTISIDV

SEQ ID NO: 59316 - protein, 125 aa, Zea mays
  Coding DNA Sequence Number=SeqID_17537
MDGMLTAKAKERCSILPEVILIVVSGQPTQPSLLVAVDLNSFIVGDGHRPTSDSDSRFLNGVEKVHTLANKKTKYWVQTKEQGTTEDTSGLAHRTVRCATGHVRCTRGLRLRTRHLREFPEATPL

SEQ ID NO: 59317 - protein, 172 aa, Zea mays
  Coding DNA Sequence Number=SeqID_17538
  Subcellular localization annotation: CTP_CleavageSite=45; ConfidenceScore=5.09e-01
MAWPYGFASVGTQQQHATRTARKGRAAPRRELAATDCEVDVDSPSATASAPRVPSALQARVTAQRKNLSHESAAGKAARECVTGAGPKAPPRPLEGVGLRRRHSPQPTNKSGSPLVVVVVVQQRNATQPSSHLALAIDALMIRARIVSYYGLRLRDVVHGRSEATDMESSSK

SEQ ID NO: 59318 - protein, 72 aa, Zea mays
  Coding DNA Sequence Number=SeqID_17539
MARWLLKCGAPAMPGGGDARPNGDSLLEEDSIHLLGAERSGISIHGETGKKTTVKQGKDTGEEIRKKKQDER

SEQ ID NO: 59319 - protein, 174 aa, Zea mays
  Coding DNA Sequence Number=SeqID_17540
MTVSSNVSSSEKTISDPIAAMELQPDHTVEFGTSRIYSGRVHEIQRLGYFGNGVGRALGAEDVPKLEEGFVSAEKPGAALPAGTAAPSPEAKGEAAKWRRGVLGGLEDTPERTNRSWGAATTRVDGSGSPATQEVLRRDPPVRHRGHVGAGARADLGLMGRLGLNWLFYFPGNF

SEQ ID NO: 59320 - protein, 114 aa, Zea mays
  Coding DNA Sequence Number=SeqID_17541
MAAVSTSKTHSGERVGHREKLGGTFELWDHPSLSYLLSGAGGCRGVASVRGPVTPLLHRRSGWLRRATTACAGASTVGSAVGKEMAFGPLESQTTIGIRRNIPLRLSRIRVVDD

SEQ ID NO: 59321 - protein, 51 aa, Zea mays
  Coding DNA Sequence Number=SeqID_17542
MADVWPYHTMRPCSQRPAPTSVMDGGSSGVAVLIVPRDEISTISRPKQIQF

SEQ ID NO: 59322 - protein, 259 aa, Zea mays
  Coding DNA Sequence Number=SeqID_17543
  Gene Ontology: Mol. function=transferase activity, transferring nitrogenous groups; Cellular component=mitochondrion; Biological process=biosynthetic process
  Homolog annotation: Hit_ID=Q5GAQ3; Match level="QueryCoverage=99%, HitCoverage=56%, E-value=1e-117, Identity=74%"; Hit description =Putative alanine aminotransferase
VPYFLDEETGWALEVDELKKQLEEARSKGISVRALVVINPGNPTGQVLTEENQKKIVEFCKNERLVLLADESISKGYYGECGKRGGYMEITGFSPQVRDQIYKMASINLCSNITGQILASLVMNPPKAGDESFESFRLERDGILSSLGRRAKALEEAFNSLEGITCNKAEGAMYLFPRLHLPRKAIGAAQAAGTAPDAYYAKRLLEATGIVFVPGSGFGQVPGTWHIRSTILPQEDKIPGIVSRFKEFHDKFMDEFRDY

SEQ ID NO: 59323 - protein, 194 aa, Zea mays
  Coding DNA Sequence Number=SeqID_17544
MESADRGHNPIRVATGILQIWIVAQQGKHKREAGRAERRAVNQQYAALATGGESEGRDVDADEIFHEPRPQVLAPSPHASCPSSSARGAQRAAAPTRNPRAASPGSGLVYPKITPNNPQERQDSISEMQNHKQKGMNQERRAWRKGEGGLQSSDLWFSRRREGVDEEGACHLRSSNLWFLGADWRPRRQLQGDD

SEQ ID NO: 59324 - protein, 168 aa, Zea mays
  Coding DNA Sequence Number=SeqID_17545
  Homolog annotation: Hit_ID=Q10F39; Match level="QueryCoverage=44%, HitCoverage=8%, E-value=1e-20, Identity=65%"; Hit description =Argonaute-like protein At2g27880, putative, expressed
MSRIGNWKWEDHRPPSGVCKGTSSGQAVLISGYSDGKSKFSMRHASEEQFSRFLLYEVDAIRKACASLEEGYLPPVTFIVVQKRHHTRFCPEDHCSHKQTDRRGNILPDAKPEELEGEELESQLLELVAALSMHPVHVPGNKQPARPASQKATAKDDKLAALQAEMAL

SEQ ID NO: 59325 - protein, 62 aa, Zea mays
  Coding DNA Sequence Number=SeqID_17546
MDKRKKLYNIVQETKGVGVSGGPTIRSEGVSGLRTRKAKRTGRTAVSPPAPHQTVTRDVPMS

SEQ ID NO: 59326 - protein, 539 aa, Zea mays
  Coding DNA Sequence Number=SeqID_17547
  Gene Ontology: Mol. function=RNA-directed DNA polymerase activity; Cellular component=intracellular; Biological process=RNA-dependent DNA replication
  Homolog annotation: Hit_ID=UPI00004C1732; Match level="QueryCoverage =94%, HitCoverage=44%, E-value=1e-130, Identity=78%"; Hit description= UPI00004C1732 related cluster
  Pfam annotation: Domain name=RnaseH; Domain location=194-319; Score= -20.4; E_value=0.0046; Accession=PF00075.14; Description=RNase H
  Pfam annotation: Domain name=rve; Domain location=356-514; Score =83.5; E_value=6.6e-22; Accession=PF00665.16; Description=Integrase core domain
  Pfam module annotation: Pfam domain module=RnaseH::rve; Domain location=194-319::356-514
MKESDQLATSFITPFDMYCYVTMSFGLRNAGATYQRCMNHVFGEQIGRTVEAYVDDIVVKTRKASDLLSDLEMTFRCLKAKGVKLNPEKCVFGVPRGMLLGFIVSKRGIEANPEKIAVITNMGPIKDLKGVQRVTGCLAALSRFISCLGERGLPLYRLLRKAECFTWTPEAEEALGNLKALLTNAPILVPPAAGEALLIYVAATTQGQARICSSSRPSGSTYATCYASTSRRSNNVAEYEALVNGLRIVIELGVRRLDARGDSQLVIDQVMKNSHCRDPKMEAYCDEVRRLEDRFYGLELNHIARRYNETADELAKIASGRTTVPPNVFSRDLHQPSIKIDDAPKPEKASAQPEAPSAPEGEALRVEEERSGKAPGGYTHLLVAIDKFSKWIEVRPLNSIRSEQTVAFFTNIIHRFVVPNSIITDNGTRFTGRKFLDFCEDHHIRVDWAAVAHPMTNGQVERANDMILQGLKSRIYNDLNKFGKRWMKELPSVVWSLRTTPSRVTGFTPFFLVYGAEAILPTDLEYDSPRTRAYDDQSN

SEQ ID NO: 59327 - protein, 297 aa, Zea mays
  Coding DNA Sequence Number=SeqID_17548
  Gene Ontology: Mol. function=zinc ion binding
  Homolog annotation: Hit_ID=Q5GAQ1; Match level="QueryCoverage=56%, HitCoverage=75%, E-value=4e-39, Identity=49%"; Hit description=Ring -H2 zinc finger protein
MAHIREYTLKTLSEPAVAPVCTRNHYVPGFLFSNGGFSGNLSQDATVLGRVQLLLSGMKRREPGRRRRHHVNAFETVAVPPSLSISMAPGPPRNTGARRPARAAAAAAAPRAWLLRAVFGGGGADGGGGATEWCHEGGLDDKAMARLPRREVGAGEALDCAVCIAEVAAGEAARVLPRGSAPTPPARSAGAPAVDDPPAVATPVADRESPNFPTNVLFFGSQDDVSTGRSRPRGALRRLVGCGGASPPPTQPPRRHDHRQHHQEEEEEDAGGDVEMGLAASGESSVSRPVKPPQPGS

SEQ ID NO: 59328 - protein, 203 aa, Zea mays
  Coding DNA Sequence Number=SeqID_17549
MEEIIDVKLELNLEVDKEEMYREQKAHANYLKQKVFFDDILDYLNSLDTHLMHLEIVFERLSILVTLLVPKGPLRIQIKFNVWSCQSLGKNLGPFFDSGQSIRHKILLWPGPNPTRPDPQTHIHGTTIDLPKGDKKGCYEENSVLKPLPISEKIFKLHVMSLSIVSDKDNVFISHFWQDLLNYFGTDAFNFVSSSRLMVNLKK

SEQ ID NO: 59329 - protein, 386 aa, Zea mays
  Coding DNA Sequence Number=SeqID_17550
  Gene Ontology: Mol. function=Rab GTPase activator activity; Cellular component=intracellular; Biological process=regulation of Rab GTPase activity
  Homolog annotation: Hit_ID=Q9LTF9; Match level="QueryCoverage=75%, HitCoverage=80%, E-value=6e-82, Identity=58%"; Hit description =Arabidopsis thaliana genomic DNA, chromosome 5, BAC clone:F6N7
MQEAELHDLSDDADYAASQQQGSPSIMRCDSGKKSSSSEPEGAQIVYLKDNVTIHPTQFASERISGRLKLIKQGSSLFMTWIPYKGQSTNAKLSEKDRNLYTIRAVPFADVRSIRRHTPALGWQYIIVVLSFGLAFPPLYFYNGGVREFLATVKQHVLLMRSAEDANVFLVNDFQNPLQRTLSSLELPRAVSIASVPSTPVSVGESSSQQNEERTDVSASVPQYNGRQRQKGHDPARDISIQVLEKFSLVTKFARETTSQLFRETHSNGFGPLERRNSNQSALDYSHKSSEYKEDVPVQSPVDPDPLEVAVCSLCQLFSLALTHFNTCTYLFEVGNFSTSVPGQPDTNLILVEQKVPFRKHNHVEKTAINVEAFELIKLRMYRKEP

SEQ ID NO: 59330 - protein, 327 aa, Zea mays
  Coding DNA Sequence Number=SeqID_17551
  Gene Ontology: Mol. function=Rab GTPase activator activity; Cellular component=intracellular; Biological process=regulation of Rab GTPase activity
  Homolog annotation: Hit_ID=Q9LTF8; Match level="QueryCoverage=87%, HitCoverage=99%, E-value=1e-128, Identity=65%"; Hit description =Similarity to GTPase activating protein
  Pfam annotation: Domain name=TBC; Domain location=74-261; Score= -65.8; E_value=0.0068; Accession=PF00566.9; Description=TBC domain
  Pfam annotation: Domain name=Toxin_16; Domain location=290-323; Score= 13.8; E_value=0.017; Accession=PF07945.2; Description=Janus -atracotoxin
  Pfam module annotation: Pfam domain module=TBC::Toxin_16; Domain location=74-261::290-323
MDGEGPIFGVVEYYLNSITFLNCFTFGNRFCIFDKLSLVWGKPRQPPLGLEEWATFLDSEGRVVDPKALRKRIFYGGVEHKFRKEVWAILLGYHSYESTYAEREYQKSIKKTEYETIKNQWQSISPEQAKRFTKFRERKGLIEKDVVRTDRSLSFYDGDDNPNVNLLRDILLTYSFYNFDLGYCQLVELLDRPLHKYFEQNDCLNYFFCFRWILIQFKRELEYEQTMRLWEVLWTHYLSEHLHLYVCVAILKRYRGKIMGEQMDFDTLLKFINELSGQIELDAILRDAEALCICAGENGAACIPPGTVPSLPVDNGLFYSQQDDEVL

SEQ ID NO: 59331 - protein, 163 aa, Zea mays
  Coding DNA Sequence Number=SeqID_17552
MRENGTGQKDAGATMLGRAEAEELSSGQKVRCLQLFDITHRKKDGSLMTSEAVEIMEKLKDKKAEYEAVASSDSSVNVDDIDNRIITEVLGPESSQQYMPSGSQAQAEVQRLRDQMAQMQSSFDQHKAEAAVRKVEESRKYNALQLQLQNMMKMFQQSQNPPS

SEQ ID NO: 59332 - protein, 53 aa, Zea mays
  Coding DNA Sequence Number=SeqID_17553
MDLEEALLEDRVSLFVGDNTGMLMMIVEGHRNKIFANAQKAENLSFLAYLGSK

SEQ ID NO: 59333 - protein, 54 aa, Zea mays
  Coding DNA Sequence Number=SeqID_17554
MARAGISRVDDVEAAKSAGSTSDRLGFFVPPQQEFESTRHLSPVPPLEAPPAPP

SEQ ID NO: 59334 - protein, 213 aa, Zea mays
  Coding DNA Sequence Number=SeqID_17555
  Subcellular localization annotation: CTP_CleavageSite=37; ConfidenceScore=5.28e-01
MQDAARRALSQYCSLLNGVADGLNLKYYPNRSTRSTRSVIVSPVGEGNPRLNSTVNLVAVLNTELDHTLNELSRARAEIAELWAEGAERRYKECLTTGDEVGGIPSKSNKPHRMRQPSSSCPTTAFDDKSTYVPYADSSSAGNWADSSSHAISAAATSIPTLMNHNFSTIQHLIDRAIMTERKHKEMEDQKRKISGPQPRSNSCSRFSGNSSQ

SEQ ID NO: 59335 - protein, 53 aa, Zea mays
  Coding DNA Sequence Number=SeqID_17556
MAWWWFPMSSSKEIVKRPRCLAVRHRASGGTAVDVREEDGVPRTVRSSTGEHD

SEQ ID NO: 59336 - protein, 269 aa, Zea mays
  Coding DNA Sequence Number=SeqID_17557
MCRFNVGVPNHLVLIGINEGFDGRLNQSKIKRNKKYHQNDAVLKPLPRHQTTSDHPPCAASTSESPTIWFRSELTRGSTADLTRYDRTEQGAWRRAWQRRWRPVVAARVSGHVGLRWAVIVSGLDGGKASIFDLLRCQYRKARSAILSLLHYNRGRQGWYLRSAPLQSREARLLCHQHDILSFCSINAFDNKIQRESLNLDSSFSNFQPLNLEIYSALSMPQDVAYPFLLVQISLSALNPGISWYDHIKTSLNSRGDSTRSCFVFAIRS

SEQ ID NO: 59337 - protein, 66 aa, Zea mays
  Coding DNA Sequence Number=SeqID_17558
MAFVVDKDITTRSFARTFADIKLDDGNQDLVPVDYDNEEVEEMLQLPPFPFAILAREEKKAANGKK

SEQ ID NO: 59338 - protein, 655 aa, Zea mays
  Coding DNA Sequence Number=SeqID_17559
  Homolog annotation: Hit_ID=Q1SPJ4; Match level="QueryCoverage=98%, HitCoverage=49%, E-value=0.0, Identity=52%"; Hit description=Thiolase
  Pfam annotation: Domain name=GCC2_GCC3; Domain location=130-179; Score=3.6; E_value=0.044; Accession=PF07699.3; Description=GCC2 and GCC3
MGSMEHPLPSLSVEGAVRADGESFEETVWQQEYSLSNGSSIAPGGGSGGTVLLFLQKLTLGKSASLSSVGGYGSSKGGGGGGGGRIHFHWSDIPTGDVYQPIASVKGNIYARGGLGRDQSGGGENGTVTGKTCPKGLYGTFCAECPVGTYKNVSGSDSSLCRPCPASQLPHRAVYVYVRGLLILLALVLSVARMKFVGVDELPGPAPTQHGSQRDHSFPFLESLNEVLETNRVEESQSHVHRMYFMGPNTFSEPWHLPHTPPEEIKEIVYEGAYNTFVDEINAIAAYQWWEGAIYTILSILAYPLALSWQQWRRRMRLQRLREFVRSEYDHACLRSCRSRALYEGLKVSATTDLMLAYVDFFLGGDEKRTDLPPRLPQRFPMAIIFGGDGSYMAPFSLQIDNVLTSLMSQLVAPTTWYRLVAGLNAQLRLVRRGRLRSTFRPVLRWLEMHANPALRIHGVRIALAWSQATPGNYRQYGLLVYSVEEENEPICLGNTNGGVKTETFSRVKTTDMPNESGSPREDVPLTQGHRSSEGFARRKRSYRGLIDANSLQKLEEKRDIFYLLSFILHNTKPGGHQDLVGLVISMLLLGDFSLVLLTFLQLYSISLVDVFLVLFILPLGILLPFPAGINALFSHGPRRSAGMKANGGFSRLDW

SEQ ID NO: 59339 - protein, 94 aa, Zea mays
  Coding DNA Sequence Number=SeqID_17560
MAGLAAVLDFDMLCASVALSAERRKAGAALAGAAGDCGGGGGGVQRMWEGDVVLDCLDDRRIALETSCCYGNGSSWEDLVVLVEGTELGCWAFH

SEQ ID NO: 59340 - protein, 133 aa, Zea mays
  Coding DNA Sequence Number=SeqID_17561
  Homolog annotation: Hit_ID=Q2HTU7; Match level="QueryCoverage=78%, HitCoverage=55%, E-value=2e-20, Identity=40%"; Hit description =Uncharacterized Cys-rich domain
MRRANLGSCFLQRTSVFSAFSAVTLVSKSCSLIAVQGTESSLDDCVLHLICPCCTLCQEARTLEMNNVQCGVWHGRGDTICLGSNGAGNKAFAALNKASLVPVKSPGLCGMDRSSSAADEQQPLVPPDQLEQV

SEQ ID NO: 59341 - protein, 225 aa, Zea mays
  Coding DNA Sequence Number=SeqID_17562
MKLFMCFGGAAAAVVIGDDEAAAPRHRGLRRGRRSLSFRGKLKFLAREKKPSAAPPLGQPTKRGADADNDDGVYGVSRASSVASSALLSSASSWPLDSSDTSSSSSSLSRSSSASSSPSVSGMLSPPSVKLRPNNKRPASSPSPAAGAAAVVLCLLMVVLFGRVGATLLMSTALYLFPRRWPATTRKESTAAVDPLDGWSATPEKRKVVMERCDAVPGLEWNRNK

SEQ ID NO: 59342 - protein, 36 aa, Zea mays
  Coding DNA Sequence Number=SeqID_17563
MDLSTEVGATSPDAEGSNEYLAKSCALLVVLVKILA

SEQ ID NO: 59343 - protein, 185 aa, Zea mays
  Coding DNA Sequence Number=SeqID_17564
  Subcellular localization annotation: CTP_CleavageSite=53; ConfidenceScore=5.09e-01
MGVPDLCACWRAINALQVQVPVGATSWGLLPTLSSVNYSTLAGSRWKLTATVLAESSRAACQQRWPPQPKVRLLHKDDEHPFLRMLEEEASHQLMRKAEPQLSSLSTPARLMNILEAEHWRKSANPHEVALLQQQQEEGEIGSAIAQETKSASSPTVDLSTERRRAPSKQAAHHVEHPLCLTCSG

SEQ ID NO: 59344 - protein, 642 aa, Zea mays
  Coding DNA Sequence Number=SeqID_17565
  Gene Ontology: Mol. function=dolichyl-diphosphooligosaccharide -protein glycotransferase activity; Cellular component=oligosaccharyl transferase complex; Biological process=protein amino acid N-linked glycosylation via asparagine
  Homolog annotation: Hit_ID=Q5N7W3; Match level="QueryCoverage=95%, HitCoverage=95%, E-value=0.0, Identity=67%"; Hit description =Putative ribophorin II
  Pfam annotation: Domain name=Ribophorin_II; Domain location=5-636; Score=518.4; E_value=8e-153; Accession=PF05817.4; Description =Ribophorin II (RPN2)
MAGRRPAPVAILLLLAAAFAPISSAVRPVSDAHRSAAVELFAPSADGSFGDLESTYEAVRTFQILGLENYKSLSGKACKFAAENLASPGSTTKDLFHAVRISGALGCAVDAGVYDGVVARLKAVIQDTNSLLELYYPVGGLLGIKEQGHNVVLSDAEGTFHATKALSQSDGRWRYDTDSAESSTFAAGIALEALAGIVSLADAAVDPSMMGVVKNDVVKLFDTIKSYNDGTFYFDEKHVDATEYKGPIITSASVVRGVTSFAAVVSGKLNIPAEKILGLAKFFLGIGLPAKGITFSVKMTYGAWDHNLLTSDVFFLITTLLCSNSLASFSFLSQELQYDLDNNVHYLDIAPLKIDVGKYSIVFEISLQEPEQETVYATGGRNTESVIVTGLIKVDKAEIGISDNDAGAVESVQNKCVQVFLKLRHESKVEHLFVVPGSARQFKIVLDFLGLVEKFYYLSGRYDLELTVGDAVMENSFLRPLGHLELDLPDAPEKAPRPPAQAVDPFSKFGPKAEISHIFRAPEKRPPKELSLAFTGLTLLPFIGFLIGFLPAPVRLIEALLLQLVRLGVNLKNFPSLPGPAAFASLFHAGIGAVLMLYVLFWIKLDLFTTLKYLGFLGIFLVFVGHRALSYLSSVSTKQKTA

SEQ ID NO: 59345 - protein, 297 aa, Zea mays
  Coding DNA Sequence Number=SeqID_17566
  Gene Ontology: Mol. function=ATPase activity, coupled to transmembrane movement of substances; Cellular component=integral to membrane; Biological process=transport
  Homolog annotation: Hit_ID=Q5N7X9; Match level="QueryCoverage=99%, HitCoverage=91%, E-value=1e-141, Identity=82%"; Hit description =Putative ABC protein
  Pfam annotation: Domain name=ABC_tran; Domain location=80-267; Score =202.5; E_value=9.5e-58; Accession=PF00005.17; Description=ABC transporter
  Pfam annotation: Domain name=SMC_N; Domain location=16-271; Score= -122.3; E_value=0.012; Accession=PF02463.9; Description=RecFRecNSMC N terminal domain
  Pfam module annotation: Pfam domain module=ABC_tran::SMC_N; Domain location=80-267::16-271
MSGKLTAEQLTKFTLYAEWLILSTWVGLGDNWSSLMQSVGASLKLEKLKGQIQYADVSFSYPSRPTVPILGGLNLTLNPNEVVAIVGLSGSGKSTIINLLLRLYEPTNGQILIDGVPLTELDIRWFRERIGFVGQEPRLFRMDISSNIKYGCPRDVSHEEVIWAAKQAYAHDFIMALPDGYNTIVDDALLSGGQKQRVAIARALLRDPSILLLDEATSALDAESEHYVKSVITKVSRDSKAKRTVVIIAHRLSTIQTADRIIVMENGNIVEDGKHIDLIEKGGLYSRLARRQNDDLK

SEQ ID NO: 59346 - protein, 177 aa, Zea mays
  Coding DNA Sequence Number=SeqID_17567
  Gene Ontology: Mol. function=ATPase activity, coupled to transmembrane movement of substances; Cellular component=integral to membrane; Biological process=transport
  Homolog annotation: Hit_ID=Q8RY46; Match level="QueryCoverage=58%, HitCoverage=14%, E-value=2e-20, Identity=52%"; Hit description =Transporter associated with antigen processing-like protein
  Subcellular localization annotation: CTP_CleavageSite=47; ConfidenceScore=5.68e-01
MPPPAAMLLLTAASGPPTLSLTLAARRAPLRAPSRRRLRALRPARIRAAAAIGGEFGGLGRRRVVVGEFIERLRNVLPGGSWWRLEDGDEAGDGAGRAEGSGTTAVSALRRMWALVAGDRLVIYVGFASLVGAALSEIAIPHLLAASIFSAQNGGAVFYRNAKLLVVLCLVSGVFRL

SEQ ID NO: 59347 - protein, 163 aa, Zea mays
  Coding DNA Sequence Number=SeqID_17568
  Homolog annotation: Hit_ID=Q6QP51; Match level="QueryCoverage=38%, HitCoverage=35%, E-value=4e-13, Identity=72%"; Hit description =Putative growth-regulating factor 1
MTGKQRYSPRSDCCSTRQIEAGNSQVQPQAQQEAPPRPTLGLGLRRRSPPRPTIGLGPRFGLGRWSPPRPPPGLGLNLGLGMRTPPRPTPGLSLNLDLGRNRVLARPRPRPQEKLAPVTSNDGSPRASMTTVVLSPLRKQGDGPPGVETPTFGAPGRGLLEST

SEQ ID NO: 59348 - protein, 185 aa, Zea mays
  Coding DNA Sequence Number=SeqID_17569
  Homolog annotation: Hit_ID=Q2QSQ7; Match level="QueryCoverage=37%, HitCoverage=29%, E-value=9e-25, Identity=78%"; Hit description=Heavy metal-associated domain containing protein, expressed
  Pfam annotation: Domain name=GRP; Domain location=40-127; Score= -17.8; E_value=0.0049; Accession=PF07172.2; Description=Glycine rich protein family
  Pfam annotation: Domain name=HMA; Domain location=8-78; Score=27.7; E_ value=4.2e-05; Accession=PF00403.16; Description=Heavy-metal -associated domain
  Pfam module annotation: Pfam domain module=GRP::HMA; Domain location =40-127::8-78
MAMNVQKIVVKLDLHDNKDKQKALKAISVLVGIDAVSVDMAAHKMTVIGTVDPVQVVSKLRSKSWAAHIDSVGPAKEPEKKEEKKDGGGEKKDGGGGEGKKEEGDGKKDGGGGGDGKKDGEGKKEDGDGKKQDGEGKKEDGDGKKDDKKDGGGGGAEEKKPAAAKQRDERTDGWMGARNRKRGRG

SEQ ID NO: 59349 - protein, 200 aa, Zea mays
  Coding DNA Sequence Number=SeqID_17570
MGWAQNTDVWIAAGRILVFLNYKYGTQNEIISIKNRISIPFTVLYIPFLFRFRFYIGFEIDRDKTNKIGYTITVGFRFYIGFRFLHRFSLDRCIIRNQLKQPIDRVTAACIMRAPGWGRGCGDRRDGAAASAMRAAERRMGPRRRQPPGWGHGVGDRREPHEQQATVAAYWIEMWNRTWIGFFLSCSRRTGIESGASVRK

SEQ ID NO: 59350 - protein, 86 aa, Zea mays
  Coding DNA Sequence Number=SeqID_17571
MRRVRAIWRFISHAPWSTIQWVRVTVERVQATDDSPSHLQHYINRRVEGTVDEDAHTAEAEEADLEEEIADEEEDRIPLVPSKPIH

SEQ ID NO: 59351 - protein, 51 aa, Zea mays
  Coding DNA Sequence Number=SeqID_17572
  Subcellular localization annotation: CTP_CleavageSite=37; ConfidenceScore=5.13e-01
MATPSTVSDLLRAIPDTPTPHRAQRRRLSRRTGVMVKSMAKSLFIRHEHDV

SEQ ID NO: 59352 - protein, 86 aa, Zea mays
  Coding DNA Sequence Number=SeqID_17573
MPCFTALVVPQNGCLKQDGDRVHHGSRNNRMGLGDGPLLRVPSNRYLRGDVGLLPHRLHDSRLGEDDSLLIHGPRLFYHYGDGSYD

SEQ ID NO: 59353 - protein, 216 aa, Zea mays
  Coding DNA Sequence Number=SeqID_17574
  Pfam annotation: Domain name=zf-CCHC; Domain location=64-81; Score =24.0; E_value=0.00011; Accession=PF00098.13; Description=Zinc knuckle
MHINDKDGSSSKKKDLILKASQEKGKTKVVVEEESSSDDDLDASIALMKKKLFSSSKRKPISEMDCYNCGELGHLAHQCIKLKKNKFKGKKDDESEDEKKEKKFFKRNDGKQKRFHKRKGGKVYIVGDWLTDIESTSSSSSSEEDGEKVVAVTVDFSSPPPSPSSTTHLCLMAKGEWKVQNDVTSEVEYGSDSDDEYASPTYDELADLLKEYTQII

SEQ ID NO: 59354 - protein, 93 aa, Zea mays
  Coding DNA Sequence Number=SeqID_17575
MSSESDRDDDKKGKKKEKKRYYKKKGGDAHTTAEARGKLLRLGREQQGHQMSAVYVVTIWKLELKTTMLLPLASLGHSCMEISFLLDRNVLWD

SEQ ID NO: 59355 - protein, 39 aa, Zea mays
  Coding DNA Sequence Number=SeqID_17576
MTKVYACQRCSKLKKWKCTFGLTESKGTGVMQKVNAKSA

SEQ ID NO: 59356 - protein, 409 aa, Zea mays
  Coding DNA Sequence Number=SeqID_17577
  Gene Ontology: Mol. function=DNA binding; Biological process =regulation of transcription, DNA-dependent
  Homolog annotation: Hit_ID=Q6EU30; Match level="QueryCoverage=72%, HitCoverage=71%, E-value=2e-91, Identity=62%"; Hit description=RAV -like B3 domain DNA binding protein-like
  Pfam annotation: Domain name=B3; Domain location=93-201; Score=112.0; E_value=1.7e-30; Accession=PF02362.12; Description=B3 DNA binding domain
MEFASSSSRFSREEDEEEEQEEEEEEEEASPREIPFMTAAATADTGAAASSSSPSAAASSGPAAAPRSSDGAGASGSGGGGSDDVQVIEKEHMFDKVVTPSDVGKLNRLVIPKQHAEKYFPLDAAANEKGQLLSFEDRAGKLWRFRYSYWNSSQSYVMTKGWSRFVKEKRLDAGDTVSFCRGAGDTARDRLFIDWKRRADSRDPHRMPRLPLPMAPVASPYGPWGGGGGGGAGGFFMPPAPPATLYEHHRFRQALDFRNINAAAAPARQLLFFGSAGMPPRASMPQQQQPPPPPHPPLHSIMLVQPSPAPPTASVPMLLDSVPLVNSPTAASKRVRLFGVNLDNPQPGTSAESSQDANALSLRTPGWQRPGPLRFFESPQRGAESSAASSPSSSSSSKREAHSSLDLDL

SEQ ID NO: 59357 - protein, 153 aa, Zea mays
  Coding DNA Sequence Number=SeqID_17578
  Subcellular localization annotation: CTP_CleavageSite=34; ConfidenceScore=5.13e-01
MVYIFMQFGTLRKKSGLRFTGGRIFVFKHGTHVRQSVGWPSGGNSASPEAGLNLGTNFASPELCLGYLVPANPAGGHSFNCVLHTNKPQIGLGHDLEETSTSPEHGFSLDNTNERTPDIIRSRRVDILPRAFRHTHHYSNHYDLDNFPVRWAR

SEQ ID NO: 59358 - protein, 33 aa, Zea mays
  Coding DNA Sequence Number=SeqID_17579
MAPRDPAAPRISPPGQGVLDTYQNGIGAAQFTA

SEQ ID NO: 59359 - protein, 352 aa, Zea mays
  Coding DNA Sequence Number=SeqID_17580
  Gene Ontology: Mol. function=sugar porter activity; Cellular component=integral to membrane; Biological process=carbohydrate transport
  Homolog annotation: Hit_ID=Q6K8S7; Match level="QueryCoverage=93%, HitCoverage=85%, E-value=1e-146, Identity=80%"; Hit description =Putative PLRR-4 polymorphic leucine-rich repeat protein
  Pfam annotation: Domain name=Nuc_sug_transp; Domain location=105-323; Score=-27.8; E_value=1.5e-11; Accession=PF04142.6; Description =Nucleotide-sugar transporter
MQRNGVVECSVCRSRVVVPSPRSVSRAYDKHRNKMSSKFRALNVFLVVGDCILVGLQPILVFMSKVDGKFQFSPISVNFLTEVMKVIFAVVMLIIQSRKQKVGEKPLLARSTFIQAARNNVLLAVPALLYAINNYLKFIMQLYFNPATVKMLSNLKVLVIAFLLKFIMRRRFSVIQWEALALLLIGISINQLRTVPVGNTAFGLPVTAIAYIYTLIFVTVPSVASVYNEYALKSQYDTSIYLQNLFLYGYGAIFNLLGILGTVLFQGPESFNILRGHSRATIFLICNNAAQGILSSFFFKYAASAAFLGHSLTINFLLGISVVFISMHQNRCVILEATSKLAFISGKPSDWN

SEQ ID NO: 59360 - protein, 343 aa, Zea mays
  Coding DNA Sequence Number=SeqID_17581
  Gene Ontology: Mol. function=hydrolase activity; Biological process =metabolic process
  Homolog annotation: Hit_ID=Q6K1Z7; Match level="QueryCoverage=66%, HitCoverage=80%, E-value=2e-85, Identity=66%"; Hit description =Isochorismatase hydrolase-like protein
PFLDIGNFSMPKVLKEAGYEVLYEPKVLELEPEILRDISWDLPSSVDGKAKLDEDCLAYDQLDQYPSLENNPVTFELRDEPAIPQLGIPFQTDGEFVLPPRGVGLVLVDLCNGFCTVGAGNLAPVAPNKQISKMVEEAARLSKLFCDRNLPIFAFLDTHYPDKPEPPYPPHCIIGTGEEDFVPDLEWLEKEPNVTIKRKSCIDGYISCIEKDGSSVFADWIGKYQIKTVSCLDTEDFRDRLYPIVYDLGGIGSMQVLVLGICTDICVLDFASSTLAARNIDRVPPLQDVVIYSGGCATYDLPVEIATNIKGALAHPQDLMHHIGLYMAKGRGAKIVDRVVIEP

SEQ ID NO: 59361 - protein, 448 aa, Zea mays
  Coding DNA Sequence Number=SeqID_17582
  Gene Ontology: Mol. function=DNA binding; Cellular component =mitochondrion; Biological process=DNA integration
  Homolog annotation: Hit_ID=UPI00004C1731; Match level="QueryCoverage =90%, HitCoverage=33%, E-value=0.0, Identity=73%"; Hit description =UPI00004C1731 related cluster
  Pfam annotation: Domain name=RnaseH; Domain location=37-153; Score= -4.0; E_value=0.00014; Accession=PF00075.14; Description=RNase H
  Pfam annotation: Domain name=rve; Domain location=155-319; Score =75.0; E_value=2.4e-19; Accession=PF00665.16; Description=Integrase core domain
  Pfam module annotation: Pfam domain module=RnaseH::rve; Domain location=37-153::155-319
MGETISFAPRKAIKSQVLADFVAEWVDTQLPTVSIQPELWTMFFDGSLMKTGAGAGLLFISPLGKHLRYVLRLHFLASNNVAEYEALVNGLRIAIELGLVIDQVMKNSHCRDPKMEAYCDEVRRLEDKFYGLELNHIARRYNETADELAKIASGRTTVPPDVFSRDLHQPSVKIDDTSEPEAPSAQPEKAPEGYMHLLVAIDKFSKWIEAVAFFTNIIHRFGDPNSIITDNGTQFTGRKFLDFCEDHHIRVDWAAVAHPMTNGQVERANGMILQGLKPRIYNDLNKFGKRWMKELPSVVWSLRTTPSRATGFMPFFLVYGAEAILPTDLEYGSPRTRAYADQSNQASREDSLDQLEEARDLALLYSARYQQSLRCYHARGVRSRDLQVGDLVLRLRQDARGRHKLMPPWEGSFVIAKVLKPGMYKLANSQGEVYSNAWNIQQLRRFYP

SEQ ID NO: 59362 - protein, 186 aa, Zea mays
  Coding DNA Sequence Number=SeqID_17583
  Homolog annotation: Hit_ID=Q6QP51; Match level="QueryCoverage=44%, HitCoverage=42%, E-value=7e-12, Identity=56%"; Hit description =Putative growth-regulating factor 1
  Subcellular localization annotation: CTP_CleavageSite=39; ConfidenceScore=5.40e-01
MSVAGGSSGHVVSQAYVPSWGSGASGRGSERRFAFAIMTASKKGPGKGDTPKRTLLHEGNRLRASLLIRGSKAGPSEGFNSRLRAHGLHTHYWSEVRRSAPRKGSTAASGHSGSAPTTDQGFEGWPSKVPEEGELRSARPRARTRAQSRKTENSAPPDPGLGLGLSPGRRRTPLRPTQGSDSGSVP

SEQ ID NO: 59363 - protein, 87 aa, Zea mays
  Coding DNA Sequence Number=SeqID_17584
  Subcellular localization annotation: CTP_CleavageSite=20; ConfidenceScore=5.09e-01
MAAASPIHGTVGGAEKCCLPAARGTNARRYVFVFFGGEMRSLPSQNTALLRGDITARFDTYDVAKRNQALLTSYATNLTSRSSRANN

SEQ ID NO: 59364 - protein, 78 aa, Zea mays
  Coding DNA Sequence Number=SeqID_17585
MAATSLLGQWGRQCCGCWMRGSRHRLEEKDLILASGFRSDGQNGIIPLRPGILTKETLLFLQMNPRSISTIGRFNLCP

SEQ ID NO: 59365 - protein, 134 aa, Zea mays
  Coding DNA Sequence Number=SeqID_17586
MPPSDLIEPCVAAPVMDAALLAVIVATILSHLDVRPCLPLLPARDIVEGAYAARVEAQLCRRMQPPSVNTSTPVFPPRRKVDAEKRKRSPSPSSSSSSIWSIVVKEEPDLLERGQIIIAATFFLSGKDFHASRA

SEQ ID NO: 59366 - protein, 109 aa, Zea mays
  Coding DNA Sequence Number=SeqID_17587
KPREPLSTTSGRQIKTGWFEFGTRGLVSSGQLGVALSADTEAQSPEVRQTGASRALGVGLGSQRGWGGLGKHYGKVWVPRIGLRWADGGGGSSGEPKVTLASNARRGEG

SEQ ID NO: 59367 - protein, 123 aa, Zea mays
  Coding DNA Sequence Number=SeqID_17588
  Gene Ontology: Mol. function=galacturan 1,4-alpha-galacturonidase activity; Biological process=carbohydrate metabolic process
  Homolog annotation: Hit_ID=P26216; Match level="QueryCoverage=55%, HitCoverage=16%, E-value=5e-33, Identity=97%"; Hit description =Exopolygalacturonase precursor
MGQSTEGLEACKLLEATLGAALGVRAYSHGLVVGAAILDGDVIHGDAGAWDLGSAEQANSLRGGGGAGDVLEGDVLDRRIPQVHKGSTQTNKISKLGFKSKGAKEPKGALVWRTGLSGPPSDD

SEQ ID NO: 59368 - protein, 162 aa, Zea mays
  Coding DNA Sequence Number=SeqID_17589
MAQKRDTRMSLTQIRCFGQLGTARWGSGWPDIEESRRRRAPTCAGERWSAGRVEDLRKGETIVGSRCAKLRQISPWPKRWQKSSGDSRKVKQQRGAALRLGECGGRERANVVGTWVRFDRMGARHGHRRDSCRGGDGSDNRGRESARERAGEQGAVLTGRSH

SEQ ID NO: 59369 - protein, 356 aa, Zea mays
  Coding DNA Sequence Number=SeqID_17590
  Gene Ontology: Mol. function=galacturan 1,4-alpha-galacturonidase activity; Cellular component=cellular_component; Biological process =carbohydrate metabolic process
  Homolog annotation: Hit_ID=P26216; Match level="QueryCoverage=99%, HitCoverage=100%, E-value=0.0, Identity=86%"; Hit description =Exopolygalacturonase precursor
  Pfam annotation: Domain name=Glyco_hydro_28; Domain location=18-355; Score=558.6; E_value=6.2e-165; Accession=PF00295.8; Description =Glycosyl hydrolases family 28
MACTNNAMRALFLLVLFCIVHGEKEESKGIDAKASGPGPCKGDVTIQVDGNLLATTDLSQYKDHGNWIEILRVDNLVITGKGNLDGQGPAVWSKNSCTKKYDCKILPNSLVMDFVNNGEVSGVTLLNSKFFHMNMYRCKDMLIKDVTVTAPGDSPNTDGIHMGDSSGITITNTVIGVGDDCISIGPGTSKVNITGVTCGPGHGISIGSLGRYKDEKDVTDINVKDCTLKKTMFGVRIKAYEDAASVLTVSKIHYENIKMEDSANPIFIDMKYCPNKLCTANGASKVTVKDVTFKNITGTSSTPEAVSLLCTAKVPCTGVTMDDVNVEYSGTNNKTMAICTNAKGSTKGCLKELACF

SEQ ID NO: 59370 - protein, 54 aa, Zea mays
  Coding DNA Sequence Number=SeqID_17591
MEYHRQQAEYQKKKDEYYSNLQAHNQALLSGFQTPSASVAAPRDASGQDDASNS

SEQ ID NO: 59371 - protein, 154 aa, Zea mays
  Coding DNA Sequence Number=SeqID_17592
MSLTQIRCFGQLGTARWGSGCPDVEESRRRRAPTCAGERWSADRVEDLRKGETTMGSRCAKLRQSSPWPKRWQKSSGDSRKVKQQRGAALRLGECEGRERANVVGTWARFDRMGARHGRGRDSCKGGDGSDNRVRESARERAGEQGAVLTGRSH

SEQ ID NO: 59372 - protein, 287 aa, Zea mays
  Coding DNA Sequence Number=SeqID_17593
  Subcellular localization annotation: CTP_CleavageSite=67; ConfidenceScore=5.12e-01
MALHKLYDDGGPQLSYGSRTTSAGTRPLQQLSLRQAPPHLRQPRHHASRVPRSLRLPHWHKQREPLSTTSGRQIKTGWFEFGTRGLVSSGQLGVALSADTAAQSPEVRQTEASKALGVGLGSQRGWGGLGKHYGKVWVPRIGLRWADGGGGSSGEPKIRCFGQLGTARWGSGWPDIEESRRRRAPTCAGERWSADRVEDLRKGETTVFSRCAKLRQSSPRPKRWQKSSGDSRKVKQQRGAALRLGECEGRERASVRQGGGDGSDNRGRESARERAGEQGAVLTRRSH

SEQ ID NO: 59373 - protein, 196 aa, Zea mays
  Coding DNA Sequence Number=SeqID_17594
  Homolog annotation: Hit_ID=P26216; Match level="QueryCoverage=35%, HitCoverage=16%, E-value=1e-31, Identity=95%"; Hit description =Exopolygalacturonase precursor
  Subcellular localization annotation: CTP_CleavageSite=37; ConfidenceScore=5.18e-01
MGSRCAKLRQSSPWPKRWQKSSGDSRKVKQQRGAALRLATNGQCKDERKIITREMGQSTEGLEACKLLEATLGAALGVRAYSHGLVVGAAILDVDVIHGDAGAWDLGSAEQANGLRGGGGAGDVLEGDVLERRIPQVHKGSTQTNKISKLGFKSKGAKKLKGTLVWRTGLSGMPPDSVRCTRTVQLQTRHLWVSQV

SEQ ID NO: 59374 - protein, 309 aa, Zea mays
  Coding DNA Sequence Number=SeqID_17595
  Gene Ontology: Mol. function=molecular_function; Cellular component =anchored to membrane; Biological process=biological_process
  Homolog annotation: Hit_ID=Q10P77; Match level="QueryCoverage=90%, HitCoverage=91%, E-value=7e-97, Identity=60%"; Hit description =Thaumatin family protein, expressed
  Pfam annotation: Domain name=Thaumatin; Domain location=32-223; Score= 182.9; E_value=7.7e-52; Accession=PF00314.8; Description=Thaumatin family
  Subcellular localization annotation: CTP_CleavageSite=79; ConfidenceScore=5.17e-01
MGTARVRFVVLVLISTFLRVREGRAATFTFVNRCTGTVWPGIQSNAGSSRLDTTGFVLPPGTSRAVPGAVGVDGSGKVVCATGDCGSGSLECNGQNAATPETLAEFTLASAGGNDFYDPAGGAATGASATTCAAAGCTADLNERCPAELRAEGGAGCRSACDAFGRPEYCCSGAYANPNTCRPTAYSQLFKSACPNSYSYAYDDPTSTFTCAGGRDYTITFCPVATPSVKSSSGPGAATTTAAPTGPTPTLPGATPRSAGGGPEGQGVMLGDNSWLASLATGDASSAPALRALPLAPLLLVGLLLLVLL

SEQ ID NO: 59375 - protein, 148 aa, Zea mays
  Coding DNA Sequence Number=SeqID_17596
MASTSDQRSNQGNEDNSSIGEGHPITSPNPEKAPAAANPAADVRSIRDRAAESQPHPASSFLGWQARGTASQTYPVAAWPGSGSRTPVNPPRRTPSLPRPAGRAKPSQAQAASGLVYRQNVSQPTSHRVARGGGVERSLCSSSPPCID

SEQ ID NO: 59376 - protein, 63 aa, Zea mays
  Coding DNA Sequence Number=SeqID_17597
  Gene Ontology: Mol. function=GTP binding; Cellular component =intracellular; Biological process=small GTPase mediated signal transduction
  Homolog annotation: Hit_ID=Q10CA9; Match level="QueryCoverage=60%, HitCoverage=20%, E-value=1e-10, Identity=82%"; Hit description=ADP -ribosylation factor, putative, expressed
MAPRTLYDDGRLSAPLRKQEDPLFANKDMQILMVGLDTTGKTTILYKLKLGEIITTIPAIGEP

SEQ ID NO: 59377 - protein, 44 aa, Zea mays
  Coding DNA Sequence Number=SeqID_17598
MEEAGHELHSVLTCQAEWVVTIDGQKARDPTEDEVSSVYGHGCH

SEQ ID NO: 59378 - protein, 109 aa, Zea mays
  Coding DNA Sequence Number=SeqID_17599
MAEVSKPIEGSPPIKARTEPAEGPELKKAAEQPKALSPLREMELPKASRIPATTQRRRMTNVLDVVMESVRVPTPASAPDIEGEVLKKSGKAGTSQATPEAGPSSPAEA

SEQ ID NO: 59379 - protein, 79 aa, Zea mays
  Coding DNA Sequence Number=SeqID_17600
MNPPLKPPPARTDDMVTAQMRLLPQMANTMAELQAQLRQDRQPPPPLPPPAPPKDKHHEFMSHKPPTFSSSPDPLQADN

SEQ ID NO: 59380 - protein, 69 aa, Zea mays
  Coding DNA Sequence Number=SeqID_17601
MDPSFFRSFYKGLEEFWRPSCFGEKGKDDDEEDGYDYAYGNGCLGASSSVKEGERVRRSPEFRTSRVQD

SEQ ID NO: 59381 - protein, 74 aa, Zea mays
  Coding DNA Sequence Number=SeqID_17602
MAAAGESINSTVVDFSPKWRNHRDTVLRHRQDFTVLKPPIERSDTLSAHGIWIVDRGIEAVDEKLPWLILDHGS

SEQ ID NO: 59382 - protein, 50 aa, Zea mays
  Coding DNA Sequence Number=SeqID_17603
MDDTAGGRAASGSVSDGASRCGDGRERQRIFYTESNIQLSKALKEKVRKK

SEQ ID NO: 59383 - protein, 51 aa, Zea mays
  Coding DNA Sequence Number=SeqID_17604
MELRPGLPAVKKRILPRVGKLQGIKEITKDVQNKMSVHGSLRNKGGQGQVN

SEQ ID NO: 59384 - protein, 320 aa, Zea mays
  Coding DNA Sequence Number=SeqID_17605
  Homolog annotation: Hit_ID=Q1SSM9; Match level="QueryCoverage=36%, HitCoverage=29%, E-value=4e-60, Identity=88%"; Hit description =Homeodomain-related
  Pfam annotation: Domain name=Myb_DNA-binding; Domain location=14-61; Score=49.8; E_value=9.3e-12; Accession=PF00249.21; Description=Myb -like DNA-binding domain
  Pfam annotation: Domain name=Myb_DNA-binding; Domain location=67-112; Score=50.7; E_value=4.9e-12; Accession=PF00249.21; Description=Myb -like DNA-binding domain
  Pfam module annotation: Pfam domain module=Myb_DNA-binding::Myb_DNA -binding; Domain location=14-61::67-112
MGHHSCCNKQKVRRGLWSPEEDEKLVKYITAHGHGCWSSVPRQAGLQRCGKSCRLRWINYLRPDLKRGSFSQQEEALIVELHRVLGNRWAQIAKHLPGRTDNEVKNFWNSTIKKKLISQAVGSLHPDLYYNILDGGAAGAQDLAAAGCAPLNGADSASAAAAQAVGVTTTQPSPSMAHVDPAAAWAADFGSQTLFLPGGAAALQYAAAVEGEFVKQCRTAADACYPPEPEDGGGGARQCNNQAAADVVTAAVQPEGAGLPVFLEPKCAGSFMPEPALAPVMDFMEAILGSTAAASAASASSLDDTCFSANAGMQSHCWIP

SEQ ID NO: 59385 - protein, 94 aa, Zea mays
  Coding DNA Sequence Number=SeqID_17606
MGLDDRHTDLEGADDGDVSNDEPTEEGEDLQRCNMHHRRNRHRNIRRHHITDEQLLIQSVSHDEESEVGETRKSRSFTDRGTTDKGTVMAPRNG

SEQ ID NO: 59386 - protein, 128 aa, Zea mays
  Coding DNA Sequence Number=SeqID_17607
MVRHGPGPARHAGCHARARLARCLCRAWTARRAYGDSPSTLSKPGRLRPVAPFVNQPTAQAPTLVLSAFRDRGSLSRRVSVPRAPAQMGRARGRARRGESEAAGDGRERGGNPAAFVFVPRPGRVRLQ

SEQ ID NO: 59387 - protein, 521 aa, Zea mays
  Coding DNA Sequence Number=SeqID_17608
  Homolog annotation: Hit_ID=Q7XEI9; Match level="QueryCoverage=47%, HitCoverage=52%, E-value=3e-07, Identity=28%"; Hit description=IQ calmodulin-binding motif family protein, expressed
  Pfam annotation: Domain name=IQ; Domain location=196-216; Score=23.0; E_value=0.0011; Accession=PF00612.17; Description=IQ calmodulin -binding motif
  Pfam annotation: Domain name=IQ; Domain location=218-238; Score=20.6; E_value=0.0055; Accession=PF00612.17; Description=IQ calmodulin -binding motif
  Pfam module annotation: Pfam domain module=IQ::IQ; Domain location =196-216::218-238
MGAVGNAWLLQVKALCRSREWCHGMQAGGLVVVVPFAFLHAARQAAVARASERAARSGGNGQGGALVPQLPGQEGPGNHQRPEAAAGPGSASSGQRQALELRQVVAGLGGSGGGGEAAAAVVSPDAGNAAIARAAEAAWLRSAACAETDRDREQSKHAIAVAAATAAAADAAVAAAQAAVAVVRLTSKGRPPSPVVLAAVRIQTVFRGFLAKKALRALKALVKLQALVRGYLVRRQAAATLQSMQALVRAQAAVRERRAALHHQPVRPRYSLQERYADDTRSEHGVAAYSSRRLSASVESPSYGYDRSPKIVEVDPGRPKSRSSSRRASAPLLDARSSGSGGGEEWCANNPASSPLPCYLPSGPRRIAVPTSRQFPDYDWCVLEKARPATAQSTPRYLQAHAPATPTKSVAGYSPSLNACPNYMSSTQASEAKVRSQSAPKQRPELACCGGGPRKRVPLSEVVVVESSRASLSAVMGMQRGCGPRAQEAFSFRTAVVGRMDRSLEVAGSENDRLAFLQRRW

SEQ ID NO: 59388 - protein, 190 aa, Zea mays
  Coding DNA Sequence Number=SeqID_17609
  Gene Ontology: Mol. function=structural constituent of ribosome; Cellular component=intracellular; Biological process=translation
  Homolog annotation: Hit_ID=Q9FN19; Match level="QueryCoverage=43%, HitCoverage=15%, E-value=1e-15, Identity=52%"; Hit description =Arabidopsis thaliana genomic DNA, chromosome 5, TAC clone:K8K14
  Pfam annotation: Domain name=LisH; Domain location=12-33; Score=11.7; E_value=0.07; Accession=PF08513.1; Description=LisH
MEKKGPQALTATELNAAVYRYLQESAFNFFYEAGIGKGNIQEMLPQGALVRIMQKGLQSIELEANSEIGSDEEHHFFESLDLMTNDLDELTKKITSSVKHSSEQKIDLVETDKAQNIGAAETTTTYKAAQNSKPDGTATMVRTQPVKHTKAKNISSAETMQKTGSVETTTRPGLPVSWKVKKFRLRRRKD

SEQ ID NO: 59389 - protein, 170 aa, Zea mays
  Coding DNA Sequence Number=SeqID_17610
MIMFGSLEFMFLGIKYDMVLLPPAPLEDRGSRHRPSRRRRQRWSSHNRAPWDTLCIEDAAGHDDDIESLSRDLASINISLGVPAPTFLAPPAPTGGSPLPHDIEQGASAAPALRLMGQEEPDAPWRDMGGDRGEPSMFNLIPFQPRFDTGYNAQMYVGLPFPSGCLDSEE

SEQ ID NO: 59390 - protein, 333 aa, Zea mays
  Coding DNA Sequence Number=SeqID_17611
  Gene Ontology: Mol. function=transcription factor activity; Cellular component=nucleus; Biological process=regulation of transcription, DNA-dependent
  Homolog annotation: Hit_ID=Q2QN14; Match level="QueryCoverage=66%, HitCoverage=68%, E-value=5e-21, Identity=65%"; Hit description=AP2 domain containing protein, expressed
  Pfam annotation: Domain name=AP2; Domain location=40-104; Score =129.6; E_value=8.7e-36; Accession=PF00847.10; Description=AP2 domain
  Subcellular localization annotation: CTP_CleavageSite=33; ConfidenceScore=5.01e-01
MALKRKACPSLADDNHCLATANCFAPAAAVGAVAAVQRARKRFVGVRQRPSGRWVAEIKDTIQKIRVWLGTFDTAEEAARAYDEAACLLRGSNTRTNFWPRAAAVPAVAAAMAPPHHQLVAPAAPSALPSKVDDFLSYDSTSDEHGVVVKHEDGVHLLPRDGGRGDEGGGGGGLQGADLGDVDAVEMQPLPTYGSEGAGEPSAAIHEVMKRMKYERKISASLYALSGVSECLRMRVGDGDDHATAAKHELALSGLRDACRSKRQQQEQEQRLEVKDTEGNVVGHEECSSCSNSFSSEATSSSPEAANNPPPQEAKAVDSDMLLWSSLDLPPIY

SEQ ID NO: 59391 - protein, 51 aa, Zea mays
  Coding DNA Sequence Number=SeqID_17612
MVALELRMARWRSEEGGELNLAKSGFHRGSDSGDRRACNRATYQLQIDYSD

SEQ ID NO: 59392 - protein, 121 aa, Zea mays
  Coding DNA Sequence Number=SeqID_17613
MAAAATSSRSLATACVLAALLVGCLLQAAAADARRLLGDDGTTAMPPSSSAMQGDGDDTPVWHADAHTIDEEEVGAAIAAMGSAADMEQSNERLDGLEQQSRLVSLLAGIRSSPSGVERDL

SEQ ID NO: 59393 - protein, 350 aa, Zea mays
  Coding DNA Sequence Number=SeqID_17614
MVAHDVLEKRRRAQAREGFPLESSPSTKEEEDEDDDEGMEARVGFSPETRLSSAPASAGPFGGTTLPSQGPVASLSGARASIEPAPIPAEAEEAEVVEEEVAPLPAEAIIVPVGAPVGSPQRLPAGGNTGEGPVTPPHVVVPGFTAAPAIALPSTRAPRVADEVTTVPPSSLVGQLGPRIRRTRHLFLPISGTKHRADTPIFTATKAVKGGMGTSAGASSHPPSIQEPSQQGAEVAVTVPRAPVEPDTAAAEVAPARPMSPAGAIVVSYEDEAEVALCAATPMVSDLLRDIPDTPKATPSSGAGRAEGANTSEGWWKVPFQPLRSDAIIVEPPIAGVTGDLVRCRPDIRQ

SEQ ID NO: 59394 - protein, 105 aa, Zea mays
  Coding DNA Sequence Number=SeqID_17615
  Subcellular localization annotation: CTP_CleavageSite=9; ConfidenceScore=5.04e-01
MPPCTVVPSQATTKPRALTTPNATPFLVAWSLCVHVMVPWMTPVPDAYYAWYRRWASEGIDPNHNFDGDDYLRKAKQMEATSGQKPSGIEVFMVGHKGPDSSNHE

SEQ ID NO: 59395 - protein, 86 aa, Zea mays
  Coding DNA Sequence Number=SeqID_17616
  Gene Ontology: Mol. function=structural constituent of ribosome; Cellular component=ribonucleoprotein complex; Biological process =translation
  Homolog annotation: Hit_ID=Q8W1X6; Match level="QueryCoverage=86%, HitCoverage=44%, E-value=5e-21, Identity=72%"; Hit description =HUELLENLOS-like protein
MAGSPLVRFIEAFGTAFSRTTFCVPISEQIRTFIQMRTNLKVVDNSGAKRVMCIQSLRGKKGARLRDMIIGSVKEAQHITLYKSTT

SEQ ID NO: 59396 - protein, 590 aa, Zea mays
  Coding DNA Sequence Number=SeqID_17617
  Gene Ontology: Mol. function=protein serine/threonine kinase activity; Biological process=protein amino acid phosphorylation
  Homolog annotation: Hit_ID=Q2QMH1; Match level="QueryCoverage=76%, HitCoverage=82%, E-value=1e-169, Identity=67%"; Hit description=LSTK- 1-like kinase, putative, expressed
  Pfam annotation: Domain name=Pkinase; Domain location=139-384; Score =176.9; E_value=5.1e-50; Accession=PF00069.15; Description=Protein kinase domain
  Pfam annotation: Domain name=Pkinase_Tyr; Domain location=139-360; Score=2.0; E_value=1.4e-12; Accession=PF07714.7; Description=Protein tyrosine kinase
  Pfam module annotation: Pfam domain module=Pkinase::Pkinase_Tyr; Domain location=139-384::139-360
  Subcellular localization annotation: CTP_CleavageSite=88; ConfidenceScore=5.69e-01
MPRDLRAVTPSPPAGAALRAPGPRNASSRISRGGSGGARSLLQLASGPELLASGSTASVPGSGNRNATLPRSPSSGLGVCVFGAGDSRSANKRKEKLLGFGDHTFRTFLDAAHWSWHFGFSQSLPLSAYSSNPERMDQYEVLEQIGKGAFGSALLVRHKAEKKKYVLKKIRLARQTDRTRRSAHQEMQLIATVRNPFIVEYKDSWVEKGCYVCIVIGYCEGGDMAEAIKKVNGNHFSEEKLCKWLVQLLMALDYLHANHILHRDVKCSNIFIARDQSIRLGDFGLAKILTSDDLASSVVGTPSYMCPELLADIPYGTKSDIWSLGCCIYEMAALRPAFKAFAAELLKHPHLQPYVLQVQLKSSPSRTTSPIYQALTDKVKKMTFVSDTADSARRRAARRSSLGSERTVTFCKPSPERNSVSSTRSIKEYTTTTQSARELSVGSSLQVDDEVTSKAVVTKTAGVLRTPSKSRAPASKTLVAARSRLDPPKTSYARTNRAELDSRTPLSKSSARTARRASLPLAAYRAPSGGRAGSFLEQLDSPDVSVNAPRIDRIAEFPLASSEEPLGAHETRSCPAPRLPSAPGSITKGQ

SEQ ID NO: 59397 - protein, 59 aa, Zea mays
  Coding DNA Sequence Number=SeqID_17618
MTAITSPFLLIVLTDDNTIYPVQTTVPTTGVRLTTGGRRIKGFGLGVGNARGTQQLHEE

SEQ ID NO: 59398 - protein, 64 aa, Zea mays
  Coding DNA Sequence Number=SeqID_17619
MAQRVFFFAKNPRTRPWERSRRGGEFQCVLPDRQATRGAQIVEALGPDRSTTSGVQQKAYVGYE

SEQ ID NO: 59399 - protein, 121 aa, Zea mays
  Coding DNA Sequence Number=SeqID_17620
MQRRAAPAAVSRTARAATGRTSRRPDDLLQTYWDLTEPNLRSFSSRGGPMVRCYNDILRLAFESLSASDQQKFEDYKKKLEKEVERWYLSHFGMDRHQKVVQVREIEHVSQTNIGYSPCYE

SEQ ID NO: 59400 - protein, 413 aa, Zea mays
  Coding DNA Sequence Number=SeqID_17621
  Gene Ontology: Mol. function=binding; Cellular component=thylakoid; Biological process=photosynthesis
  Homolog annotation: Hit_ID=Q2QMH0; Match level="QueryCoverage=95%, HitCoverage=95%, E-value=1e-134, Identity=85%"; Hit description =Tetratricopeptide repeat protein, putative, expressed
  Pfam annotation: Domain name=TPR_1; Domain location=137-170; Score =5.2; E_value=1.3; Accession=PF00515.18; Description=Tetratricopeptide repeat
  Pfam annotation: Domain name=TPR_1; Domain location=14-47; Score =28.7; E_value=2.1e-05; Accession=PF00515.18; Description =Tetratricopeptide repeat
  Pfam annotation: Domain name=TPR_1; Domain location=171-204; Score =32.9; E_value=1.1e-06; Accession=PF00515.18; Description =Tetratricopeptide repeat
  Pfam annotation: Domain name=TPR_2; Domain location=137-170; Score =6.3; E_value=6.1; Accession=PF07719.7; Description=Tetratricopeptide repeat
  Pfam annotation: Domain name=TPR_2; Domain location=14-47; Score =27.1; E_value=6.1e-05; Accession=PF07719.7; Description =Tetratricopeptide repeat
  Pfam annotation: Domain name=TPR_2; Domain location=171-204; Score =29.4; E_value=1.3e-05; Accession=PF07719.7; Description =Tetratricopeptide repeat
  Pfam module annotation: Pfam domain module=TPR_1::TPR_1::TPR_1::TPR _2::TPR_2::TPR_2; Domain location=137-170::14-47::171-204::137 -170::14-47::171-204
MADGGGEGGPPAASAALKDQGNEQFKAGSYLKAAALYTQAIKLDPDNATLYRFLPAPPLLFFLRRAGGKNPSCACAHPAFGEAMDSCGLALWELPAVCFTFILEMFLWHPLVTSGGGPNMAGQPNTISTKVNTYDDLRTRRNRAAAFLQLVKLSKALADAETTVRLKPQWEKGHFRKGCVLEAMERYEEAIAAFQIALQHNSQNTEVSRKIKRLSQLAREKKRALDVENMRSNVDIAKNLESLKTELATKYGDAETGQSVFSFIVNVVESAVKVWHDTGKVDPRVHFLLDDQKTDTEKYAPVVNIDKAFESPNTHAECFTYLRQYAENCSAKAACMVAPKSIISYPQVWKGQGSRKWKLDQSDGFFVQFEAPALRKIWFVPSTKEKGRTLCRSPEALDIGIHEVLPRIFKEAA

SEQ ID NO: 59401 - protein, 142 aa, Zea mays
  Coding DNA Sequence Number=SeqID_17622
  Subcellular localization annotation: CTP_CleavageSite=37; ConfidenceScore=5.10e-01
MARVLISPASFFLPRRAPVLVAVDSSPPLPALFLGAPAALGRAGAGEVRPCGLLLGGWTLAQCRGPAACSWALGGRTDGGAVSWPVVVAASPVPRCVRAPWRLLLLRLGADGARCAGAGPYGPVPLPTPCSSRCWAATGAAA

SEQ ID NO: 59402 - protein, 62 aa, Zea mays
  Coding DNA Sequence Number=SeqID_17623
  Homolog annotation: Hit_ID=Q6QP51; Match level="QueryCoverage=74%, HitCoverage=21%, E-value=3e-14, Identity=80%"; Hit description =Putative growth-regulating factor 1
MARSVRAQGRARRRLLLRSRPGSGEDMIPPEAKVEAEPWGRARRRPPSEAEVEAEPWGQVGQ

SEQ ID NO: 59403 - protein, 139 aa, Zea mays
  Coding DNA Sequence Number=SeqID_17624
MGKGKRGQGSPHRVGDKRKRDPSPPSEDFGDSEYSEEEVWTYIRSVERVRLEGSDESEVSSDEEDSFGLSVEQSCDDSDDEGSGGGGDRDDDDGGGGDNVSGRGGEGDGGGGRGGEGDDGGNVGSGSGGGKASGKAPLV

SEQ ID NO: 59404 - protein, 129 aa, Zea mays
  Coding DNA Sequence Number=SeqID_17625
MNGQREQEVHDGSREVGTQGRTAAEQELELHRRAERKAARAGEMSAERTQVDVELARRPEGRARRQSRSAERERAGRRGTRAGARSDGQRWSEQRELGRRRPHTKDKQPAREKYQARGVGEEEVLPRLK

SEQ ID NO: 59405 - protein, 36 aa, Zea mays
  Coding DNA Sequence Number=SeqID_17626
MGRSGTLVDRARKASQIDPKRGLLRIVKLIDESKDR

SEQ ID NO: 59406 - protein, 63 aa, Zea mays
  Coding DNA Sequence Number=SeqID_17627
MVDSDRSYSEQQCHAEVRAAKSEGTGLSGAARGQSSKVARAPNPNGWVTWQRTRQHKVPVRVK

SEQ ID NO: 59407 - protein, 111 aa, Zea mays
  Coding DNA Sequence Number=SeqID_17628
MTVDNYLLDMGMVEFGIRKYGYGYNKVSTDNFFAVLNAKIVVGGRVTGIHRIADTRWMDSMVLSWLNDTITVEIQDIVRDQVDTARKAWGLGAPPRCSVPPVRLGASLVGE

SEQ ID NO: 59408 - protein, 226 aa, Zea mays
  Coding DNA Sequence Number=SeqID_17629
  Homolog annotation: Hit_ID=Q84QW1; Match level="QueryCoverage=48%, HitCoverage=35%, E-value=4e-10, Identity=34%"; Hit description=BHLH transcription factor(GBOF-1)-like
MVYCRRVHLPVGITVLENNRLKIAISSLKGSEVSGVTKNPGITFSMLRKSNRLICVRQSDMVQGEGNDENDSAAAHPTVSLLASSIITRLHYAARVHGARNAAVQLQGHRFAGLFGLPPSVPIANCAEFVHSQGSRDLYAKVGDQMYLGAKRCKAEGGEGNLNRKPTLEQTDSDSFDENDGQNQKPLGKGKNMTPAETPQGLCHVHDRRGQATDSTNHFYVMLCTT

SEQ ID NO: 59409 - protein, 40 aa, Zea mays
  Coding DNA Sequence Number=SeqID_17630
MGSSHGTVPRADKDASATALTAGDRFPPRFVPPPVQLELG

SEQ ID NO: 59410 - protein, 104 aa, Zea mays
  Coding DNA Sequence Number=SeqID_17631
MGLGRTAQDVRVTASGLLGAAPTVLVWGRAQLRWPGAVQGRASGLGGCAPGSTGLGGKGREEREARWGRFAREETDGEKTKSGGGGLEEPGEGATGLLGPLVGP

SEQ ID NO: 59411 - protein, 67 aa, Zea mays
  Coding DNA Sequence Number=SeqID_17632
MGQSLLLRTRHLCLWWMAPAVSLVFNTPPTKKPCDRRVAPHVELAGAGNWRPLCDGGMRRVSSGFLG

SEQ ID NO: 59412 - protein, 56 aa, Zea mays
  Coding DNA Sequence Number=SeqID_17633
  Subcellular localization annotation: CTP_CleavageSite=42; ConfidenceScore=5.40e-01
MAKIFSPKSLSARSPSTNRSAGEDRGTGSSAGTVPWRSPSVCLTERFEERFSPIFM

SEQ ID NO: 59413 - protein, 357 aa, Zea mays
  Coding DNA Sequence Number=SeqID_17634
  Gene Ontology: Mol. function=rRNA N-glycosylase activity; Biological process=negative regulation of protein biosynthetic process
  Homolog annotation: Hit_ID=Q00531; Match level="QueryCoverage=79%, HitCoverage=51%, E-value=1e-69, Identity=53%"; Hit description=60 kDa jasmonate-induced protein
  Pfam annotation: Domain name=RIP; Domain location=48-322; Score =166.2; E_value=8.1e-47; Accession=PF00161.9; Description=Ribosome inactivating protein
MEQKMSNHRQATRPRGSRRETAEAGDRRLGKTLARRSSRPAMALEKIASIVQVTPFNVTSDSYATFIQNVRVALAGAKPDTVVGPKSKVSRPVLAKEASSSGLQPPKWIHVVLNGKGGAAPTVAIRSDNAYIVGFTNSKGTWYQLSRTGAQEKLVDDNPVMAGFDGNYNTLIGGSDKLLTLNVAKFSVAAAAATFWNHKAGNTSYGDDCGSDEEEESGMLRAGDPLKVAVATLAVAICEAARFVPVSTVIGKGWGEQRVSVTAKEVSYIMDWGDLSRALLKWKSGGYKDDKPFQPFKGIGINNGEEALAVVALLKLMSGSQSLLAWLKCFWGLLVKKLKREDMNYEKPKTAAIVNPL

SEQ ID NO: 59414 - protein, 92 aa, Zea mays
  Coding DNA Sequence Number=SeqID_17635
MTCEFCRGVTHASISLTVSLSDVVGMRLRCYPWSGVVCWAAMPINGARSHGEALAVLQVGDAHPAAGLGIRRSFWPDRATGWSTASTSWSGS

SEQ ID NO: 59415 - protein, 112 aa, Zea mays
  Coding DNA Sequence Number=SeqID_17636
SLPKGIAGIDLKYLTCRKAPRNVDDLTQIIEKEYEDYKPSTQRRLPLHLYLPRVDLVLLIEISQQSTSSWLGEILANVGSDSLLDELLSFDDSSMTTNGDLGQIEMGIWLLC

SEQ ID NO: 59416 - protein, 171 aa, Zea mays
  Coding DNA Sequence Number=SeqID_17637
  Homolog annotation: Hit_ID=Q10QK0; Match level="QueryCoverage=46%, HitCoverage=15%, E-value=9e-15, Identity=53%"; Hit description =Expressed protein
MPQLLNAADAKERTLIGTLQKFIKEQKLEELPIFEEANKRMAHLDQQSAERKRTAAAAAAAARKVSKNIEEQQKRIQELMQPAKRPRSENVGKDLRARTPITLPPGPGALNGPSAQASSRSRLYSGDPLAAVSRSSDKKGSSYKYSLSTVFNRIIRHADCTLIVTKEWDFA

SEQ ID NO: 59417 - protein, 67 aa, Zea mays
  Coding DNA Sequence Number=SeqID_17638
MARVACTLRGKRLDGGVSVLSVKKQQTFVASIPRWYQKKKIKTKAAGGKTGETLLGKVRNSDTELVK

SEQ ID NO: 59418 - protein, 79 aa, Zea mays
  Coding DNA Sequence Number=SeqID_17639
  Subcellular localization annotation: CTP_CleavageSite=39; ConfidenceScore=5.51e-01
MDFPLYSNLKKIAGSVYLTAGNPTPRSSPALRFTPSNARIMTLGEKISPWMKSEHCGRSVASSTCATTWPRGRRGDDHR

SEQ ID NO: 59419 - protein, 83 aa, Zea mays
  Coding DNA Sequence Number=SeqID_17640
MMLHVGREFSKKRIDGGSIMAVMGSTSKKMYLCQTNPRKANTQWEWRDGESSVYPPWQEAGRWCIYALGWREPGLILRNSVAS

SEQ ID NO: 59420 - protein, 140 aa, Zea mays
  Coding DNA Sequence Number=SeqID_17641
  Homolog annotation: Hit_ID=Q6QP51; Match level="QueryCoverage=96%, HitCoverage=57%, E-value=1e-12, Identity=45%"; Hit description =Putative growth-regulating factor 1
MMYPPCNVVGLSPRSGEAVTPLRSRLRPALGSGEAETVFQGRGGGRALGSGEAETVCRGRGGGRALGSGEAETVFRGRGGGRAPRSGEADLPMAHEAGLGCCQPHPGGWHSSRSRAGGAVFLLGQSVEGRSDCGHFGSAD

SEQ ID NO: 59421 - protein, 43 aa, Zea mays
  Coding DNA Sequence Number=SeqID_17642
MASGGANIEGNSGEEFPELQSLIQPALQLRTFLTTWFSNLIQI

SEQ ID NO: 59422 - protein, 370 aa, Zea mays
  Coding DNA Sequence Number=SeqID_17643
  Gene Ontology: Mol. function=hydrolase activity, acting on ester bonds; Cellular component=cellular_component; Biological process =lipid metabolic process
  Homolog annotation: Hit_ID=Q5Z739; Match level="QueryCoverage=92%, HitCoverage=86%, E-value=2e-77, Identity=42%"; Hit description =Putative lipase
  Pfam annotation: Domain name=Lipase_GDSL; Domain location=32-359; Score=152.4; E_value=1.2e-42; Accession=PF00657.12; Description=GDSL- like LipaseAcylhydrolase
  Subcellular localization annotation: CTP_CleavageSite=21; ConfidenceScore=5.06e-01
MTGHASLLLPALAAVLLCCPLAQCGQQNYTSMFSFGDSLTDTGNLLVSSPLLQPHRRPLPLRHHLLPPLHRPLLRRPPRRRLPRCVSQAFGLPLLQPYLQSRGKDLRRGVNFAVGGATAMDPPFFQEIGASDKLWTNLSLSVQLGWFEQLKPSLCSSPKECKEYFSKSLFLVGEIGGNDYNYAFFKGKTLDDAKTYVPTVAAAVTDATERLIKAGATHLVVPGNLPMGCSSAYLTLHPGRNGSDYDAAGCLRTYNDFAQHHNAVLQRKLRALRAKYPQARIMYADYYGAAMSFAKNPKQFGFTQGPLRTCCGGGGPYNFNPKASCGVRGSSVCADPSAYANWDGVHLTEAAYHAIADSILNGPYTSPRLL

SEQ ID NO: 59423 - protein, 35 aa, Zea mays
  Coding DNA Sequence Number=SeqID_17644
MAGKKLWTGRQISGRPGALAQKILRHRRHSRWTAG

SEQ ID NO: 59424 - protein, 145 aa, Zea mays
  Coding DNA Sequence Number=SeqID_17645
  Homolog annotation: Hit_ID=O76450; Match level="QueryCoverage=80%, HitCoverage=28%, E-value=9e-07, Identity=34%"; Hit description =Spicule matrix protein precursor
  Subcellular localization annotation: CTP_CleavageSite=62; ConfidenceScore=5.50e-01
MAPRAHFPFSPVPTALSRRAGRHRPDVPRPAAQSGGHRPEPATAPTSRGRGVVRRPPPQRPEAAAQSGGHRPDVPRPRRGPEANTPPSRARHRPDVPRPRRGPEANAPPSRARHRPAVLSPLLHRCPSLRPSSLPRPSTPTPLPR

SEQ ID NO: 59425 - protein, 87 aa, Zea mays
  Coding DNA Sequence Number=SeqID_17646
MAWNFVARRHRGHDSVLVARLEVAEVGGLTRGTGVRSGRASGVLAGLCSAALGSVERDVRGKGSQGGGDQGGAREVAARDLRRNVIQ

SEQ ID NO: 59426 - protein, 106 aa, Zea mays
  Coding DNA Sequence Number=SeqID_17647
MWLLLNHLLFSCGEVFFSMFGLGAKSTEKQGLWRKCSARNRDRTEQRNADASRTRPAAQEIPNSCAHPLSFSRSALVNTDHGGVNTGINNPWTRNGERCAGRSGAA

SEQ ID NO: 59427 - protein, 126 aa, Zea mays
  Coding DNA Sequence Number=SeqID_17648
MDDVVAGAAQNGDDVDTLGLRRSDRTRDVEIAGLLLLKSETTTSRREQIQHRPAETAQRPAQQGRRRWLDNGNVQGGLMEQRCRGVEAAGDVWGKTIETVSPLKSEWRRTTSKRPYIERRYVTSKI

SEQ ID NO: 59428 - protein, 75 aa, Zea mays
  Coding DNA Sequence Number=SeqID_17649
  Subcellular localization annotation: CTP_CleavageSite=61; ConfidenceScore=5.30e-01
MAAPTSAQIPATTKAPDPYSNPLPSNLPFLPLADTPRPPSLVHCLFASSEDCHRSPNSHIRSVTAVEALPCPLPR

SEQ ID NO: 59429 - protein, 65 aa, Zea mays
  Coding DNA Sequence Number=SeqID_17650
MENHPKKQCYHKGGPPSKNTFGSMICELTQHEGTSRSYNPESFGIMTRLETKGGTDLKRKRPFSP

SEQ ID NO: 59430 - protein, 70 aa, Zea mays
  Coding DNA Sequence Number=SeqID_17651
MAEVAQQRRPVQSSVGAGLRARLLGQWGFRDFEQGDDVGEGAVALGRGRRHGRVQDGEERSGGSDLRART

SEQ ID NO: 59431 - protein, 80 aa, Zea mays
  Coding DNA Sequence Number=SeqID_17652
MGPPFLTVIVIVAFLATTAQAADPFAFFDWVVSYITASPLGVPQQVRTLNYASHFSSPCAQLQYSFVSLPAAPKLFSIRI

SEQ ID NO: 59432 - protein, 166 aa, Zea mays
  Coding DNA Sequence Number=SeqID_17653
MSGDHAKREIVISDKPAGSGKTLSRESGNKYKEESSSSIKSHRRGDKKKKKMMKVVYYETDSSTPSTSGIESSTTSKRHEHKKYRSYSAVQPGGRVDGQVTPGTMSSKQHGSSSLISCEKQTIRIGFLTLQVTALVPTISGMGDHVSGRMRRAACEQVHSGEFELP

SEQ ID NO: 59433 - protein, 152 aa, Zea mays
  Coding DNA Sequence Number=SeqID_17654
  Homolog annotation: Hit_ID=Q6EP94; Match level="QueryCoverage=24%, HitCoverage=5%, E-value=1e-08, Identity=81%"; Hit description =Dehydration-responsive family protein-like
MDRILLEMDRILRPRGTVIIREDVDLLVKVKSLANGISRRTVKWVGARRDTKGGEQRGETAAFVLSCAQGGWGNDGPPGDVAGPNPSLGEVATPPRSLSPSPGVGRGGVRRLPELRPSSSPGSGEAEFVVFWSRGRVQALGSGEAEFVIFRS

SEQ ID NO: 59434 - protein, 219 aa, Zea mays
  Coding DNA Sequence Number=SeqID_17655
  Gene Ontology: Mol. function=protein serine/threonine kinase activity; Cellular component=cellular_component; Biological process =protein amino acid phosphorylation
  Homolog annotation: Hit_ID=Q7XJ79; Match level="QueryCoverage=66%, HitCoverage=93%, E-value=3e-55, Identity=71%"; Hit description=High light protein
  Pfam annotation: Domain name=Jacalin; Domain location=35-170; Score =49.6; E_value=1.1e-11; Accession=PF01419.7; Description=Jacalin-like lectin domain
MHIRPELQLYYFRSLQGSVVLGSAVKIGTWGGDGGSPCDITVAPRRLESITIRWGKVLDWIAFSYRDQSGELHTAGPWGGNGKGEGTETITLEASEYVTGVAWSVGPFKFKNVERCITSFKVVTNLRSYGPFGHGVDSTHHSLPVLDGSVVGMFARAGDFLDAIGFYVLPDALPALKPTTDPAEQEEKEKDSGHQQNGKAKSNQEENEDSKNEKDKPLS

SEQ ID NO: 59435 - protein, 357 aa, Zea mays
  Coding DNA Sequence Number=SeqID_17656
  Homolog annotation: Hit_ID=Q1XG53; Match level="QueryCoverage=38%, HitCoverage=54%, E-value=2e-19, Identity=37%"; Hit description =Putative zinc-binding protein
  Pfam annotation: Domain name=PLATZ; Domain location=162-276; Score =79.9; E_value=7.7e-21; Accession=PF04640.4; Description=PLATZ transcription factor
MDLGAKRPDSPPDSPGSASSHCIVSTWMENRLYGRVVRKRVIPAVPLHIPHTAGDKQIGPNKNRIRVCAFIERKGKEIVVEVSAVVEEEEKQQQQQRKGKEVALEEVPLPAVAESYDDSDLDSGSGWDFYEEEYSEKKEQERKEKKPAWLDTLLRTKFWDPCKEHGSKNRADQCMFCLRCSKLSCPRCVHDQPGHRLLKIRRYVYRSVVHASDMQELGIDVSRIQTYVINARKVLHLRPMNRSKHFRPQAGTPRCITCRTWLRSAPNLFCSLTCEEDVDVSQDDFSGPEAELRYRSFQVHMAEPAEELLPDDPEVEHEIMPAQVEPPPLAAAAAANQNVSLRRRARKQAAPLRAPFF

SEQ ID NO: 59436 - protein, 211 aa, Zea mays
  Coding DNA Sequence Number=SeqID_17657
  Subcellular localization annotation: CTP_CleavageSite=73; ConfidenceScore=5.27e-01
MEKKRAGRMAPMASASKKPLNPKQARTKRDAAGYFSRKARHQQGGGAGVPYCRQSRAARKATACRGSTSPACRVAAGSENRAKKFGMTSPTPSIDHDQVRAERIVPTCYRRHRPARSDTTRRRSISHGERRRHFARSRTADQRPRTHPRRTAGAEEERARAPPLHYLPLRERGEEGGTSNPKERREQSPPRKRNAVNANQMDGVNGGGMDG

SEQ ID NO: 59437 - protein, 75 aa, Zea mays
  Coding DNA Sequence Number=SeqID_17658
MAVGEAVCRWAHQTIPVRYRDSPVRHPDTVRRALFTVAFADNHWRNSRCSAWHTGQSGGPLDSLVNYSGVAFPET

SEQ ID NO: 59438 - protein, 141 aa, Zea mays
  Coding DNA Sequence Number=SeqID_17659
  Gene Ontology: Mol. function=DNA binding
MWAQEHDGLLALGPDLRPEIPYYARTVGGSAWAPRRRDDRGLGLAKPECPMLSRRSTSSRHYFMDPGEAVELGGWHNNSLAIDKAPGVALDALDAYAGVCCRVERTAAAPGIGRLEARSVEEAASSSTGKSSGMKSWCSMV

SEQ ID NO: 59439 - protein, 67 aa, Zea mays
  Coding DNA Sequence Number=SeqID_17660
  Gene Ontology: Mol. function=glyceraldehyde-3-phosphate dehydrogenase (phosphorylating) activity; Biological process=glucose metabolic process
  Homolog annotation: Hit_ID=Q655W2; Match level="QueryCoverage=85%, HitCoverage=13%, E-value=5e-09, Identity=60%"; Hit description =Putative glyceraldehyde-3-phosphate dehydrogenase
  Subcellular localization annotation: CTP_CleavageSite=22; ConfidenceScore=5.11e-01
MPVSCVRSTGSAHFGCAFPYVRASSSAARNLEPLRAIATQAPPTVPQYSSGEKTKIGINGEFFYIQL

SEQ ID NO: 59440 - protein, 386 aa, Zea mays
  Coding DNA Sequence Number=SeqID_17661
  Gene Ontology: Mol. function=hydrolase activity, acting on ester bonds; Cellular component=cellulose and pectin-containing cell wall; Biological process=lipid metabolic process
  Homolog annotation: Hit_ID=Q672R1; Match level="QueryCoverage=87%, HitCoverage=87%, E-value=1e-98, Identity=54%"; Hit description =Lipase 1
  Pfam annotation: Domain name=Lipase_GDSL; Domain location=50-381; Score=149.5; E_value=9.1e-42; Accession=PF00657.12; Description=GDSL- like LipaseAcylhydrolase
  Subcellular localization annotation: CTP_CleavageSite=26; ConfidenceScore=5.45e-01
MRRKQLLPPWLLVVLFLSWSSAAPVPASSTTTTTTTLPGQMRRRRYYDSIFSLGDSYADTGNGPVVFGWHALASPVMRPPYGSTFFGRPTGRNCDGRLVIDFLAESLGLPLVPPFLQAQARHGTGSFRRGANFAVGGATALDASFFHRWDPPGGSVFPLNASLGVQLQWFQSLKRSLCATPKGMLLRRSLFFVGAFGANDYLLAMAATSLEQVGSLVPAVVRTISAAVERLIVEHGAATVVVPGVIPVGCAPPVLATFADPDPAGYDPRTGCLRSINEVATRHNALLQDGLRELRARHAAATVVYADFFGPVIDMVTSPAKFGFDEDVLTLCCGGPGRFNYNRHVFCGDPGASECKDPSARLFWDGVHLTEAAYRYVAAGWLSAIT

SEQ ID NO: 59441 - protein, 208 aa, Zea mays
  Coding DNA Sequence Number=SeqID_17662
MPLPPLLLCVCLYLTHLPRLASSEPDADKAALLAFLAGVGRGATARARINWPTTPLACASPRPRPRLDGVYYSTTRSATPGSSAHITWEFNADRAAVTPPVQQVQQRSFRCSTSTHQIHPRERPRQAAMPLPLPLPPLLLCVCVCVCLCLYLTHLPRLASSEPDADKAALLAFLAGVGRGATARARINWPTTPLACAGPGPGWTGVTC

SEQ ID NO: 59442 - protein, 97 aa, Zea mays
  Coding DNA Sequence Number=SeqID_17663
  Subcellular localization annotation: CTP_CleavageSite=25; ConfidenceScore=5.21e-01
MAQSTVGSLRAVGALDMSGAHRTVRCPLLAVGSTTCPAQIARPTVGPADRWLTGQSGAHRTVRALVLDTKSPKYLEMAQGHISLSISPFLVIYANTT

SEQ ID NO: 59443 - protein, 294 aa, Zea mays
  Coding DNA Sequence Number=SeqID_17664
  Gene Ontology: Mol. function=oxidoreductase activity, acting on the CH-CH group of donors; Cellular component=mitochondrion; Biological process=electron transport
  Homolog annotation: Hit_ID=Q75IM9; Match level="QueryCoverage=94%, HitCoverage=63%, E-value=1e-129, Identity=84%"; Hit description =Putative isovaleryl-CoA dehydrogenase
  Pfam annotation: Domain name=Acyl-CoA_dh_1; Domain location=150-293; Score=187.2; E_value=3.9e-53; Accession=PF00441.14; Description=Acyl- CoA dehydrogenase, C-terminal doma
  Pfam annotation: Domain name=Acyl-CoA_dh_2; Domain location=165-288; Score=48.5; E_value=2.3e-11; Accession=PF08028.2; Description=Acyl -CoA dehydrogenase, C-terminal doma
  Pfam annotation: Domain name=Acyl-CoA_dh_M; Domain location=25-76; Score=94.9; E_value=2.5e-25; Accession=PF02770.9; Description=Acyl -CoA dehydrogenase, middle domain
  Pfam module annotation: Pfam domain module=Acyl-CoA_dh_1::Acyl-CoA_dh_ 2::Acyl-CoA_dh_M; Domain location=150-293::165-288::25-76
MTGYIHAFFIFAFSPKLISGEHIGALAMSEPNSGSDVVSMKCKAEKVDGGYVLNGNKMWCTNGPSAQTLVVYAKTDLAAGSKGITAFIIEKGMPGYRTTPLSSLDMIEPERVQYCSEVGQTWHERKRHVWCELVFENCFVPCENVLGEEGKGVYVMMSGLDLERLVLAAGPIGLMQACLDVVLPYVRQREQFGRPIGEFQFIQGKMADMYTSLQSSRSFVYSVARDCDNGKVDRKDCAGVILFAAENATQVALQAIQCLGGNGYINEYPTGRLLRDAKLFEIGAGTSEVRACLE

SEQ ID NO: 59444 - protein, 45 aa, Zea mays
  Coding DNA Sequence Number=SeqID_17665
MTERTPRVSDVCERLSAGVRVPPYSGFEFEFNYEYKFCAQTKGRS

SEQ ID NO: 59445 - protein, 47 aa, Zea mays
  Coding DNA Sequence Number=SeqID_17666
MQVRLRKMTSGSHQPARSFPQPRPAHKNVETANWAGADFLVSNVIQS

SEQ ID NO: 59446 - protein, 75 aa, Zea mays
  Coding DNA Sequence Number=SeqID_17667
  Subcellular localization annotation: CTP_CleavageSite=49; ConfidenceScore=5.30e-01
MKPAHAITPYRREGTNWVNRSSVFYNSLGNRKNKSASLSRLTLRTQRVCISELAAKKLESSSITWIHIALVVFSV

SEQ ID NO: 59447 - protein, 113 aa, Zea mays
  Coding DNA Sequence Number=SeqID_17668
MPHSADAIAILASVRVDPKLDLASAQFPVKPLLPYSPHPLLRVAPPTLRPCALGLDFALSGEVRCSATMVCCVARSEVEEQGWPLDGDWAAQNRSSGCQIVIDMSLRIRIWWL

SEQ ID NO: 59448 - protein, 188 aa, Zea mays
  Coding DNA Sequence Number=SeqID_17669
  Homolog annotation: Hit_ID=Q8LRM6; Match level="QueryCoverage=24%, HitCoverage=12%, E-value=5e-07, Identity=63%"; Hit description=Beta -1,3 glucan synthase
  Subcellular localization annotation: CTP_CleavageSite=46; ConfidenceScore=5.16e-01
MPPPHESSLSHRLASRYCADASPPKSIRLASRYMRPRPDGPLRAILACKPSRFQRRRRDARTRAPPPLGVPRFHPPRRPRPRLPQPCNARLSLRLDRGHTAAAPALLAMATLSSSLCSSFASLQSAFFGHPSHHHVIYAPVTVPTVYVFLYGRLCMVMSALEKSIILDLRNQQNVKALENALASRSIC

SEQ ID NO: 59449 - protein, 73 aa, Zea mays
  Coding DNA Sequence Number=SeqID_17670
  Subcellular localization annotation: CTP_CleavageSite=23; ConfidenceScore=5.15e-01
MAALIPTIASMGDSVSGPMKGKVCGQVQSGLAFKCGCGGRFFGDELRSWFPGFFLLYLLLLDQGVLSVREIAI

SEQ ID NO: 59450 - protein, 100 aa, Zea mays
  Coding DNA Sequence Number=SeqID_17671
MDPKSKGIVINYKEKEILNVDEPKGDNITDLGSNNKRKDGKKKRHIKKIIYYDSDASSSSPRDDDDEDSSSKKKTEHEKKGKKEKKNYRKVKGEAHIGKE

SEQ ID NO: 59451 - protein, 83 aa, Zea mays
  Coding DNA Sequence Number=SeqID_17672
MDRPEHSPPTSSPACACGPADCGHHGRQAVPRHDRQDFPEPTPRFARPPSPPSNQFCQVLNNVNYLEKIQNLLSVAEDFKVLN

SEQ ID NO: 59452 - protein, 206 aa, Zea mays
  Coding DNA Sequence Number=SeqID_17673
  Gene Ontology: Mol. function=oxidoreductase activity; Cellular component=vacuole; Biological process=response to oxidative stress
  Homolog annotation: Hit_ID=Q9FP11; Match level="QueryCoverage=89%, HitCoverage=49%, E-value=7e-49, Identity=58%"; Hit description =Putative Peroxidase 49
  Pfam annotation: Domain name=peroxidase; Domain location=1-198; Score= -60.9; E_value=0.00019; Accession=PF00141.13; Description=Peroxidase
MSSFLVVLVDKIKEKLEAECPGAVSPVQTCWPLQLAMRLSWMSRLDSRKASLDLANSDIPTAQQVLLTLLAKFWEKGLDATDMVALVDIYASHLPIPLPKPPVYTHNIATITYVASHTIGFARCDNFRDRIYGVFEMTTSKYSPSSKAYLDRLKEVCPREGDDDDNVSAMDSHTSAVFDNTYFKTIVKGEGLRPWLRPGHVCQHSS

SEQ ID NO: 59453 - protein, 362 aa, Zea mays
  Coding DNA Sequence Number=SeqID_17674
  Homolog annotation: Hit_ID=Q94EG1; Match level="QueryCoverage=22%, HitCoverage=20%, E-value=6e-29, Identity=80%"; Hit description =Putative aspartate aminotransferase
MGSFVKLARRAVETDAPVMVKIQELLPGAMDVMSLAQGVVYWQPPESAMAKVEKIIREPTLSKYGSDDGLPELREALLEKPSDRKHMESVGEEMEQRRRELRLFANTAASCPSSTCVASCCGEERIMFTLCDFEAFKALTSNYLGLKDHKLYSQVEEGFHTVAARISPAGLGEIMLANRASPSRASPQLDHQAPAYLELMPAIINASEVQMSNSDGLTLVRQFNSYRQRGLPTITATYPAVIDSGVENSISPKRHHGASVRQNTRTSSFSIPPHGGALEANGDAKDNAMKDFMRFYNSVRFVVHSSVQLVPLKCTVGCASTAAPTELVSTLSPPRKLRRAVKKITPKEKIQAMYNCNLVPEI

SEQ ID NO: 59454 - protein, 51 aa, Zea mays
  Coding DNA Sequence Number=SeqID_17675
MGLKIESTECTFTSLTHIRKKTLKDMLAFGNQGVTKALTPYLHSWHVISCD

SEQ ID NO: 59455 - protein, 53 aa, Zea mays
  Coding DNA Sequence Number=SeqID_17676
MADQRPKRHPVRELQMNGCYPSRKELGHAVMRPCGQIQRRRAIPGSPAIDFAD

SEQ ID NO: 59456 - protein, 51 aa, Zea mays
  Coding DNA Sequence Number=SeqID_17677
  Gene Ontology: Mol. function=oxidoreductase activity; Biological process=response to oxidative stress
  Homolog annotation: Hit_ID=Q9FP11; Match level="QueryCoverage=76%, HitCoverage=11%, E-value=4e-10, Identity=75%"; Hit description =Putative Peroxidase 49
MECVVCEDTHNATLMLRLRFHDCFVQGCDRSVLLDDMATMAVGRSRRRSRT

SEQ ID NO: 59457 - protein, 344 aa, Zea mays
  Coding DNA Sequence Number=SeqID_17678
  Gene Ontology: Mol. function=binding; Cellular component=anaphase -promoting complex; Biological process=regulation of progression through cell cycle
  Homolog annotation: Hit_ID=Q4SA58; Match level="QueryCoverage=70%, HitCoverage=41%, E-value=3e-20, Identity=29%"; Hit description =Chromosome 12 SCAF14692, whole genome shotgun sequence
  Pfam annotation: Domain name=TPR_1; Domain location=134-167; Score =5.9; E_value=1.1; Accession=PF00515.18; Description=Tetratricopeptide repeat
  Pfam annotation: Domain name=TPR_1; Domain location=36-69; Score=9.2; E_value=0.43; Accession=PF00515.18; Description=Tetratricopeptide repeat
  Pfam annotation: Domain name=TPR_2; Domain location=134-167; Score =7.2; E_value=4.8; Accession=PF07719.7; Description=Tetratricopeptide repeat
  Pfam annotation: Domain name=TPR_2; Domain location=208-241; Score =8.8; E_value=3.1; Accession=PF07719.7; Description=Tetratricopeptide repeat
  Pfam annotation: Domain name=TPR_2; Domain location=36-69; Score =16.3; E_value=0.11; Accession=PF07719.7; Description=Tetratricopeptid e repeat
  Pfam module annotation: Pfam domain module=TPR_1::TPR_1::TPR_2::TPR _2::TPR_2; Domain location=134-167::36-69::134-167::208-241::36-69
MAALLDAGLFGPAQTLGCFLVSSAGAGNDAGMSMKVESLVQHGDALYGEKEFRRALNAYKQAMQYSRSIPRQATSNTRSSVSVTGRSPSPNSSNLLSFNENEVKFKIALCHSALCEHREALHEMEGIPSKVRTLKMNMMLGKLYRISRNSRTAVVCYKECLRQCPYVFEAITALAEMGLSAKEFSLLFSQAPNRGGKLSGDFVDTQRWWSRYVEAQCCIASHDYKGGLDIYLELMQRFPNNVHILLEIAKLQIFQFIWISSIFLVMRQAFAIMGFKAESVSTVCAFVDKIADRLPNWKADLMSRAGRRILVQLVLTSMTVYMAMAIDFPHWAIEAIDKIRKGFL

SEQ ID NO: 59458 - protein, 54 aa, Zea mays
  Coding DNA Sequence Number=SeqID_17679
MPRTRVDERRSARGYDHGQGQQPLRESVSGLVSDEYGDEASAPTPSVENGVARR

SEQ ID NO: 59459 - protein, 60 aa, Zea mays
  Coding DNA Sequence Number=SeqID_17680
MIAVLIAALLGLGLCVAVVAAEKRRRLVGVGATGDDHAAASAGLSQGTVQVQALNERIMN

SEQ ID NO: 59460 - protein, 120 aa, Zea mays
  Coding DNA Sequence Number=SeqID_17681
MKVSQEVRETTEAEARKISLAYDGAIAAQIQAETSVKERSTELQGLRQLMGEVCNRLSPPPSTEVPLAKRLRALPRHVVRVVLEGMYLRSSIALGQMVSHFDEIDVIMIVEVGGCPHPSP

SEQ ID NO: 59461 - protein, 290 aa, Zea mays
  Coding DNA Sequence Number=SeqID_17682
MAARGVQAPAPRRPVTLRDFLELGCDSSSDGFRSYPRRLLPLPPDAVLHLQQQQAPPTPRAEAAAAQRLLRRSSSSLALALFSSSLPGSGSGSGPAGALARISSISRSFSRRIKEGFWRRRDEDEGDGDGDDDYDGDYFDDRDSCGFPSPLVSSCSASDSDESEADVTTAPERNKATASSSTSPSPSPSSADHDRTRTDAAVADGDKAETAAVEDGDSTTGAPSTVGDKQQQLSPVSVLDFAFDDNDGEEEGSDAGTSCSCSSPAFQFQRCTPPAVDLHVLKTMVCLKPQ

SEQ ID NO: 59462 - protein, 89 aa, Zea mays
  Coding DNA Sequence Number=SeqID_17683
MPRTGFRGDAVEESVPTARAGRVLGSHHSPERDVVYERSWRSQEEEGKGTSGGAFMFDFSDYKLPETQSNCHQVLGYFSEHRQLLKYNS

SEQ ID NO: 59463 - protein, 183 aa, Zea mays
  Coding DNA Sequence Number=SeqID_17684
  Homolog annotation: Hit_ID=Q10SN1; Match level="QueryCoverage=97%, HitCoverage=46%, E-value=7e-41, Identity=66%"; Hit description=F-box family protein, putative, expressed
METEDSVGWDFLDWLGPDISTTIFQLLDDPADLARVAAVSRSWRRFGRYVRRPPASPARSWWPDCRRRRRRRRTPRASPARSPSAGPAMGSTRPTPYLAGALVSGKPATDLVMRCVGASSTDNFPDETIENTLVPHDMVNFRPSYWSSGGEDDPDVPESLTYTLASDLCVIEEIRIRPFEGAC

SEQ ID NO: 59464 - protein, 76 aa, Zea mays
  Coding DNA Sequence Number=SeqID_17685
MESLFGVVFVVKERDGWSEEDVVFQDSQSGRCCKALSTAFACWRNNHRKRDEIAWPVRPPPQLTYKGSSSLISCEK

SEQ ID NO: 59465 - protein, 105 aa, Zea mays
  Coding DNA Sequence Number=SeqID_17686
MGSCLPIKTRTTVIDLFLNAPPSNQRARDGERESGSAEGNREVYLRIVVVPSPAGVLTLGLAEGVVGTENQSSAAPRLRTTREEIDSRTAPPQVSAIAQSSSWGS

SEQ ID NO: 59466 - protein, 226 aa, Zea mays
  Coding DNA Sequence Number=SeqID_17687
  Homolog annotation: Hit_ID=Q6QP51; Match level="QueryCoverage=56%, HitCoverage=74%, E-value=4e-11, Identity=39%"; Hit description =Putative growth-regulating factor 1
MQTACNRTKGAYPFDFDASSMEAQATRHDMRHLWQAKQATLHFRHNDRVKKAALEHSGSTPTTCQRLAPEGFDSLPRRRARDDPGYVRYITEARATLPSATCAAPTAVPLDRVRLTAAKSGLGRHRKLRLARPQGSAPVSASDDGLRLARPQGSDSASAPEDDELRLARPQGSAPVSASDDGLRLARPQGLDSASAPEDDELCLARPQGLDMASAPEDNELRLARP

SEQ ID NO: 59467 - protein, 110 aa, Zea mays
  Coding DNA Sequence Number=SeqID_17688
  Subcellular localization annotation: CTP_CleavageSite=67; ConfidenceScore=5.19e-01
MTKGYSLTSNLECPLHDQRISPRLPPQVAQAMRQAQQLSPAAVVPRRCPVKSNTRAPLSPLRFVLCRADQQVNQRVKKLTEVPVEATFDHGGVRLDNSSPPRAQNRMVRA

SEQ ID NO: 59468 - protein, 208 aa, Zea mays
  Coding DNA Sequence Number=SeqID_17689
  Homolog annotation: Hit_ID=Q6QP51; Match level="QueryCoverage=35%, HitCoverage=39%, E-value=2e-08, Identity=44%"; Hit description =Putative growth-regulating factor 1
MGRRETEHEGGKKETGKRGTRGLRVVLRPGRPWVGRGGGSSEVEVESVFRGRGQVQAPGRARQRTSSQAKAESEPWGWARRSSSSSEAEAESEPWGSGQGGVRRLPEPRPSPSPGVGRGGVRRLPEPMPSSSPRGRARRSPSSEAETGGRALGSGEAELPMAPEVGLGCCQPHSVEWHSSRSGTGGAVFLSGRSVERRSDCGHFGSVD

SEQ ID NO: 59469 - protein, 158 aa, Zea mays
  Coding DNA Sequence Number=SeqID_17690
  Subcellular localization annotation: CTP_CleavageSite=71; ConfidenceScore=5.44e-01
MASPASDTSARLPLLAASSSVGTDPQQQGASNGICFPKARPVNSHRPRAAAATPVRTATWISLVSCPRHARCNAKAAAAATPSVASCSLDRASRRRSAQRLRVVVETRGSKCMVIAIWRLVVYVYVVSRIATIIGKLTCMLFNGYVVALVSQIVRWFG

SEQ ID NO: 59470 - protein, 80 aa, Zea mays
  Coding DNA Sequence Number=SeqID_17691
MAGGGRRAGCMREKLAARKNASALRNRGATLKGWLQQGDWLGGNGITHWRRDWTTTHWSSWAAQAIGAENWWPAKGHGGR

SEQ ID NO: 59471 - protein, 315 aa, Zea mays
  Coding DNA Sequence Number=SeqID_17692
  Homolog annotation: Hit_ID=Q10S29; Match level="QueryCoverage=81%, HitCoverage=87%, E-value=3e-62, Identity=52%"; Hit description =Expressed protein
  Subcellular localization annotation: CTP_CleavageSite=44; ConfidenceScore=5.61e-01
MATATTLSFSGGGGGTTLLRGHVALTSGRCCTFPSSRWRPPRLSASRADDSSPAPFEMTVEDALKLLGVAEGASFDEILRAKNAVLASCKDDQDAVAQPPRGIERFFIASLVPPIEVAKFSTKKVAWINREMSETMGVEAAYDMLLMQSLSQRRAGKVANNRIRFADVKPVKSAGAGTVPQWMQATMKNAPITFETPSSSSLGIQSCVYGALMVFTYASGSSTSLPSAYSSPDVPGKAALVTVGGLAAGATVGSALENFLQVDLVPFLGIHSPAVVVSEFILFSQLLGQGNACFPHKVEAAAVYSKTIRGHLCPL

SEQ ID NO: 59472 - protein, 573 aa, Zea mays
  Coding DNA Sequence Number=SeqID_17693
  Gene Ontology: Mol. function=protein binding; Cellular component =cytoplasm; Biological process=ubiquitin cycle
  Homolog annotation: Hit_ID=Q10S47; Match level="QueryCoverage=99%, HitCoverage=89%, E-value=0.0, Identity=79%"; Hit description=Leucine Rich Repeat family protein, expressed
  Pfam annotation: Domain name=LRR_1; Domain location=18-45; Score=5.2; E_value=31; Accession=PF00560.23; Description=Leucine Rich Repeat
  Pfam annotation: Domain name=LRR_1; Domain location=190-213; Score =4.4; E_value=43; Accession=PF00560.23; Description=Leucine Rich Repeat
  Pfam annotation: Domain name=LRR_1; Domain location=309-332; Score =3.0; E_value=77; Accession=PF00560.23; Description=Leucine Rich Repeat
  Pfam annotation: Domain name=LRR_1; Domain location=334-363; Score =8.7; E_value=6.7; Accession=PF00560.23; Description=Leucine Rich Repeat
  Pfam annotation: Domain name=LRR_1; Domain location=374-396; Score =6.5; E_value=17; Accession=PF00560.23; Description=Leucine Rich Repeat
  Pfam annotation: Domain name=LRR_1; Domain location=412-435; Score =1.7; E_value=1.4e+02; Accession=PF00560.23; Description=Leucine Rich Repeat
  Pfam annotation: Domain name=LRR_1; Domain location=471-494; Score =8.2; E_value=8.5; Accession=PF00560.23; Description=Leucine Rich Repeat
  Pfam module annotation: Pfam domain module=LRR_1::LRR_1::LRR_1::LRR _1::LRR_1::LRR_1::LRR_1; Domain location=18-45::190-213::309-332::334- 363::374-396::412-435::471-494
EVALTHELLRPLLPPNPSLRSLRLDCARLEDAAIACLARAGLHELLLLNCDNISGRLLCELGTTCRDLRVLSLNSLGARRGLVVNFSDLQELLNGCSQLENLRLALDFSTFDDPNFGRVWASASERLSSLEIGYIPMTMLLELLVAVTEGQQCMDYVKTPVFFPSLQKLCLAVDFITDHLIGSISVALPSLTHLDLQDAPIVEPNSSSDLTNAGLQQINPHGKLKHISLMRSQEFLVTSFRRVNDLGILLMADRCSNLESVCLGGFSRVTDTGFRAIIHSCSGLHKLRVSHGSHLTDLVFHDIIATSLCLTHVSLRWCKLLTNVGIERLSCNKDLNVLDLRDCRSLGDEAVRALSCLPKLQTLTLDATDISDQSLKYLGLGTCPLTSLSLRGCRKLTNDCITLLFAGHVKQSLQMLDLSRIPSITDDGIMLLARSRTPLIELRMRENPKIGDASVMALASMQIDGGTYGSTLQLLDLFDCGGITPLAARWFKKPYFPRLRWLGITGSLNRVMVDALSRSRPFLHMACRGEELGTMLWDTSSDWYRHNDDDLDELEQWLLEGEPVSDDDTIMEE

SEQ ID NO: 59473 - protein, 223 aa, Zea mays
  Coding DNA Sequence Number=SeqID_17694
  Homolog annotation: Hit_ID=Q9M3A6; Match level="QueryCoverage=49%, HitCoverage=21%, E-value=2e-16, Identity=45%"; Hit description=SF16 -like protein
  Pfam annotation: Domain name=IQ; Domain location=147-167; Score=29.6; E_value=1.1e-05; Accession=PF00612.17; Description=IQ calmodulin -binding motif
  Pfam annotation: Domain name=IQ; Domain location=169-189; Score=11.4; E_value=2.5; Accession=PF00612.17; Description=IQ calmodulin-binding motif
  Pfam module annotation: Pfam domain module=IQ::IQ; Domain location =147-167::169-189
MVRARGLFCLVSPVRGDPADRRSSAACICCVGPHHKPSSGAPDADLSARLPLTGCCGADVRGRSSAARTPRTPCTPTARRLCGVRPRTPRRGQMTPRFRGAGRDSAHAGNNNTSAYDARLPEAEAETETCSNDEYALLCREGFSREDVAAVTIQAYFRGHLARRAFMALKSLVRLQAVARGAFVRRQAEVAMQCMQAMARLHGRVRARRMLTTKPEAEQLLQS

SEQ ID NO: 59474 - protein, 153 aa, Zea mays
  Coding DNA Sequence Number=SeqID_17695
  Gene Ontology: Cellular component=extracellular region; Biological process=sexual reproduction
  Homolog annotation: Hit_ID=Q10S70; Match level="QueryCoverage=98%, HitCoverage=45%, E-value=1e-50, Identity=66%"; Hit description =Expansin-like A1 precursor
  Pfam annotation: Domain name=Pollen_allerg_1; Domain location=15-121; Score=-0.9; E_value=0.0056; Accession=PF01357.11; Description=Pollen allergen
MCRVPCEYKHRNLSVRVQEKRRSPGGPGDLAIRFLYQGGQTDIVAVDVAQVGSRVIAETTELSEEEEKKEVGSSNWKSMTRHSGGPAWSTRQAPAGPLQLRVVVTGGYDGKWVWAEREVLPRRRRAGEVYDTGVQITDVALEGCFPCDTREWE

SEQ ID NO: 59475 - protein, 348 aa, Zea mays
  Coding DNA Sequence Number=SeqID_17696
  Gene Ontology: Mol. function=24-methylenesterol C-methyltransferase activity; Cellular component=integral to membrane; Biological process=steroid biosynthetic process
  Homolog annotation: Hit_ID=O82427; Match level="QueryCoverage=96%, HitCoverage=97%, E-value=1e-180, Identity=87%"; Hit description=24 -methylenesterol C-methyltransferase 2
  Pfam annotation: Domain name=CMAS; Domain location=85-298; Score= -139.8; E_value=1e-05; Accession=PF02353.10; Description=Cyclopropane- fatty-acyl-phospholipid synthase
  Pfam annotation: Domain name=MTS; Domain location=94-211; Score= -92.2; E_value=0.072; Accession=PF05175.4; Description=Methyltransfera se small domain
  Pfam annotation: Domain name=Methyltransf_11; Domain location=111 -210; Score=114.3; E_value=3.5e-31; Accession=PF08241.2; Description =Methyltransferase domain
  Pfam annotation: Domain name=Methyltransf_12; Domain location=111 -208; Score=66.9; E_value=6.4e-17; Accession=PF08242.2; Description =Methyltransferase domain
  Pfam annotation: Domain name=Sterol_MT_C; Domain location=219-338; Score=221.6; E_value=1.7e-63; Accession=PF08498.1; Description =Sterol methyltransferase C-terminal
  Pfam annotation: Domain name=TPMT; Domain location=67-246; Score= -80.2; E_value=0.048; Accession=PF05724.2; Description=Thiopurine S -methyltransferase (TPMT)
  Pfam annotation: Domain name=Ubie_methyltran; Domain location=90-272; Score=-103.3; E_value=7.9e-05; Accession=PF01209.9; Description =ubiECOQ5 methyltransferase family
  Pfam module annotation: Pfam domain module=CMAS::MTS::Methyltransf _11::Methyltransf_12::Sterol_MT_C::TPMT::Ubie_methyltran; Domain location=85-298::94-211::111-210::111-208::219-338::67-246::90-27
MVWTAAVVGAGLVYWFVWVMGAAEVKGKRAVDLKMGSITRDKVQDKYTQYWSFFRRPKETATTAASAEKWGWGQSFHFSPSLPGRSHRDATRVHEERVADLLGARPGHRLLDVGCGVGGPMRAIAAHSGSNVVGITINEYQVNRARAHNRKAGLDSPRCEVVCGNFLSMPFPDASFDGAYSIEATCHAPRLQDVYGEVYRVLKPGGLYVSYEWVTTPLYRAEDPDHVECIHGIERGDALPGLRRQDEIASIAKEVGFEVLKEQDLALPPALPWWTRLKMGRIAYWRNSLVVRVLTMLRVAPKGVSEVHEMLYETAQHLTRGGETGIFTPMHMVLLRKPAAAASTEEAN

SEQ ID NO: 59476 - protein, 86 aa, Zea mays
  Coding DNA Sequence Number=SeqID_17697
  Gene Ontology: Mol. function=nucleic acid binding
  Subcellular localization annotation: CTP_CleavageSite=56; ConfidenceScore=5.24e-01
VKRKEQTSPISSNTSLTTFSNTWNEMWPTYTQRRTPLWVRRWVYVGNISFHVFEKVVSDVFELIGPVRSLRLTADPGTSKRRGYTN

SEQ ID NO: 59477 - protein, 103 aa, Zea mays
  Coding DNA Sequence Number=SeqID_17698
MVLSSNLYDCYKVRDWSWCVHDVILGSQRQPVVLNSHACECKSSVLGVDDDSDLELELEPDPNLTKETLCEASALAKEREAPACVAFALPFFNTLFYHDQRIQ

SEQ ID NO: 59478 - protein, 109 aa, Zea mays
  Coding DNA Sequence Number=SeqID_17699
  Pfam annotation: Domain name=zf-CCHC; Domain location=50-67; Score =15.9; E_value=0.0024; Accession=PF00098.13; Description=Zinc knuckle
MDELFNKLKSTKIDHQTCSKIENPAAPTMILPVHAVPQKPLEPTVWRVEGWCFNCDNPDHFIASCPKKGKSDAGLHDHSSRRKGKREYISVKHKTNGGFDKEALKKKYL

SEQ ID NO: 59479 - protein, 118 aa, Zea mays
  Coding DNA Sequence Number=SeqID_17700
EPPTTPAACARGQGSSDHLRRRPAHRRDRRDLPDVTDHPAGALLPPVKKNRKCDLNNEPEGTPIFVRILIQDCNLADGEYVLVPEQGAAQEVALDPAPEPAPEDLPATALEGKPRFYA

SEQ ID NO: 59480 - protein, 163 aa, Zea mays
  Coding DNA Sequence Number=SeqID_17701
MPAWYTPLECDGEPRPTFPLLQLQAPQQPVVRAVAAKAFPCNDDQVYRGRRSCSHPAEPGGGWSCLRSRAKRQNRAARGEAAEDAVLEDLQGALLTCGAASQRKEVKNVPRNVAAKWGQAVRVARAERRGKLGHSGESGPGPCDDQRAMHSLPQLQIPLVAFT

SEQ ID NO: 59481 - protein, 72 aa, Zea mays
  Coding DNA Sequence Number=SeqID_17702
  Gene Ontology: Mol. function=protein transporter activity; Cellular component=membrane; Biological process=intracellular protein transport
  Homolog annotation: Hit_ID=Q5JMS0; Match level="QueryCoverage=78%, HitCoverage=24%, E-value=1e-22, Identity=87%"; Hit description =Putative syntaxin 6
  Pfam annotation: Domain name=Syntaxin-6_N; Domain location=6-65; Score=30.6; E_value=5.6e-06; Accession=PF09177.1; Description =Syntaxin 6, N-terminal
MSSAQDPFYIVREEIQESIDKLQSTFHRWEQTASNTGEYVHLTKELLISCESIEWQVGTKFLTMPFPRYWYI

SEQ ID NO: 59482 - protein, 316 aa, Zea mays
  Coding DNA Sequence Number=SeqID_17703
  Gene Ontology: Mol. function=transcription regulator activity; Cellular component=nucleus; Biological process=regulation of transcription
  Homolog annotation: Hit_ID=Q10Q90; Match level="QueryCoverage=94%, HitCoverage=99%, E-value=1e-47, Identity=43%"; Hit description=Helix- loop-helix DNA-binding domain containing protein
MESSEAGWHSFDPSVAVEDSEAMAQLLGVQYSGNEQKQPTTPTAMAMCWPGQEADDQHYSSAAAYPYCTQMQQPDPGASASCYDYDYYYGSNTFTITGDFFVPEEQVADPSFMLDLNLDFEYHQEGEGIGHGGGGNGETAPVCKRRQLEDQKKGENTTCTVVPKKKSRSTAVPAQKKGKKAHKGACSRGNQEESNGGDDGNNNVAQPQQCSDNYYLSDDDSLEMTAACSNVSSASKKSSSSAAGGKARAGRGAATDPQSLYARVDISTMLEEAAQYVKFLQLQIKLLSSDDMWMFAPIAYNGVNVGLDLKISPPQQ

SEQ ID NO: 59483 - protein, 118 aa, Zea mays
  Coding DNA Sequence Number=SeqID_17704
MARGARFLLVLALLVALLAVVFQLYRLRKPMIALCADNVEVAECKGVARASSRRRGDVRSVAVVEEAIEDVGEDKPHKSRALADEGVDPEGDASKNHGRCVFQHLKGPAETASATVVV

SEQ ID NO: 59484 - protein, 188 aa, Zea mays
  Coding DNA Sequence Number=SeqID_17705
MKRNLIGASRHPTATDQECHLRRSGLRRPPPVDSRVLDIGFNNTGFLIFFDGATGVACNHTRRSGLRVLLHTASTPCAGVAPALGVTATVAGLHRTCHRVLRRQTPPSCSTGTIEARFLCVVALTVATPGTSICRYAYLFASSSTTSSPASSSHPRLLRLLRSDNRALRRHSRHATPQPSRRLSLLVP

SEQ ID NO: 59485 - protein, 62 aa, Zea mays
  Coding DNA Sequence Number=SeqID_17706
MATEGSPGTAQLMPSPWEQGGSETGARSWGGIIEEFRDLDKSRQVYIDRSFGGDQHRRWQKL

SEQ ID NO: 59486 - protein, 172 aa, Zea mays
  Coding DNA Sequence Number=SeqID_17707
MPWRSSSIPGPWVALCFIRLSDLLCIRVLSTHRGSPAISRQRLTPPWIRTNVAEHLLGYSTGMTPLPGFRIIVVTWCTEVRVGLWLRAPAIAHRSNLPRRVFNRSVDRAMPSMMAEIGKGNELITLSVGRGANELENGERDGRIWGASVILHRAGWRAAVATSVGRRMDGSR

SEQ ID NO: 59487 - protein, 90 aa, Zea mays
  Coding DNA Sequence Number=SeqID_17708
MAMAAQPRCWASGYDEPTGDRAQAHLFAEILCPLMLPTSPCTRIVTLMWIVERGSPMAANHQVDYIKVVPLHTRFKCVIEILVIYSLDRP

SEQ ID NO: 59488 - protein, 329 aa, Zea mays
  Coding DNA Sequence Number=SeqID_17709
  Gene Ontology: Mol. function=protein serine/threonine kinase activity; Cellular component=membrane; Biological process=protein amino acid phosphorylation
  Homolog annotation: Hit_ID=Q8LF75; Match level="QueryCoverage=83%, HitCoverage=71%, E-value=9e-89, Identity=56%"; Hit description =Putative receptor ser thr protein kinase
  Pfam annotation: Domain name=Pkinase; Domain location=39-300; Score =143.5; E_value=5.8e-40; Accession=PF00069.15; Description=Protein kinase domain
  Pfam annotation: Domain name=Pkinase_Tyr; Domain location=39-301; Score=106.1; E_value=1.1e-28; Accession=PF07714.7; Description =Protein tyrosine kinase
  Pfam module annotation: Pfam domain module=Pkinase::Pkinase_Tyr; Domain location=39-300::39-301
MALVRRCLCGSEEDCRALLGMENLRLFSYREIRAGTNNFDQSNKLGRGGFGTVYKGVLRDGTEFAAKVLSSESEQGIKEFLAEIESISQVKHANLVRLLGCCVQRKKRILVYEYLANNSLDHALKGAAADLPWSTRSGICLGTAKGLSYLHEEHEPNIVHRDIKASNVLLDRDYLPKIGDFGLAKLFPDNITHISTAVVGTSGYLAPEYFVHGQLTKKADVYSFGVLVLEIVSGRRVSQTIQSDMFPAWMMYQQGRLLEIVDASMGSYPEKEVLRYIKVGLACTQATPSSRPTMRQSEWDTTRKGTTELEAQIPKKRGHILLQDDYNIL

SEQ ID NO: 59489 - protein, 806 aa, Zea mays
  Coding DNA Sequence Number=SeqID_17710
  Gene Ontology: Mol. function=double-stranded RNA binding; Cellular component=intracellular
  Homolog annotation: Hit_ID=Q6H5U8; Match level="QueryCoverage=71%, HitCoverage=70%, E-value=0.0, Identity=79%"; Hit description=Double -stranded RNA-binding domain (DsRBD)-containing protein-like
  Pfam annotation: Domain name=Extensin_2; Domain location=503-805; Score=-139.5; E_value=0.075; Accession=PF04554.4; Description =Extensin-like region
MGTNGHLDLDTGGRRAIIHRTVRCTPDGVRCSKEARPSELASLGNAQQPLRYNSSDCPVCTGLSGASSEQRLFRHQRLPAMHLMRAQRAQKAGAPILAHRTWNSTCPVCTGHPGGPTSQELQRSESNGIGDVAGAPDMSERMFKSMVYFVNISIGEVEVWPKGQASAGLAVAAWARDIRVDRLSPPSERCPPLAVMHTVAVAARCLVMESRPPVAADVASLPLVDMHAACLRDNKTAVVALGDEELHLVAMTSRRNLTNHACFWGYKLPFGLYNSCLTMLNLRCLGIVFDLDETLVVANTSRSFEDRIDALQRKLSNETDPQRRNGMLSEIKRYQDDKSILKQYIEGDQVYDDGKVYKAQPEIVPPLSDNQQTMTRPVIRLQEKDIILTRINPLIRDTSVLVRLRPAWEDLRSYLIARGRKRFEVYVCTMAERDYALEMWRLLDPDSRLINSVRLHDRMVCVKSGLKKSLLNVFHDGSCHPGMALVIDDRLKVWDEKDQLRVHVVPAFTPYYAPQAEEANAQAFHQTATNFVMPVAPAQNFVSSSVAPLAPPLSMMPPPFSQPVVQPGFSDPLQGSPAREEGEVPESELDPDTRRRLLILQHGQDTRDPTPPHPAIPPVQVPVPPVQPHGNWFPTEDGINPSNLSRGSAGFTVESDSMPYEKKQPPHPSFFHGGDSPMSSDRFGYQNQRFPSQLPHTEDHHMLQNHAPPKYRSFSESNCSSTPPLAAAPCSEAPADPARAQPLALACLWRHELSAAPPRACNARHGRHTPIAVVHMSAARPARLHAVRPPLPACARIGSPGEASAH

SEQ ID NO: 59490 - protein, 1100 aa, Zea mays
  Coding DNA Sequence Number=SeqID_17711
  Homolog annotation: Hit_ID=Q6H5V0; Match level="QueryCoverage=43%, HitCoverage=99%, E-value=1e-150, Identity=61%"; Hit description=WD -40 repeat protein-like
  Pfam annotation: Domain name=WD40; Domain location=652-690; Score =44.1; E_value=4.6e-10; Accession=PF00400.22; Description=WD domain, G-beta repeat
  Pfam annotation: Domain name=WD40; Domain location=761-798; Score =43.8; E_value=5.7e-10; Accession=PF00400.22; Description=WD domain, G-beta repeat
  Pfam annotation: Domain name=WD40; Domain location=801-840; Score =35.7; E_value=1.6e-07; Accession=PF00400.22; Description=WD domain, G-beta repeat
  Pfam annotation: Domain name=WD40; Domain location=844-881; Score =7.2; E_value=5.2; Accession=PF00400.22; Description=WD domain, G -beta repeat
  Pfam module annotation: Pfam domain module=WD40::WD40::WD40::WD40; Domain location=652-690::761-798::801-840::844-881
MVTEKKDDYLMPRVFVNADTPYAERPKRHIRVRMVTRSAAAVVMAPSAQAQGIASPIAYRSVATCHSRRTGGTASAYGYGIHHSSRSLGLAAGRAHVIGSSRIRAHDTMMCTVYPSYTAIVPPSKGEARIFASLRDLPTRAPTGRVMAGDPPWPVVHMALACVRTLRSTDQSRSCYRDGSMTMIPGRTIYAQTLGVDPRDMKEQSTCRLMLSAYRQQYSSAYNSGAKRSPINSAARTGLSCGPPASAPLRSGADMLPDVMMDGFARWKRDSQGATAAVTRGRWGVGNWACRISSNAATCCHDLLLPPPHTSDLPPSISSSSLSLSRNSPNTPRAPRLPATAASTANAGGGMSVEEEVERGEEDLFYESLDRILSSSGSSTSASDDDGADRPRHRRSCDAPAAAALDLWTSQPAPVHERRRRLLHLMGLTGDPSLAGFEIARSASGEAAGPPPASPVSWSRSGGAALGSAGKPPLGGGRLRFSLSDGSDAADEDPRCLIRNLDDGREYVVREEFALREVGTGRHLTVEELARSPIVQELMRRQAFSTPNSNCTSNSQSGTSTPIERSSSGSSNGGGRAKRRSSWLRSIRCVAGSFASHSRDRRSSDEKDASPEKGGHHSSSTTDDSQDSVPRHGPARVKVRQYGKSYKELSGLFMTQEIQAHSGSIWSIKFSPDGRYLATAGEDCVIHVWEVLEFERARKENEVCNPLVAMVCNESSETTVGSAAPSESHWEKKLRSKVLHGGGSVSSDRLMVPEYVFALSEKPVITFAGHSEDVLDLSWSKSQYLLSSSMDKTVRLWHMSSTYCLKTFSHTDYVTCIQFNPVDDRYFISGSLDEKVRIWSIPKREIVDWVDLHEMVTAACYTPDGKGALVGSHKGSCHLYDTSGDSSMVIITSADSRIRVLDGFELAHRFKDSHEYFHCQSVTVAVTWPFASTAMTCLMNPGKQEELERGSEPQDLQTKLAKAQEMPDVEYRSTNITSNNSNHNNGDRTSPTWPEKLNTPPNQSLRATTCHANEGDQALNRSAWGLVIVTAGRGGRRAIIHRTVRCTPDSVRCSKEARPPELASLGNAQQPLRYNSPDMSARAEGRRAHTGAPDNEQEMS

SEQ ID NO: 59491 - protein, 213 aa, Zea mays
  Coding DNA Sequence Number=SeqID_17712
MAKVGISVAGSTTTAARGCLAAMRDLATWGRQAHTHASGSERRKKEGAERRCQVAVTCMRHPLDLLRPPDELFGWLEDEQDDGVLLAALGRGRLHTAARTHQGARRPADRDAALIHGGGCQQAFDDTTSSDEDAELAEEVSNGFFIVARLPPLPTSEDPSPVPEGGDDLGTAKESLDRTRLYRARHGAAGRHAAVLALLGVLLAALACPSTAD

SEQ ID NO: 59492 - protein, 109 aa, Zea mays
  Coding DNA Sequence Number=SeqID_17713
  Homolog annotation: Hit_ID=Q53PU8; Match level="QueryCoverage=79%, HitCoverage=20%, E-value=1e-33, Identity=81%"; Hit description =Expressed protein
MATRSAAASKREGRRSQQQLDPAIRADGQTQLSHEIALELSQRSAAAGLRPIGAVVFMQRGVLKVCLRTTDSTVNTSEIAKAYGGGGKRSSSSFTLRMDEFNIWTSVNS

SEQ ID NO: 59493 - protein, 414 aa, Zea mays
  Coding DNA Sequence Number=SeqID_17714
  Pfam annotation: Domain name=CBS; Domain location=196-402; Score=7.9; E_value=0.012; Accession=PF00571.18; Description=CBS domain
MAATLLSHVVSDLCIGRPRVLTLPPSTPVAAALAALRTGADPFVFVDDEPAACCHAKTTTYVKVTVADILCYACGDAGNLRDVAAALSRPVAVVVAGAVASGHGVTHRVDPQTRLLDAIDVLLTDGCQGLLVPLSARTRKRHHQHQGQAPSSDAGALLATSSDCCVLTREDIVRHLFGSISHFSPVAALTVASLGLVRRDVVHAVHVDDDGLDVIPLLRRAVSDGTAVAVVADDDALVGEICPSVLASCDVEAVSAAFAGLSAGDTMAYIDCSLSSHSPPEFLVRAIRAQLAGKGLDAMAELVECAGKDTAVLPLSPSSSLSSTSSDEDSPSGRARRPRRMSSGSFGWRSTEDVVACHSESSLVAVMAQALAHRVGYVWVANETSGALVGVVRFADVLAVLREQLRPQSVSPRC

SEQ ID NO: 59494 - protein, 561 aa, Zea mays
  Coding DNA Sequence Number=SeqID_17715
  Gene Ontology: Mol. function=nucleic acid binding; Cellular component= intracellular; Biological process=DNA integration
  Homolog annotation: Hit_ID=Q8H6I0; Match level="QueryCoverage=99%, HitCoverage=34%, E-value=0.0, Identity=69%"; Hit description =Putative gag-pol polyprotein
  Pfam annotation: Domain name=zf-CCHC; Domain location=372-389; Score =27.9; E_value=2.4e-05; Accession=PF00098.13; Description=Zinc knuckle
MSGDHAKKEMETGEKPTTSHGSTSSEESRTKRKEKKKDSSKRKEKKSFSSHHKEKKEKSSSHKPHRKGDKHKRMRKVVYYETDTSSTSTSDSDAPSVTSKRQERKKYSKIPLHYARISKHTPLLSVPLGKPPTFDGEDYARWSDLMRFHLTSLHKSIWDVVEFGAQVPSVGDEDYDEDEVAQIEHFNSQATTILLASLSREEYNKVQGLKSAKEIWDVLKTAHEGDELTKITKRETIEGELGRFRLRKGEEPQHMYNRLKTLVNQVRNLGSVKWDDHEMVKVILRSLIFLNPTQVQLIRGSRKINELDDATTSEAQPVAFKATEEKKEESTPSRQPIDASKLDNEEMALVIKSFRQILKQRRGKDYKSRSKKVCYKCGKLGHFIAKCPLSSDSDRGDDKKGRRKEKKRYYKKKGGDAHVCREWDSDESSSDSSDDKDAANIAVTKGLLFPNVGHKCLMAKDGKKKKVKSNSSTKYESSSDDNASGEEDNLRSLFANLNMEQKEKLNELISAIHEKDDLLDSQEDFLIKENKKHVKVKNAYALQVEKCERLSIDLRTCRKND

SEQ ID NO: 59495 - protein, 390 aa, Zea mays
  Coding DNA Sequence Number=SeqID_17716
  Gene Ontology: Mol. function=DNA binding; Biological process =regulation of transcription, DNA-dependent
  Homolog annotation: Hit_ID=Q1S2M0; Match level="QueryCoverage=46%, HitCoverage=38%, E-value=2e-08, Identity=24%"; Hit description =Transcriptional factor B3; Cupredoxin
  Pfam annotation: Domain name=B3; Domain location=12-99; Score=52.5; E_ value=1.4e-12; Accession=PF02362.12; Description=B3 DNA binding domain
  Pfam annotation: Domain name=B3; Domain location=123-219; Score=50.5; E_value=5.6e-12; Accession=PF02362.12; Description=B3 DNA binding domain
  Pfam module annotation: Pfam domain module=B3::B3; Domain location=12- 99::123-219
MAKQLKVLLPPSFHKMRISDELSGCFEAGDGAPEPTALVVSPFGKVWRVAVGRDGDGAFLGRGWAEFLAAHGIGLGFFVVLRHEGGGTLTVKVFDTSLCIKGFSAPAAVMTSRGSKGVICKPQFIRIFHPYLSEKMILPARFVKYYITDEWLNSQTAIILSPLGKFWRIELKNDQSGIFFTGGWSQFLEFHGICNGDVLHLRYEGNMVFKFKAFGLGGCQKDFKNQNAGIRSSKEKRQETPSIRKRKSNDEKSRSEENKRPKGPKNSRLLEPYRIGTSSWIRKSINTYALEHLLPLSKEFCGRIGFQMACKITLKTKMDSARSWLVHGAAYKNYCCLVGVAWKSFCQENRIKPGRPVHLQHHRNHTVACHYHALDPVEVEVEVKTKNNIT

SEQ ID NO: 59496 - protein, 824 aa, Zea mays
  Coding DNA Sequence Number=SeqID_17717
  Gene Ontology: Mol. function=ATPase activity, coupled to transmembrane movement of substances; Cellular component=integral to membrane; Biological process=transport
  Homolog annotation: Hit_ID=Q8GU66; Match level="QueryCoverage=97%, HitCoverage=59%, E-value=0.0, Identity=63%"; Hit description=MRP -like ABC transporter
  Pfam annotation: Domain name=ABC_membrane; Domain location=322-580; Score=24.7; E_value=0.00012; Accession=PF00664.13; Description=ABC transporter transmembrane region
  Pfam annotation: Domain name=ABC_tran; Domain location=40-211; Score =131.3; E_value=2.8e-36; Accession=PF00005.17; Description=ABC transporter
  Pfam annotation: Domain name=ABC_tran; Domain location=622-787; Score= 129.5; E_value=9e-36; Accession=PF00005.17; Description=ABC transporter
  Pfam annotation: Domain name=SMC_N; Domain location=29-215; Score= -105.3; E_value=0.00064; Accession=PF02463.9; Description=RecFRecNSMC N terminal domain
  Pfam module annotation: Pfam domain module=ABC_membrane::ABC _tran::ABC_tran::SMC_N; Domain location=322-580::40-211::622-787::29 -215
MKGNNNNSSRPRHEVAENDQGNRAELVTVLRGIDVEVRRGELTAVVGTVGSGKSSLLSCIMGEMHKLSGTVSICGSTAYVAQTAWIRNGTIQENILFGKPMHSERYSEIVNACCLEKDLEMMEFGDQTEIGERGINLSGGQKQRIQLARAVYQDCDIYLLDDIFSAVDAHTGSAIFKECLKGILKNKTVLLVTHQVDFLQNVDTIIVMKDGLVIQSGIYLELLASCSEFSDLVTAHHSSMETAGAQAFHVQNTESSQASTGSVDAPSLASKSNAENGESVGSATNKEAGSSKLIQEEEKESGRVSWRVYKLYMTEAWGWWGIVVILAVSLLSEGSSMASNYWLSYETSGGPVFDTSLFLGVYASIVATTIILEMIATLIVTFMGLQSAQAFFNKMFDSILRAPMSFFDTTPSGRILSRASSDQSKIDTNLVFYVGFATSMCISVVTNVAITCQVAWPSVIAVFPLLLLNIWYRNRYITTSRELTRLQGVTRAPIIDHFTESFLGAPTVRCFRKEDEFYQINLDRINSNLQFVGMSLSYGISLNSLVYYTISISCMIENDMVAIERVHQYSTLPSEAAWEVADGLPSQDWPSRGDIDVKDLKVRYRQNTPLILKGITVSIKGGEKVGVVGRTGSGKSTLVQALFRIVEPADGHIIIDGVNICTLGLRDLRSRFGVIPQEPVLFEGTALECCQLKDIVASKPEKLDALVADMGENWSVGQKQLLCFGRVILKRSRILFMDEATASVDSQTDAAIQKIIREEFTECTVISVAHRIPTVMDSDRVLVLDAGLVAEFDAPSKLMRRPSLFGAMVQEYASRSSSVKETVG

SEQ ID NO: 59497 - protein, 155 aa, Zea mays
  Coding DNA Sequence Number=SeqID_17718
  Subcellular localization annotation: CTP_CleavageSite=38; ConfidenceScore=5.25e-01
MAPRHLNCRSPLLFVAAALLLLLLLPYGSSSSTFGYCRSRNRSRDGARRVAWRLAGEGRGEPQGAMPRPRECATALGRAPGLANEDGDDACRVAGVSARTAPGGGAVADWRLPAKDYFCGLADWLRWKFYLFVLRASGRGPRWPIGLGPPLMVKS

SEQ ID NO: 59498 - protein, 558 aa, Zea mays
  Coding DNA Sequence Number=SeqID_17719
  Gene Ontology: Mol. function=monooxygenase activity; Cellular component=integral to membrane; Biological process=electron transport
  Homolog annotation: Hit_ID=Q9FDZ1; Match level="QueryCoverage=93%, HitCoverage=92%, E-value=1e-164, Identity=54%"; Hit description =Cytochrome P450-like
  Pfam annotation: Domain name=p450; Domain location=75-554; Score =241.3; E_value=2e-69; Accession=PF00067.12; Description=Cytochrome P450
  Subcellular localization annotation: CTP_CleavageSite=44; ConfidenceScore=5.10e-01
MATGALLQPWSLLGFLAALAALWWACRVLQSTLIVPRRLGRALRSQGLRGTTYRFPFGDLKELARLAVAARAKAMPLSHDITPRVNRLYYNVIGEHGKVSVTWLGPTPRVIVNDPKLVREILANKLGHFQKRKHDGIVRRLASGLVNHEGEKWAAHRKLISPAFHLEKLKKMLPAFASCSDELIARWAGYVGSDGAREIDVWPEFQNLTGDVISRTAFGSSFSEGRRIFEIQCEQVQNLVKLMNTLYLPGFRFLPTQLNRRLKANAREVQALLRGIVSKRERAMKEGRANNDDLLGVLMESNIAETRQDGSSEPVMTMDDIIGELKLFYFAGMDTTAVLLTWTMVVLSAHPEWQERAREEVRRVFGNNRPDLDGIQQLKTVSSSLAGLCSAVCSHNTTSHASLTDTVVSVLVWSSLQVTMILYEVLRLYPPVVQLDRQTHNEVELGGVTYPPGVLLSLPIVFVHHDKDVWGEDADEFSPERFKDGVSRASKDSPAFFPFGWGPRICVGQNFALVEAKMALSSILQHFSFALSQSYTHAPFPVSTLQPEHGAHLMLKKL

SEQ ID NO: 59499 - protein, 171 aa, Zea mays
  Coding DNA Sequence Number=SeqID_17720
MAPALLSIYGEQSGSEHLVFITALHHARAPVLLSKDGRASGASITGLSRARTMGWGRLRGHPRPSIYGEQSGSEDGGGWRGGILEWRPFHPRIASAGRGSWGEGGCGGIRALPSTGRRVGARLAGAVAEWRPFHRRIARMAAQTVGNSVSEFLSGFSDGKTDSAARVSLAN

SEQ ID NO: 59500 - protein, 576 aa, Zea mays
  Coding DNA Sequence Number=SeqID_17721
  Gene Ontology: Mol. function=transferase activity, transferring glycosyl groups; Cellular component=membrane; Biological process =protein amino acid glycosylation
  Homolog annotation: Hit_ID=Q67X53; Match level="QueryCoverage=99%, HitCoverage=100%, E-value=0.0, Identity=75%"; Hit description =Putative beta-1,3-galactosyltransferase
  Pfam annotation: Domain name=Gal-bind_lectin; Domain location=116 -303; Score=8.1; E_value=0.00031; Accession=PF00337.12; Description =Galactoside-binding lectin
  Pfam annotation: Domain name=Galactosyl_T; Domain location=340-536; Score=103.3; E_value=7.3e-28; Accession=PF01762.12; Description =Galactosyltransferase
  Pfam module annotation: Pfam domain module=Gal-bind_lectin::Galactosyl _T; Domain location=116-303::340-536
MKKWHGGFAIVSLFIILMLRYVILDNPLVENSLQYVFQQNRTAELHWLDVPNPPAIQNLQISSEVISTGLLASNLSITRNLSDRELQSLHSWNHLKQLLSHVHILPDGVEAIKEAGVAWRELNTALAYDDAVSVNGSIQQKDKGKQCPYSIRRMNATRLGDRFALKLPLWTDSGLFNNYLFEDPVIVQNTWTISDDWGSENRCPSPDSDAKDTTKVDDLEKCSSMVGEDQKEILPSKFHSNVSAMPPASKKKAEPRKYFPFRQGYLAVAILRIGAHGIHMTVDGKHITSFAFREDLEPGFVGERTSSMFTDLEILKAPPVPMDKPVDLFIGVFSTANNFKRRMAVRRTWMQYDSVRSGKVTVRFFVGLHKNELVNEELWNEARTYGDIQLMPFVDYYSLILWKTIAICIYGTNVLSANYVMKTDDDAFVRVDEVLSSLDRTNVNHGLLYGRVNSDSQPHRDPYSKWYITPEEWPEESYPPWAHGPGYIVSKDIAKEVYRKHKSGELKMFKLEDVAMGIWINEMKKDGLDVKYENDGRILVEGCEDGYVIAHYQEPRDMMCLWDQFQKTKRGTCCKE

SEQ ID NO: 59501 - protein, 84 aa, Zea mays
  Coding DNA Sequence Number=SeqID_17722
MHFVGYGSGVKGYRLLCADSKKEAPPRPTPGLDPRLGLGRSSALEDDELCLTRPQGSDSTSTPGDDELRLARAQGSDSALASDD

SEQ ID NO: 59502 - protein, 122 aa, Zea mays
  Coding DNA Sequence Number=SeqID_17723
MRLTTAESSLRRHRKLRLARPWASASGEVSASSDPRARPPPRPRKMELRLARPQGPASTSTSGGIASSPDPGLGLRRSLRLARPWARIDHATGGYVWSGVTSVGGVGWAQSGVTTAGGVGWV

SEQ ID NO: 59503 - protein, 467 aa, Zea mays
  Coding DNA Sequence Number=SeqID_17724
  Gene Ontology: Mol. function=starch synthase activity; Cellular component=chloroplast; Biological process=glucan biosynthetic process
  Homolog annotation: Hit_ID=Q9SPM9; Match level="QueryCoverage=92%, HitCoverage=66%, E-value=0.0, Identity=63%"; Hit description=Starch synthase IIA
  Pfam annotation: Domain name=Glyco_transf_5; Domain location=50-210; Score=51.8; E_value=1e-14; Accession=PF08323.2; Description=Starch synthase catalytic domain
  Pfam annotation: Domain name=Glycos_transf_1; Domain location=258 -405; Score=19.0; E_value=8.9e-05; Accession=PF00534.10; Description =Glycosyl transferases group 1
  Pfam module annotation: Pfam domain module=Glyco_transf_5::Glycos _transf_1; Domain location=50-210::258-405
RPLGISRKYIGFDEPDEAKDDSRVGADDAGSFEHYGDNDSGPLAGENVMNVIVVAAECCGTKVWGLMGNPLKMGIRKYFQSCRTRVHDLEVNYFHAFIDGVDFVFIDAPLFRHRQDDIYGGSRQEIMKRMILFCKVAVEGRGPVDEFPYMDLPEHYLQHFELYDPVGGEHANIFAAGLKMADRVVTVSRGYLWELKTVEGGWGLHDIIRSNDWKINGIVNGIDHQEWNPKVDVHLRSDGYTNYSLETLDAGKRQCKAALQRELGLEVRDDVPLLGFIGRLDGQKGVDIIGDAMPWIAGQDVQLHLEREHPNKVRGWVGFSVPMAHRITAGADVLVMPSRFEPCGLNQLYAMAYGTVPVVHAVGGLRDTVAPFDPFSDAGLGWTFDRAEANKLIEALRHCLDTYRNYEESWKSLQARGMSQDLSWDHAAELYEDVLVKAKYQCDAPLGSVAVLWDCIELCHYVLSTGQ

SEQ ID NO: 59504 - protein, 379 aa, Zea mays
  Coding DNA Sequence Number=SeqID_17725
  Gene Ontology: Mol. function=transferase activity; Cellular component= membrane; Biological process=protein metabolic process
  Homolog annotation: Hit_ID=Q7PC75; Match level="QueryCoverage=99%, HitCoverage=69%, E-value=1e-174, Identity=77%"; Hit description =Cellulose synthase-like A3
MDLVELECKFWANNGKNVKYEVRNNRTGYKAGALKQGMLYEYVQQCDFVAVFDADFQPEPDFLVRTVPYLVHNPRIALVQARWEFVNPKEFLMTRIQKMTLDYHFKVEQEAGSSTFGFFGFNGTAGVWRTSSIKEAGGWEDRTTVEDMDLAVRAGLKGWKFIYVGDVKVKSELPSNLKAYRRQQHRWTCGAANLFRKMGAEIILTKEVSLWRKLYLIYSFFFIRKVVAHVVPFMLYCVIIPLSVLIPEVTVPVWGVVYIPTTITLLYAIRNPSSIHFIPFWILFENVMSFHRTKATFIGLLELGNVNEWVVTEKLGRTKPVPQMLEKPRCRCTISEILVAIFLFFCATYNLVLGDDFYFVYIYLQEIAFLIVGTGFCGT

SEQ ID NO: 59505 - protein, 241 aa, Zea mays
  Coding DNA Sequence Number=SeqID_17726
  Subcellular localization annotation: CTP_CleavageSite=61; ConfidenceScore=5.05e-01
MVKQRGSDYGEPWSAAGSVFCSFVHGARRCVAARLGVRTAPDSICEIGAGRSSPKLRRGPRWSMRSNKLENGDGAPRGAVEKAQRAPIYFPRIRHGMGGVRPCLPDNGGKRCAVCYSGESAGKTESRAVERSCGAPPGSHREKEGDAVPLTRLVHMLAPRIDMESMRASSVASARPLSRTRISPRCTYSGGASAAPDSGKLPAAALRRVLEMPGAHQAPACYDALSARLVERAEFRAYFTS

SEQ ID NO: 59506 - protein, 338 aa, Zea mays
  Coding DNA Sequence Number=SeqID_17727
  Pfam annotation: Domain name=DUF241; Domain location=73-333; Score= -26.6; E_value=0.00026; Accession=PF03087.5; Description=Arabidopsis protein of unknown function
MAGYRRTISFPAPKPGADALALATASDKLGGVPHPLDDDVAALRLVIGQSPPCPSAPSPSASSVSAAASQVCRVLVSLSELLRHPQVREPLRRLLGRSRLAERLLDDLLRLADAHGSFRQALVALAALQAETRAALRRGDPTRLASASRAQRRAGRDLPRLAAAARAVAARAPAPLPEGLPPDAAALAAAVADATAAVASGSAAVFSGVSSLSNAAASARVEVASTPCWVTAPARPSDAPGTSRHHIWWVADLVRWMSRAKRRSAEKQKGVDEDEESSTAQFRPEARVKPEERARKAAFERHENLERCIANVDGSGEKVFRALVDTRVSLLNILSPGF

SEQ ID NO: 59507 - protein, 77 aa, Zea mays
  Coding DNA Sequence Number=SeqID_17728
MESSSPLLFLLDANDDNHSASVLFDSNFVSEISCLPQEQRLRKVSLQTPGQGLAHSAHRVLLSVPRLRELPSCRLLA

SEQ ID NO: 59508 - protein, 485 aa, Zea mays
  Coding DNA Sequence Number=SeqID_17729
  Gene Ontology: Cellular component=plastid; Biological process =peroxisome organization and biogenesis
  Homolog annotation: Hit_ID=Q2QQS3; Match level="QueryCoverage=97%, HitCoverage=92%, E-value=1e-170, Identity=59%"; Hit description =LILLIM08, putative, expressed
  Pfam annotation: Domain name=Aa_trans; Domain location=57-471; Score =183.9; E_value=4.1e-52; Accession=PF01490.8; Description =Transmembrane amino acid transporter protein
MASPLRAVASPLRAMATPLASPVRKAVAGVRECLEEVGHITRLADPRDAWLPITESRSGNAYYAAFHNLSSGIGFQALVLPTAFASLGWTWAIICLTLAFGWQLYTLWLLVRLHEPVAGATRYSRYMHLATTVFGERWAKILALLPVMYLSAGICTALIIVGGGSMKLLFGIACGEPCPARPPTTVEWYLVFVCAAVLLSQLPNLNSIAGVSLVGATAAVAYCTMIWTVSVAKGRVPAVSYDPVKAPSDVDGALAILNGLGIIAFAFRGHNVVLEIQGTMPSTLKHPSHVPMWKGVKVAYAIIALCLYPVAIGGFWAYGNQIPPNGILSALYKFHSRDTSRLVLGVTTTLVIVNCLTTFQIYAMPVYDNMEAGYVHKKNRPCPWWMRSGFRAFFGAVNFLIAVALPFLSQLAGLLGGISLPVTLAYPCFMWVAIKKPRKGTATWNVNWALGILGMSISLVLIVGNLWGLVEKGLRVKFFKPADSQ

SEQ ID NO: 59509 - protein, 299 aa, Zea mays
  Coding DNA Sequence Number=SeqID_17730
  Gene Ontology: Mol. function=kinase activity
  Homolog annotation: Hit_ID=Q6ESQ4; Match level="QueryCoverage=84%, HitCoverage=64%, E-value=9e-64, Identity=46%"; Hit description =Putative MAP kinase activating protein
  Pfam annotation: Domain name=DUF300; Domain location=2-141; Score= -66.3; E_value=4.7e-08; Accession=PF03619.7; Description=Domain of unknown function
MEQKFVLGVILMVPCYAIESVSYAYRHCYFEKICSCVLKRKLGLRGVIIKTLTATLSLLLESFGVYCDGEFNLRCGYPYFAAVLNFSQYWALYCLVACYRYLIAPWLPPGQMGIASVVHLYVFPAKPYALLTNQSHGNISVLGDYVSSEPVDPFEIKESNRPTKMKLPQLEPDERSVTNIKESVRDFVVGSGEYVIKDFKFTVNQAVRPVEKRIDKLMKKNDKSKKSQDDNWVSAATPERPVRGIDDPLLSGSASDSGVTKGRKYRRVVSSVTAVDSWGGGDQASDGYEIRGRRWAVKS

SEQ ID NO: 59510 - protein, 204 aa, Zea mays
  Coding DNA Sequence Number=SeqID_17731
  Gene Ontology: Mol. function=zinc ion binding
  Homolog annotation: Hit_ID=Q6AUV7; Match level="QueryCoverage=83%, HitCoverage=18%, E-value=9e-17, Identity=28%"; Hit description=JmjC domain containing protein
MLMVEALFLCLQCLCFQCCQEFRQGLVSGNDAKVDGGGKQDFLSGVSHDKIISKRPSDGQNDMLIDSVVPGENITSSLRQWSVNKDGTIPCPPNAFVVVGALLELKCLFKEKFIAELLEKADSALNNEMEVKIEGSKCPCFTESGDMDDGISWKSSCRENSCDNYIYCPTATNVQNGSLDHFQEHWLKGEPVHIGREIGNGIRL

SEQ ID NO: 59511 - protein, 574 aa, Zea mays
  Coding DNA Sequence Number=SeqID_17732
  Gene Ontology: Mol. function=nucleotide binding
  Homolog annotation: Hit_ID=Q6Z3F6; Match level="QueryCoverage=76%, HitCoverage=83%, E-value=1e-112, Identity=45%"; Hit description =Putative auxin-independent growth promoter
  Pfam annotation: Domain name=DUF246; Domain location=130-412; Score =425.1; E_value=9.6e-125; Accession=PF03138.5; Description=Plant protein family
  Subcellular localization annotation: CTP_CleavageSite=75; ConfidenceScore=5.33e-01
MAGQGVSVPAAAGGIAVGVFGTAAACRLAASAGLLLLVVAFHCFLSLPLSDASGGSRVFRRPNPPFLLNKPADVRRNVIGAVDFAVPSGGSKLGEELWESKAAGNFFGCSNATKQFADAEAVTKSDRYLMIATSGGLNQQRTGSLSEILLPVPMSDNYETRILNATLVIPKLDEESFWKDASDFAEIFDVDSFISSLSNDVKIIRQVPDRNGKPPSPYKMRIPRKLHTNSDDPSVDRFEPDMLAFSGCYYGGGDIERRELGEIRKRWKTLHASNPDRERRHGKCPLTPEEVGLMLRALGFGKDVHLYVASGDVYGGEETLAPLKALFPNFHSKETLANKELAPFLPYSSRMAALDFIVCDRSDVFVTNNNGNMARMLAGRRRYFGHRRTIRPNTKKLYSLFLNRTSMSWDTFASKVQTFQKGFMGEPNEIKLGRGEFHEHPVDCICAKSKGKSVQSRHHLVKGAGEAVENHSIDGELDWKDLDYGEHTPLGRGDSSNETESDDVRIGGSDIPELEDMIHIETSFCQLDKQERPGRARASYRKDRKPIVRYEVTTVQCMMDPGEMVSFSYSLYRR

SEQ ID NO: 59512 - protein, 100 aa, Zea mays
  Coding DNA Sequence Number=SeqID_17733
MPRPPNPWLGVRRSSTVGAPGLGISVGPPGCRGKLPPAAESIHRVRREIAVVPCASADTPELALVLCGCVWVLLVGLIAHLAGWSSRNLPPELQHHRDSA

SEQ ID NO: 59513 - protein, 58 aa, Zea mays
  Coding DNA Sequence Number=SeqID_17734
MGDPYPLGYGYGVGNTASVATAMDFYARKKRLGAGSNRSAAVNDEGNIESVECVRCWA

SEQ ID NO: 59514 - protein, 130 aa, Zea mays
  Coding DNA Sequence Number=SeqID_17735
MVCSMVQELYDVMERLVGMPRGFCRRNRLGEIDSSSASYDTRLAREVVPLRGELEDTEGLHDSVEISYQGYPGNRNLDQIPFNGDDEVKAPEAYGCSEGLFYVVAGHLEPEKDGENTQRPYLVRLLSLFP

SEQ ID NO: 59515 - protein, 733 aa, Zea mays
  Coding DNA Sequence Number=SeqID_17736
  Gene Ontology: Mol. function=drug transporter activity; Cellular component=membrane; Biological process=multidrug transport
  Homolog annotation: Hit_ID=Q651I6; Match level="QueryCoverage=51%, HitCoverage=77%, E-value=1e-149, Identity=70%"; Hit description =Putative ripening regulated protein
  Pfam annotation: Domain name=MatE; Domain location=1-113; Score=18.2; E_value=0.0002; Accession=PF01554.9; Description=MatE
  Pfam annotation: Domain name=MatE; Domain location=174-337; Score =145.7; E_value=1.2e-40; Accession=PF01554.9; Description=MatE
  Pfam module annotation: Pfam domain module=MatE::MatE; Domain location=1-113::174-337
MASALDTLCGQAFGARQYYLLGIYKQRAMFLLTLVSVPLSVVWFYTGEILLLFGQDPDIAAEAGTYARWMIPLLFAYGLLQCHVRFLQTQNIVVPVMASAGAAAACHVVVCWALVYALGMGSKGAALSNSISYWVNVAVLAVYVRVSSACKETWTGFSTEAFRDALGFFRLAVPSALMVCLEMWSFELIVLLSGLLPNPKLETSVLSISLNTAAFVWMIPFGLSSAISTRVSNELGAGRPRAARLAVRVVVLLSVAEGLGVGLILVCVRYVWGHAYSNVEEVVTYVANMMLVIAVSNFFDGIQCVLSGVARGCGWQKIGACINLGAYYIVGIPSAYLIAFVLRVGGTGLWLGIICGLIVQLLLLAIITLCTNWDSEASIKFRDDDRPLLRAKVPIGVLGLPFLSGLAAGGDAKDLRFDLSTAFPSVPALRLSYRPNEPLQPFALSVRTGSPIRAPFALAAEFNLTSSNPPAFSLLFKPRIGDFAVASSVHSPPTPPPTSTPPPLAIKMVDLTTNSDDHDCEAHGNDLSFAENVFGANVAAATGTNGGGVGALLSGMRLTTRSVLPLWSKASMWFQWGLRVPPEIKATLADNGYGRKAGSLAISKLPLLVMNKIIIEHTPKVPSQSEADKKRKKDTPPAAEDEEFSLMKRQLDKLNAESTMLRRAVEDLSAEIGAGKGNDRKLPTAVPPQQHTLVSKPDRHFHINAKELVDSGTKPASNEASEELKKVLEGRRK

SEQ ID NO: 59516 - protein, 35 aa, Zea mays
  Coding DNA Sequence Number=SeqID_17737
MGQVFTGDLPLSHFSARDTQILILKQFLDEKAKNK

SEQ ID NO: 59517 - protein, 210 aa, Zea mays
  Coding DNA Sequence Number=SeqID_17738
  Homolog annotation: Hit_ID=Q2QN51; Match level="QueryCoverage=46%, HitCoverage=12%, E-value=2e-20, Identity=60%"; Hit description=Leo1, expressed
MAVVAHAGLPRPRLFLPFSFHGSPIYSSCLSLALPSVAVDYDHGNPWCRPDTPHNGASRGHHPSVSSGWPCVGRARSHEFLIKIRARACLKVQCQFSYSENQLEQLISDVTLNTRRMENQLEQLIIHNFWAKAFLATIEFPESKFGINRLTFVCLKIFGIGHDEPHVQIYQEPHCQSEAAYFHLSILQSVHYFHTTINKYPNLINQSKKK

SEQ ID NO: 59518 - protein, 87 aa, Zea mays
  Coding DNA Sequence Number=SeqID_17739
  Gene Ontology: Mol. function=drug transporter activity; Cellular component=membrane; Biological process=multidrug transport
  Homolog annotation: Hit_ID=Q651I6; Match level="QueryCoverage=62%, HitCoverage=11%, E-value=5e-20, Identity=87%"; Hit description =Putative ripening regulated protein
MAKKPVEEALLAAADEQESLSVREELKKQLWLAGPMIAGALLQNVIQMISVMYVGHLGELPLAGASMANSFATVTGPQPAGAQDCTM

SEQ ID NO: 59519 - protein, 84 aa, Zea mays
  Coding DNA Sequence Number=SeqID_17740
  Gene Ontology: Mol. function=nucleic acid binding
  Homolog annotation: Hit_ID=Q6AU49; Match level="QueryCoverage=88%, HitCoverage=51%, E-value=2e-09, Identity=51%"; Hit description =Putative RNA-binding protein
  Pfam annotation: Domain name=RRM_1; Domain location=11-81; Score =42.3; E_value=1.6e-09; Accession=PF00076.12; Description=RNA recognition motif. (a.k.a. RRM, RBD, or
MEKDNHNPPKIFIGGLPSHGITTRKLRSHFARYGNVVEALAMEHPDGLGRGFGFVEYEDEAAVLRALDARESVNHDTFFRCREV

SEQ ID NO: 59520 - protein, 72 aa, Zea mays
  Coding DNA Sequence Number=SeqID_17741
MTSAFVVWRTTQVVWQWQLGQGDRNGLKNFDLGPLSRIKFLCLAKGELNADNSKDDESGFSMATIESMKNFS

SEQ ID NO: 59521 - protein, 308 aa, Zea mays
  Coding DNA Sequence Number=SeqID_17742
  Pfam annotation: Domain name=bZIP_1; Domain location=191-255; Score =40.2; E_value=7e-09; Accession=PF00170.11; Description=bZIP transcription factor
  Pfam annotation: Domain name=bZIP_2; Domain location=191-245; Score =31.1; E_value=3.8e-06; Accession=PF07716.5; Description=Basic region leucine zipper
  Pfam module annotation: Pfam domain module=bZIP_1::bZIP_2; Domain location=191-255::191-245
  Subcellular localization annotation: CTP_CleavageSite=43; ConfidenceScore=5.48e-01
MDRTRVHASTRPAIRHSIPSPHCAARSEVARPGAARFRRAATRATSRPQSTAYSASSRIEMVPAPRRRTGDPGSPARVHAPRRSIPSWLSYSARPVGRGPARGVRRIVGVVDRSATVGEKEKEMLSVQEALDLASSSCGTMDITTCGFTPWGPESCPSLEQVMASRPAASSTAALAEAEAEAARDADPEDEERLRRQRRKVSNRLSAQRSRARKQQRLEELREAAARLRAEKQQLEARLQALARHDLAVRCQNARLGAEASALARRFREARRLLALRRLAFAALQPRPGVAPAPAPPAPLLGLASLMT

SEQ ID NO: 59522 - protein, 107 aa, Zea mays
  Coding DNA Sequence Number=SeqID_17743
MAPWRRRMANWQCKAAESSFLCSLRAEVISNANARPRPSGSRQRKLRGADTIDRVGDARLAVSSGGTLVATCVCNCTRVVGPATRRKPRSSLLRGYTAYWRRHHYWS

SEQ ID NO: 59523 - protein, 329 aa, Zea mays
  Coding DNA Sequence Number=SeqID_17744
  Gene Ontology: Mol. function=ATP binding; Cellular component =phycobilisome; Biological process=photosynthesis
  Homolog annotation: Hit_ID=Q75KB2; Match level="QueryCoverage=91%, HitCoverage=91%, E-value=9e-68, Identity=47%"; Hit description =Expressed protein
MDRLVLFSRRRRRWILLTAAGAAAAVGAYKIYHHPVVAERRHRLVRLAAAVAAIADAATSSADAAALVVSDLADFVRSDADEVPRSVKQLAKLAASPEVSATVSTLSEAVTSGMFRGAGSSSSGPGSGGTVALSDRFVDKLFSDSGERLASAVAGSFARHLVLAYYSAPSPQGEASSSPTIFEGLTNPKHDAKVKELLVSVCNSAVETLVKTTHHALYNTNDNLDANDSCSGSGNGNGVGEGWVERVSSTLAVPSNRKFVLDVTGRVTFETVRSFLEFVLWKLQDGARKGGDSMVDSGLRVVRNPSHLRHHLYGGYTDLDSGEAIVSLT

SEQ ID NO: 59524 - protein, 178 aa, Zea mays
  Coding DNA Sequence Number=SeqID_17745
  Gene Ontology: Mol. function=nucleic acid binding; Cellular component= ribonucleoprotein complex; Biological process=nervous system development
  Homolog annotation: Hit_ID=Q75KB4; Match level="QueryCoverage=93%, HitCoverage=59%, E-value=4e-36, Identity=49%"; Hit description =Putative RNA binding protein
  Pfam annotation: Domain name=RRM_1; Domain location=11-86; Score =45.3; E_value=2.1e-10; Accession=PF00076.12; Description=RNA recognition motif. (a.k.a. RRM, RBD, or
  Pfam annotation: Domain name=RRM_1; Domain location=111-174; Score =55.4; E_value=1.9e-13; Accession=PF00076.12; Description=RNA recognition motif. (a.k.a. RRM, RBD, or
  Pfam module annotation: Pfam domain module=RRM_1::RRM_1; Domain location=11-86::111-174
MEKDNHDPPKIFIGGLPSRGITTRKLRSHFARYGNVVEAVAMEHPDGLGRGFGFVEYEDEAAVLRALDSRESVNHDTFFRCREVDVKRAEKKETISAQISATSNSNAGSKIFVGGLRDNITKDHLINYFGRFGTITDAVVMSDRQTGKARGFGFVTFDSKEATDEVLKDRFHYLMGLE

SEQ ID NO: 59525 - protein, 310 aa, Zea mays
  Coding DNA Sequence Number=SeqID_17746
MEAVHTGEDTCVKAQESCFSDHTQELGPSSVVPFADAGAGVPFVGSLHVSPGGKHPARQVVLAPKDIFSCQSDAAALDGISAISDSFTEVPRVILQALCKKFNIKANMKNSKMAQALSLSARSNDEVMVALQEVVDSFSLTQRVKKNNVDLAEQKICARRTNKDEDTMIKAQRLAAKRNLETSEFSFITYKPKTIISNMKNIGVKLGKNEKEVLQSVVAIKNIEIDRLAVAANSPSPHKITEIENGEDEEIDAELSLITQNWDDDAVPSALNLCYDLNVVPRRKKANRARSIGKGTRLPIKPVTPSKIIL

SEQ ID NO: 59526 - protein, 151 aa, Zea mays
  Coding DNA Sequence Number=SeqID_17747
MTNRKSTTDQDVIGKLNDSDDLTAVATANRRTCVEKQHGTGASRQHAQEQQNATSDEEAESHDKGAWRADWASWTRDRLEQPASRGKGGTCYGRARSGAAGQKEQLRMRQLELGDGQGAWHRKNARRRKKQLDCAAGGAWGKESRSRELST

SEQ ID NO: 59527 - protein, 59 aa, Zea mays
  Coding DNA Sequence Number=SeqID_17748
MALLPPWSTCCESCLVALVVGLESARCCRGASRDAWFDEAPKPWTHEQLESEFDRLMDL

SEQ ID NO: 59528 - protein, 44 aa, Zea mays
  Coding DNA Sequence Number=SeqID_17749
MDKFSGGALRMKCTLGKTAGDLKPNGFGCGFEIAPMGAIMGGFC

SEQ ID NO: 59529 - protein, 122 aa, Zea mays
  Coding DNA Sequence Number=SeqID_17750
  Gene Ontology: Mol. function=nucleic acid binding
  Homolog annotation: Hit_ID=Q2QN68; Match level="QueryCoverage=97%, HitCoverage=40%, E-value=1e-31, Identity=49%"; Hit description=RNA recognition motif family protein, expressed
  Pfam annotation: Domain name=RRM_1; Domain location=7-74; Score=53.0; E_value=1e-12; Accession=PF00076.12; Description=RNA recognition motif. (a.k.a. RRM, RBD, or
MAKMKSAFIGNLPEDVNEEYLRKLFGQFGEVVRVAISRKGQCPVAFVHFAKRSELENAIEEMDGKTVSVARPTADNDKKRSREEVADAADPYESAVNSLPSAVKEVLLRILRLRIGTRYDEQ

SEQ ID NO: 59530 - protein, 341 aa, Zea mays
  Coding DNA Sequence Number=SeqID_17751
  Homolog annotation: Hit_ID=Q2QN67; Match level="QueryCoverage=90%, HitCoverage=90%, E-value=2e-57, Identity=56%"; Hit description =Expressed protein
  Subcellular localization annotation: CTP_CleavageSite=52; ConfidenceScore=5.14e-01
MRRAGGLSRAGHGAAPAAGVMRAAASAFFAGYHCFTSVAALLALPFSAAVLVAEAAAAAPAPAPVALRALAARLRAVFAAAGFPPSPFFALLETKLSQTVFTFADALTVRAHLPAARQGMRRRHDSGTTPRRRDGTGGAGGPASPRSRRAGPSRTRTRPCSPRTSSAPSSCCTPKRRRSRCSCWRSERPTCRGSRPRAWTLALSAAGAVAYSLAVGVAAVVCNLAVVVAATEPGCAGHAAVLRACVAIRGRVSTALALALPTNLGMAAAEALFGLRVVAQRRRDGRLAPAVAAEAFSIAYIHAVCVVLEIIVACVFYRSCKRSEADELRELEPEEKGDLQA

SEQ ID NO: 59531 - protein, 229 aa, Zea mays
  Coding DNA Sequence Number=SeqID_17752
  Gene Ontology: Mol. function=enzyme inhibitor activity
  Pfam annotation: Domain name=PMEI; Domain location=37-179; Score =22.8; E_value=0.00019; Accession=PF04043.6; Description=Plant invertasepectin methylesterase inhibitor
MGQAYPRLVLLALVALLSAGLFPQALGNGKGKVHGGGAVNPLVAGICSRAPFPEVCTATAGRHASKYPVIDNLAVLNMQVAAFAKRTAQARKHVAVAARTIPPPQAQALRTCDTMYMNTQDAIGAAQRAIAFKDTGTAKIMLQLAVQDFDSCDRPFTHAGVPNPMAFHGTLLYHEQLMVTEEEKERSLCREIVNHWISKELQRLERLIDRASEKGSNRLVLKGIRQTGS

SEQ ID NO: 59532 - protein, 97 aa, Zea mays
  Coding DNA Sequence Number=SeqID_17753
PRIASDYRAWVEELSVALENLQAYNNVLHEKVHVLYDQLHPNVPPEVTEMGAGAAGADEGGPYGELDIFRAPPPMNIMDDHPPKASSRSGVTKNVKD

SEQ ID NO: 59533 - protein, 45 aa, Zea mays
  Coding DNA Sequence Number=SeqID_17754
MDVKEDLTCTEQPVKILETAKRYTRRKSSELASEQCLVKSCEETV

SEQ ID NO: 59534 - protein, 499 aa, Zea mays
  Coding DNA Sequence Number=SeqID_17755
  Gene Ontology: Mol. function=protein serine/threonine kinase activity; Cellular component=cytoplasm; Biological process=protein amino acid phosphorylation
  Homolog annotation: Hit_ID=P53683; Match level="QueryCoverage=99%, HitCoverage=100%, E-value=0.0, Identity=81%"; Hit description =Calcium-dependent protein kinase, isoform 2
  Pfam annotation: Domain name=Pkinase; Domain location=83-309; Score =246.4; E_value=6.2e-71; Accession=PF00069.15; Description=Protein kinase domain
  Pfam annotation: Domain name=Pkinase_Tyr; Domain location=83-309; Score=-54.6; E_value=4e-09; Accession=PF07714.7; Description=Protein tyrosine kinase
  Pfam annotation: Domain name=efhand; Domain location=356-384; Score =37.6; E_value=4.4e-08; Accession=PF00036.22; Description=EF hand
  Pfam annotation: Domain name=efhand; Domain location=392-420; Score =27.5; E_value=4.9e-05; Accession=PF00036.22; Description=EF hand
  Pfam annotation: Domain name=efhand; Domain location=428-456; Score =30.4; E_value=6.2e-06; Accession=PF00036.22; Description=EF hand
  Pfam annotation: Domain name=efhand; Domain location=463-491; Score =41.8; E_value=2.4e-09; Accession=PF00036.22; Description=EF hand
  Pfam module annotation: Pfam domain module=Pkinase::Pkinase _Tyr::efhand::efhand::efhand::efhand; Domain location=83-309::83 -309::356-384::392-420::428-456::463-491
  Subcellular localization annotation: CTP_CleavageSite=80; ConfidenceScore=5.01e-01
MGQCCSRAPAPDSGRGGTNGYGYSNQAKPAQTPSSYNPPQQPAEVRYTPPATNPPVVPPVPVPPKPTADTILGKQYEDVRSVYSLGKELGRGQFGVTYLCTEVASGKQYACKSISKRKLTSKADREDIRREIQIMQHLSGQPNIVEFRGAYEDKSNVHVVMELCAGGELFDRIIAKGHYTERAAATICRAVVNVVNICHFMGVMHRDLKPENFLLASKEENAMLKATDFGLSVFIEEGVILYILLSGVPPFWAETEKGIFDAILHEEIDFESQPWPSISESAKDLVRKMLTRDPKKRLTSAQVLQHSWLREGGGASDKPIDSAVLSRMKQFRAMNKLKKMALKVIASNLNEEEIKGLKQMFMNMDTDNSGTITYEELKAGLAKLGSKLSEAEVKQLMEAADVDGNGSIDYVEFITATMHRHKLERDEYLFKAFQYFDKDNSGFITRDELESALIEHEMGDTSTIKEIISEVDTDNDGRINYEEFCAMMRGGMQQPMRLK

SEQ ID NO: 59535 - protein, 91 aa, Zea mays
  Coding DNA Sequence Number=SeqID_17756
  Gene Ontology: Mol. function=hydrolase activity
  Homolog annotation: Hit_ID=Q7F0N4; Match level="QueryCoverage=68%, HitCoverage=13%, E-value=9e-22, Identity=79%"; Hit description=Alpha- rhamnosidase-like protein
MWNPVLFQLPSHELLLFYKIGEHPQKPNVFSWSGAMKRSLNGGMSWLEREQLPPGILGPIKNKGKDQLGSPNLKGTESLQELQQINSQEYH

SEQ ID NO: 59536 - protein, 252 aa, Zea mays
  Coding DNA Sequence Number=SeqID_17757
  Homolog annotation: Hit_ID=Q6QP51; Match level="QueryCoverage=50%, HitCoverage=76%, E-value=3e-08, Identity=30%"; Hit description =Putative growth-regulating factor 1
MAERDRERGIPRKGSFSVKEPGSEPPTTDQGFEGWPSEGFNSRLRSRGPDTHYWSGGHLTQRWPDTRPRQSRSDRRHSTAPLASLTEGQRRLRHSDCSATRQSESDRQSGLAKGTTANSAPPDPRAKTGKTANSAPPDPRARTRAKTRKTANSAPPDPRARTRAKTRKTANSAPPDPRARTRAKTRKTANSAPPDPRARTRAKTRKTANSAPPDPGLGLGLRPGRRRNSASPDPRARTPPWPRPNDFRLARP

SEQ ID NO: 59537 - protein, 160 aa, Zea mays
  Coding DNA Sequence Number=SeqID_17758
  Homolog annotation: Hit_ID=Q6QP51; Match level="QueryCoverage=26%, HitCoverage=19%, E-value=3e-10, Identity=71%"; Hit description =Putative growth-regulating factor 1
  Subcellular localization annotation: CTP_CleavageSite=42; ConfidenceScore=5.17e-01
MQEACNCTKWAHPFDFQRTQHGGLGPRVMQPARRLLRASHCTAAHATTTPPRLRNQYRDSRQPCGPGKGYTPKRVLLREGNRLRASLLIRGSKAGPSEGFNRRLRARGPRTRYWSEVRRPAPRKGSTAPSGYSGSTPTTDQGFIGWPSKGSQPPQTQSEG

SEQ ID NO: 59538 - protein, 626 aa, Zea mays
  Coding DNA Sequence Number=SeqID_17759
  Gene Ontology: Mol. function=nucleic acid binding; Cellular component= nucleus
  Homolog annotation: Hit_ID=Q5F1W8; Match level="QueryCoverage=74%, HitCoverage=100%, E-value=2e-90, Identity=39%"; Hit description =Putative nuclear protein
  Pfam annotation: Domain name=OB_RNB; Domain location=455-511; Score= -4.6; E_value=0.081; Accession=PF08206.2; Description=Ribonuclease B OB domain
  Pfam annotation: Domain name=RRM_1; Domain location=436-492; Score =6.4; E_value=0.036; Accession=PF00076.12; Description=RNA recognition motif. (a.k.a. RRM, RBD, or
  Pfam module annotation: Pfam domain module=OB_RNB::RRM_1; Domain location=455-511::436-492
MGLRRPPARDPLWALYGPMEVSLRVFAGPALRHVQMEYISPERNLEGTCGDPGPLFADQGGSLLDHLGYQGGGIPQHESPTLDHGLLVDPAGAIPYLSTDSPPFMNDQITCNVIKSASASPESCTKQPQEPLNVESDVQNDAAEQNVHNSNSEEQITSLGCDVQQNTEVIDELLPPKLPESSGNDISNFQPETTYSDAYHGDSLLTENSCNSYQLNNSGAPAADIPNSPALQMENEEMGKLHETSHNENSGSEDDQMNGRKPCPISGRDNEKFNTSAVPPSWEQTKQKNPGTRNGSSTPDDQFDSPPDRFARLERDTPSPDGRVSPERFARLERDTPPPDGDISRPGESSHVHSETMEMEPEYRANDDTPPPDGRMSPPVESSHVHSKKMESQHHAKDVGELARFESPQVSPLKGSSQTISKKAFTKTQITPSQSSPSFTKKTLVTTCQQEDWIGTGDSRGFGFLSLDKDEDADAAIRACDETEWNGRIILVEKSKAPAWRIQCEDRLTPYPDIRASVVKVEEALPCPTLGLGLGRRSPPRLTPGLGLNLGLGRWSPPRPTPGLGLNLGLGRWSPPRPTPGLGLNLGLGRNRVLARPRSRPQEKFPSRPNLGSDRPRHGDTSLPYP

SEQ ID NO: 59539 - protein, 111 aa, Zea mays
  Coding DNA Sequence Number=SeqID_17760
MSRGVVARCPVGLPGLEEICRCAAVRVTGKRAAPGTYLHVAQCWAGEDAKRYFHGAVKGPQRISGRRPSKAHPRSVRLVGGGAEWNWKPTSKRLFSCEFVFVYGLENDVTS

SEQ ID NO: 59540 - protein, 223 aa, Zea mays
  Coding DNA Sequence Number=SeqID_17761
  Homolog annotation: Hit_ID=Q337Z8; Match level="QueryCoverage=40%, HitCoverage=89%, E-value=5e-20, Identity=48%"; Hit description =Expressed protein
  Pfam annotation: Domain name=DUF1677; Domain location=76-199; Score =169.1; E_value=1.1e-47; Accession=PF07911.4; Description=Protein of unknown function (DUF1677)
MAMAAPFLATASNNIGSASNGEIKRRQTSADALQRTVSDVSHELHHQQHGVNDNNQEKKAAEAEKHQQLLHPGPEVQDAKCECCGMSEECTTEYIRGVRGRFSGRWVCGLCAEAVTEEAEKNGGTLEEALKAHMGVCKRFNGFGRTHPVLFQAEAMREILRRRAKLGPRSRSSINHREVREADKAGSGRTGIARCSSCMPSITDDFNEGVVDQQKLILDRLVD

SEQ ID NO: 59541 - protein, 478 aa, Zea mays
  Coding DNA Sequence Number=SeqID_17762
  Gene Ontology: Mol. function=calcium ion binding; Cellular component =nucleolus; Biological process=ossification
  Homolog annotation: Hit_ID=Q5Z9C3; Match level="QueryCoverage=73%, HitCoverage=73%, E-value=4e-78, Identity=49%"; Hit description =Dentin sialophosphoprotein-like
  Pfam annotation: Domain name=S-antigen; Domain location=90-369; Score= -257.6; E_value=0.071; Accession=PF05756.2; Description=S-antigen protein
MAARSCVWRMLMISVGVVIVGGHMSSLRLGGTFVDSSCHYVTRVCRSGDVSVLNLLVPHKWIGVNMLHHSNSRNQRNRGSRIKTLLQATLLSGVVFWLLYQVKHSYDKKNEYLDDAEDQLTHNDRSIFQARKQKAGSYSDSNVQMVVDNSDVTTKPEEGDVDHHSDTFDHNEKTVETVFDKDSTNLHEDDKRNTESSEAEGQVNSGDSNTEANNNKNEDETTSLVEGRKHDTESNSAAESKSEVNSTGDELSQNNHAQEENTREASGMSHDEVAHGDESTSASGTWNGSDGEGEKKEAVDTQTGSETLPDDAKTEATDDRGTNSLSDETGNIPSVHTDNSQNDASENQGDATSTTSDSSEHGISEAVHIETGLEHGSATTSSVTGSGDDRDNSSDSSSAGKNTETLSGDDKTNSSSTPHAAPDPYFAESSTLFISPAGSVSGSVKRTACTQTPHFHAFSLLSAALSRARVPAGGPQVS

SEQ ID NO: 59542 - protein, 342 aa, Zea mays
  Coding DNA Sequence Number=SeqID_17763
  Homolog annotation: Hit_ID=Q6BTJ4; Match level="QueryCoverage=58%, HitCoverage=30%, E-value=2e-08, Identity=28%"; Hit description =Similar to CA1621|CaIFF6 Candida albicans CaIFF6 unknown function
MPAERSSGQEPPCLRKNFLVALGLRADLPVHFIDDEKCLKATDLDPHQNRALGVRMVAGFAAGECCARALHGWGVRRGSAWRERASRRSACVWTTGGCGRWRDSRRGSAARGRRACGRPGVREKRRRTCIAVGVREKRRDATNLLAPVEPGPELSGTIIRGTPKTPNLSWSHRKLRIARPQGSDSGLAPEDDELRLARPQGSDSSSAPEDNEFRFARPQGSDSGSAPEDDELRLARPQGSDSGSAPEDDELRLARPQGSDSALASADGLRLARPRGSDSTSASEDRLDLDLGGASTSPNPGLGPTTSQEAPSLPYPKLTQATGNKTGVPSGSPRDPPGSKRR

SEQ ID NO: 59543 - protein, 32 aa, Zea mays
  Coding DNA Sequence Number=SeqID_17764
MGSNSKSPNGGGADASRRNVTVALPRIPPPSS

SEQ ID NO: 59544 - protein, 85 aa, Zea mays
  Coding DNA Sequence Number=SeqID_17765
MADEAIRRNEEESHLASEEAIKVEEVTERDRRIAELSPPPEPYNPNDDPAPKGTLHEIRIVNATIDEGVNRLLSEAAERVLKEDN

SEQ ID NO: 59545 - protein, 155 aa, Zea mays
  Coding DNA Sequence Number=SeqID_17766
MQRPCRMLHYAISERDTAQVAMHDAARRALSQYCSSFGGVPESLHLKMTHHLTGSNPRLISIVNLVIVLNTELDHALDELSRARAEIAELCAERVERRHQEGGSPTPARTQHWYRSPPRGHHAYGTPNCKTKIDLDPYIISVRVCNKFLSQVSPS

SEQ ID NO: 59546 - protein, 171 aa, Zea mays
  Coding DNA Sequence Number=SeqID_17767
MGAGCGFRLALYTMSSVLVFATWALVGAWAAPMSALQERIAEECRRKEKKGSCSGSATKSGLLAEMQVVERAARELNSVLEEIAEEEEEEDDDEGRRWQGIVDEERARDVTKRAEELAVACRTLEETGSALWRPTLCGPCWTSWPTRRERGIRGWGIREDGRERWGSARQS

SEQ ID NO: 59547 - protein, 119 aa, Zea mays
  Coding DNA Sequence Number=SeqID_17768
MKGVSRFGVKGKLAPENEEEIEVEEARTSPPPPPEEPQAGNCFYFDICGAEPDSPITQGKPRQKMMLQVGGIFSKIKFDGGSIMVVMGSTSEKMYLCQVKKQQIFVASVPRWYRKKNQD

SEQ ID NO: 59548 - protein, 163 aa, Zea mays
  Coding DNA Sequence Number=SeqID_17769
  Gene Ontology: Cellular component=intracellular; Biological process =signal transduction
  Homolog annotation: Hit_ID=Q84ZE8; Match level="QueryCoverage=55%, HitCoverage=23%, E-value=5e-31, Identity=78%"; Hit description=Auxin- regulated protein-like
  Subcellular localization annotation: CTP_CleavageSite=44; ConfidenceScore=5.03e-01
AVMPLAESPPWRRKATDFFSTSSVKLKQAGQSAGDNIVDVAGKVGSVVKSRWAVFQEARQQQQQQQRPPHETVQERIITAAASTGLLFRKGISETKEKVAVGKVKVEETPEEKATNHVSGGANDLFGPTVLGRSVRALEAQLNAVGEKGARDGVVELSAVITL

SEQ ID NO: 59549 - protein, 109 aa, Zea mays
  Coding DNA Sequence Number=SeqID_17770
MGGAVRRSFDAFAILRSTMGRLRHLVSAGEPPLNVLTRTMPLRCRAIAVGNLLGAVANTGKSSGVLDAYKGSRSITNLARFGPESPVCRTPAMAPPGMRAPPQPSVGAE

SEQ ID NO: 59550 - protein, 680 aa, Zea mays
  Coding DNA Sequence Number=SeqID_17771
  Gene Ontology: Mol. function=protein serine/threonine kinase activity; Cellular component=integral to membrane; Biological process=protein amino acid phosphorylation
  Homolog annotation: Hit_ID=Q4U3Z9; Match level="QueryCoverage=97%, HitCoverage=97%, E-value=0.0, Identity=63%"; Hit description=Wall -associated kinase 1
  Pfam annotation: Domain name=Pkinase; Domain location=347-627; Score =138.0; E_value=2.6e-38; Accession=PF00069.15; Description=Protein kinase domain
  Pfam annotation: Domain name=Pkinase_Tyr; Domain location=347-615; Score=125.0; E_value=2.1e-34; Accession=PF07714.7; Description =Protein tyrosine kinase
  Pfam annotation: Domain name=WAK; Domain location=153-253; Score= -44.7; E_value=0.066; Accession=PF08488.1; Description=Wall -associated kinase
  Pfam module annotation: Pfam domain module=Pkinase::Pkinase_Tyr::WAK; Domain location=347-627::347-615::153-253
  Subcellular localization annotation: CTP_CleavageSite=56; ConfidenceScore=5.09e-01
MVLLRPWHILFFLTCFSPSFVHPMEPGTYRCSNVSIPYPFGVAGKSPSLSRGFKVVCGHSGPLLSIGNSMLGILDISLLDGLVSILASASSQQCIGGEANSSVNLEGTVFTFSDTRNKFTALGCNVVAMLLNGSTGYSGGCASFCSSGNSIIDGSCSGVACCQAPVPKGLKKLDLEFSNINITNSGIDYGPCGQAFIVEQNSYVFSLPDLNYTVDTKPQYRHVVLEWSVNGSSCEEAKLSGSYACAENAYCYNSSNGIGYRCNCSSGFEGNPYLQGPNGCTGLALLVLLLILGFWTHWLVKKRKLAKTRQRYFMQNGGLMLKQQMFSEEAPLHIFTSSELDKATSNFSDDNIVGRGGFGTVYRGILSNQVVVAIKKAQRVDQTQTEQFINEMIILSQANHKNVVQLLGCCLETEVPLLVYEFITNGALFHHLHNTSVPMSWESRLSIAVETASALAYLHLAAKMPIIHRDVKSSNILLDDNFTAKVSDFGASRPIPHNQTHVTTLVQGTLGYMDPEYFQTSQLTEKSDVYSFGVVLIELLTRKKPIMDDIAEDIRSLALQFSMLFHGNKLLEIVDPVVAEEAGVRHVETVSKLALRCLRLKGEERPRMIDVAIELEALRRLMKQHFILKNESLLQESCCNEEMSIDAPSSLFLGVDGISDDEGMEIIPLTCPSKILTSYP

SEQ ID NO: 59551 - protein, 868 aa, Zea mays
  Coding DNA Sequence Number=SeqID_17772
  Gene Ontology: Mol. function=protein serine/threonine kinase activity; Cellular component=integral to membrane; Biological process=protein amino acid phosphorylation
  Homolog annotation: Hit_ID=Q4U3Z9; Match level="QueryCoverage=82%, HitCoverage=88%, E-value=1e-138, Identity=40%"; Hit description=Wall- associated kinase 1
  Pfam annotation: Domain name=Pkinase; Domain location=511-780; Score =159.9; E_value=6.6e-45; Accession=PF00069.15; Description=Protein kinase domain
  Pfam annotation: Domain name=Pkinase_Tyr; Domain location=511-781; Score=119.7; E_value=8.6e-33; Accession=PF07714.7; Description =Protein tyrosine kinase
  Pfam module annotation: Pfam domain module=Pkinase::Pkinase_Tyr; Domain location=511-780::511-781
MPVKEIHENHATIHVQQRPESRLANDSLAVPCMPSRSPACRPRGRNRRSAADAVARPLALALILVSTLPRAAHSQDLALPPVQPRGVRRTMTCDNIPEPFGTRSRGASRLPGFEVTCGPNREAMLSIGGDAYMIDFVSVSGSYVVVFAEPITQVCYDGKGKPTPDTGTGAKSSEGTTTTFTWSLEGTPFTFSKSNKLVNFGCNRTLMANFFIVPGDSSPLYTSCTTTCNTLQISGSCLGEACCEAPMDQVNGAKAFSLSFERTTANGTGEEDGTCSAAFFLDKDETVFTFSGDEVRPLKTALLPPGERRMVLDWAIGSTSCEQTQSYTFEKLCKYGTCVDAPTGAGYLCKCPSGYDGNPHIQKIREVIDTFLSALTSSNVQGINFYMKVSPSQQPQGINVCDHPEKNPCTYIKYCIDLEGVVSCACPEGMSGDGRKNGVSLVLMVTTTTAASCYCWAVKKRELGRKRAELFRKNGGLLLQQRFSTITSQGEDQYSSKIFSAEELKAATDNYSESRILGRGGQGTVYKGILPDQTVVAIKKSKVFDESQVEQFVNEIAILSQIDHPNVVKLLGCCLETQVPLLVYEFISNGTLFQHIHNRNATRPLTWEDCLRIAAETADALAYLHSASSIPIIHRDIKSSNILLDGNFVAKIADFGASRSVPFDQTHITTLIQGTIGYLDPEYFQSSQLTEKSDVYSFGVVLAELLTRQKPISAARPEDSCNLAMHLVVLFNKGRLLQEIEPHILAEAGEDQCYAVAELSVRCLNVKGEERPAMVVVASVLQELRRSFTIDQAVGIKDESIQENSEQEEKHLHESRSIPSLQSSENEGFKDMLSQPLVYTDVRDTETLAVGQQREEKKLFDYLRGFSN

SEQ ID NO: 59552 - protein, 130 aa, Zea mays
  Coding DNA Sequence Number=SeqID_17773
MACNEVVTPQRGPCAPDPLPPSSLQIDERCRFRFGSGVRSGLLASPGPHRGGWGAWWAGGGGKEQRRRTAKLDLILDALQESSDGEHELERPNNITPDRRSLAMEIVLERKKGFEGVHAHHTWPMSMRLS

SEQ ID NO: 59553 - protein, 345 aa, Zea mays
  Coding DNA Sequence Number=SeqID_17774
  Gene Ontology: Mol. function=DNA binding; Cellular component=nucleus; Biological process=regulation of transcription, DNA-dependent
  Homolog annotation: Hit_ID=Q5Q1K4; Match level="QueryCoverage=95%, HitCoverage=96%, E-value=4e-64, Identity=80%"; Hit description =Floricaula/leafy-like 2
  Pfam annotation: Domain name=FLO_LFY; Domain location=1-334; Score =569.4; E_value=3.5e-168; Accession=PF01698.7; Description=Floricaula Leafy protein
MDPNDAFSAAHPFRWDLGPPAPAAPAPPPPPPPAPQLLPHAPLLSAPRELEDLVAGYGVRPSTVARISELGFTASTLLGMTERELDDMMAALAGLFRWDVLLGERFGLRAALRAERGRVMSLGGRFHTGSTLDAASQEGIHSMCCPTSATPRPAGGLAEGEAGRRMVTAGKKEGQERGWREEGQEGEEEEGAEAVGRAGRRERRRRGRRRRRVQSLAKLGGHKSPTKVTNQVFRYAKKCGASYINKPKMRHYVHCYALHCLDEEASNALRRAYKARGENVGAWRQACYAPLVEIAARHGFDIDAVFSAHPRLTIWYVPTRLRQLCHQARGSHAHAAAGLPPPPMF

SEQ ID NO: 59554 - protein, 130 aa, Zea mays
  Coding DNA Sequence Number=SeqID_17775
  Homolog annotation: Hit_ID=Q7XYW5; Match level="QueryCoverage=68%, HitCoverage=70%, E-value=5e-13, Identity=44%"; Hit description=Seed specific protein Bn15D1B
MARLLWFSLKGKKGTLSTVRPGPEASASAGPHLPSFGIRRAVHASAYDKNLEDQVRPAFVPDDVIGSAGSPDKYWSPHPKTGVFGPAAVDPKLAAGGAPDAGADAAGGTVLDQKVWFRPLEDVEKPPPAA

SEQ ID NO: 59555 - protein, 268 aa, Zea mays
  Coding DNA Sequence Number=SeqID_17776
MGSKQNRTDRMPKDGRWGPADADASGPGRTVERVPFFPLSENQSKRAMAAKIGRWVGVSDWPLHCPLVRVRVEPSDNYRAPDPPINPPFGKRCDGTRKAIRRGRLLFAARLDLLLPCKDRPFGSGGERSGAEEVTKPTVDRQADERVRWVFDSVDSYRLPRFIAPGAPRDHHQRAPCRPPPSERAGAMPAHRRTGTAPAVAVGYCVNKRATEQLRRLLGSSSTDGDGNLPAPDRNVQLCVQLPANGQQHRRPDSDVTLEPPSTLGRLI

SEQ ID NO: 59556 - protein, 385 aa, Zea mays
  Coding DNA Sequence Number=SeqID_17777
  Gene Ontology: Cellular component=mitochondrion
  Homolog annotation: Hit_ID=Q9SI32; Match level="QueryCoverage=80%, HitCoverage=77%, E-value=8e-61, Identity=42%"; Hit description =Expressed protein
  Pfam annotation: Domain name=Scramblase; Domain location=93-342; Score=91.2; E_value=3.2e-24; Accession=PF03803.6; Description =Scramblase
MRWLPRLLSHSIEVGRASAAGRSNPSLVKAGSHGFASGGWDGSPAVPREWLRKLWVDVLKKQKEDARRWGIGASPGNAGSGAEPSLCAFANSVEAAGATREAPSRSYQYEYRGLAGLVVQMSKSNPLLFMFQLLRTRRPFVAEITDAMGNEIFKVRRPFWWINSSIYAEVDGKEIGVVHRRWHLWQRIYDLYLGNRQFAVVENPGFWNWTFSLVDEDDKLLAQIDRNWRGIGFEPFIQYWALPLPDDTAMMVLSHKSQQIHVALFTDAGQYAIRFGDDVQSDKFAHLPFIISGYVGAHFSQLVNVSQKLQTKELHVVRQLTLPERVVALALAISLDSDYFSRRGGWTSVSDCHGVGTRTTICRIQGISLFSFLKRLAVTLITVVR

SEQ ID NO: 59557 - protein, 412 aa, Zea mays
  Coding DNA Sequence Number=SeqID_17778
  Homolog annotation: Hit_ID=Q6IS42; Match level="QueryCoverage=56%, HitCoverage=53%, E-value=3e-07, Identity=24%"; Hit description =Similar to proline rich protein MP4
  Pfam annotation: Domain name=Extensin_2; Domain location=97-410; Score=-138.1; E_value=0.066; Accession=PF04554.4; Description =Extensin-like region
MERAKILIWHPCLLKILRRAYFSNVLLDLLSGKHVQPNHVSWCTNGEHHVDTIGHRHDTDRRTCLCCSRSQDAGDIYVLYFYYRGEAKSVTGTLKTPNSQLVTPISIKLQRPDGLTEGQRRLRHSDCGATRQSESDRQPGLAKSATVNSAPPDPRARTRAKTRKTVNSAPPDPRARTRAKTQKTVNSAPPDPRARTRAKTRKTANSAPPDPRARTRAKTLKTANSAPPDPRARTRAKTRKTANSAPPDPRARTRAKTRKTANSAPPDPGLGLGLGPGRRRTPPRPTPGLKSAPGSAERLPPRPTQGLGFGLATKDRLHLGFGGAPTSPPPRANPPRHRKCLLSSYPDRLGTKGSNPESINSSAGGGMMGLQSSGTTGAPRSLYGSRQTQKSRPGSRWSSSPLRRPPSKARIR

SEQ ID NO: 59558 - protein, 68 aa, Zea mays
  Coding DNA Sequence Number=SeqID_17779
MAERCGAAVTGRAGRSPPILRHRAHSNFGSYKSYPLNRNLVLEICKQMIYTHIVLGTYAQTKKSRYDA

SEQ ID NO: 59559 - protein, 117 aa, Zea mays
  Coding DNA Sequence Number=SeqID_17780
  Subcellular localization annotation: CTP_CleavageSite=62; ConfidenceScore=5.54e-01
MQRRKAGRRLSPASISTSAVVSAVQRPGLFTARSYPWRRYFRDPAVLSNTQALISTPATRITAERAVGGEDCNLDDGEYDLVLEQGAAQEVAPDPAPEPAPEDLPATALEGKPRFIA

SEQ ID NO: 59560 - protein, 256 aa, Zea mays
  Coding DNA Sequence Number=SeqID_17781
  Gene Ontology: Mol. function=RNA-directed DNA polymerase activity; Cellular component=chromatin; Biological process=RNA-dependent DNA replication
  Homolog annotation: Hit_ID=UPI00004C1733; Match level="QueryCoverage =99%, HitCoverage=18%, E-value=1e-104, Identity=76%"; Hit description= UPI00004C1733 related cluster
MAENKALVNGLRIAIELGVRRLDARGNSQLVIDQVMKNSHCRDPKMEAYCDEIRCLEDKFYGLELNHIARRYNEAADELTKIDSGRTMVSPDIFSRDIHQPSVKIDDTPQPEEASAQPEEASAQPEVPSAAEAPRALVGNAFRQGFYWPTAVVDATRIVCSCRGCQFYARQTRLPAQALQTIPITWPFAVWGLDLVGPLQKAPGGFSHLLVVIDKFSKWIEVQPLTSIRSEQAVAFFTNIIHSFGVLNSIITDNGT

SEQ ID NO: 59561 - protein, 235 aa, Zea mays
  Coding DNA Sequence Number=SeqID_17782
  Gene Ontology: Mol. function=RNA-directed DNA polymerase activity; Cellular component=intracellular; Biological process=RNA-dependent DNA replication
  Homolog annotation: Hit_ID=UPI00004C1732; Match level="QueryCoverage =98%, HitCoverage=17%, E-value=1e-108, Identity=77%"; Hit description= UPI00004C1732 related cluster
MPGIPRDVAEHSLDIRAGARPVKQHLCRFDEEKRRAIGEEIHKLMAAGFIKEVFHPEWLANPVLVKKKGATYQRCMNHVFGEHIGRMVKAYVDDIVVKTWKASDLLSDLETTFKCLRAKGVKLNPEKCVFGVPRGMLLGFIVSEWGIEANPEKIAAITNMGPIKDLKGVQRVMGFLAALSRFISRLSERGLPLYRLLRKTERFTWTLEAEEALGNLKALLTNAPILVPPLLDKPS

SEQ ID NO: 59562 - protein, 73 aa, Zea mays
  Coding DNA Sequence Number=SeqID_17783
MGGFHHTTGFHDTPRPPGFLDTPKPSIKKCILLHEVYLLLDCKESIEKHFGIMAVHLESYPQAVSPWLDKVHK

SEQ ID NO: 59563 - protein, 86 aa, Zea mays
  Coding DNA Sequence Number=SeqID_17784
  Subcellular localization annotation: CTP_CleavageSite=78; ConfidenceScore=5.73e-01
MELASAMTALCPLPCCSYCSPSPCQARPPSVPSPSSPQPLSLAALALFSPSPSRARPCPKFSRQPLCFSMIGRKDSCECEKKQIPA

SEQ ID NO: 59564 - protein, 482 aa, Zea mays
  Coding DNA Sequence Number=SeqID_17785
  Gene Ontology: Mol. function=transferase activity; Biological process= biosynthetic process
  Homolog annotation: Hit_ID=Q5VPB6; Match level="QueryCoverage=89%, HitCoverage=85%, E-value=0.0, Identity=84%"; Hit description =Glycosyl transferase family 1 protein-like
  Pfam annotation: Domain name=Glycos_transf_1; Domain location=283 -448; Score=82.0; E_value=1.8e-21; Accession=PF00534.10; Description =Glycosyl transferases group 1
  Subcellular localization annotation: CTP_CleavageSite=37; ConfidenceScore=5.26e-01
MLPLSPSLLSLILLIPFLSLLLLHRSSFPGSSCSPALAGAASHRGRSAAGFEGDLRDIEFSWNHLPFSASRPPPAKLKIAVFSRKWPVATAPGGMERHAHTLHTALAARGHRVHVFTSPPPHTEAAPSPSADGPQLHFLDGEPGQWRCDEAWKLYEAEGENDPFDVIHSESVAVFHRWALGVDKLVVSWHGISLEALHSGIFQDLARGDEEPRSPALNQSLGQSVYRVLSEVRFFRSYAHQVAISDSTGEMLRDVYQIPSRRVHVILNGVDEAQFEPDPPLGRAFREEVGVPKGADLVLGVSGRLVKDKGHPLLYEAFSKLALRHPNVYLLIAGKGPWENRYMDLGRNAKVLGAVPPGKLKAFYNALDVFVDPTLRPQGLDLTLMEAMQCGKPVVATRFPSIKGSIVVDEGFGYMFAPNVESLLESLEAVVAEGARRAAQRGRACREYAKSMFAATKMALAYERLFLCVKNDTFCGYPAEFD

SEQ ID NO: 59565 - protein, 87 aa, Zea mays
  Coding DNA Sequence Number=SeqID_17786
MDIKQRFRGMSSEELRASFSDLAVGSPTQTEGKTYPSGDLSSEEIYVWVGCNTAKFGHLYAAATTRPDNRAAAERKLVEKLKANFNS

SEQ ID NO: 59566 - protein, 110 aa, Zea mays
  Coding DNA Sequence Number=SeqID_17787
  Homolog annotation: Hit_ID=Q8LPU6; Match level="QueryCoverage=45%, HitCoverage=3%, E-value=1e-13, Identity=88%"; Hit description=DNA methyltransferase 101
MDPNKRGSGTALSPWARGLHGDGDCDDVVIATKRQGQADHAMFGSARLHSFTAAAPAVCTGCDLLPDEEVKLSNGQMADLIPWCLPNTGSVERAVVREAGLGRQLPHISH

SEQ ID NO: 59567 - protein, 257 aa, Zea mays
  Coding DNA Sequence Number=SeqID_17788
  Gene Ontology: Mol. function=carboxypeptidase activity
  Homolog annotation: Hit_ID=Q8RUC0; Match level="QueryCoverage=94%, HitCoverage=64%, E-value=1e-102, Identity=69%"; Hit description=Leaf senescence protein-like
  Pfam annotation: Domain name=DUF231; Domain location=88-253; Score =94.3; E_value=3.6e-25; Accession=PF03005.6; Description=Arabidopsis proteins of unknown function
MAWRCRCARISQVEKPKDVSVTDRADPNMILYYEGYNFTMYLFWSPFLVRSEEDVAGVFKLYLDEPDSRWLSVASQLDYVLLSGANWFTRQSYFYEGGQLVGGVYVPLNFTSSLTNQHSHRMAFRTALRALAGARFRGKVILRTLSPMSHFEGGAYDAGGDCRRTRPYRADETAPMGGLELEFYTSQLEEFREAKGLDVVLMDPTAAMLMRPDGHPSRYGHWPDEKRTLYNDCIHWCLPGPIDAWNDMLLHMLSHSS

SEQ ID NO: 59568 - protein, 473 aa, Zea mays
  Coding DNA Sequence Number=SeqID_17789
  Gene Ontology: Mol. function=carboxypeptidase activity
  Homolog annotation: Hit_ID=Q8RV74; Match level="QueryCoverage=99%, HitCoverage=99%, E-value=1e-127, Identity=83%"; Hit description=Leaf senescence protein-like
  Pfam annotation: Domain name=DUF231; Domain location=299-471; Score =99.1; E_value=1.3e-26; Accession=PF03005.6; Description=Arabidopsis proteins of unknown function
MKKLHWLVRFLFGPVPVYFSALAILIVLTNAQYFGLVGVGVAPRTAKLASSAPVVSVMKYCDIFRGEWVPDAEAPYYNHKTCHMIQEHQNCLKYGRPDLGFLKWRWRPSGCELPRFDPLQFLQFARGKSLAFVGDSLARNHMQSLLCLLSQVRWLLRLCARLLLSDDDDNGLLCRRDASDFAQLKLPLPHYTTPPEQRQPHASSELTSRPLCLHGWLQVAYPKDLSANPSDQNKVYHYRAYNFTISMFWSPFLVRAREPDHDGPAHTGHWSLYLDEPDDKWVSQMPRFDYVLVSAANWFSRPSLFYERRRLVGCSFCSRQYGVPDLTLYYSQRRAWRVALRAINDLERLRGRVIVRMLSPMSHFENGTWDHGGDCRRTQPLRANQTAMEGRDLHFYTAQMEEFRAAEKAAAEKGRRLMLMDATAAMLMRPDGHPSRYGHWPNEKVQLYNDCIHWCLPGPIDIWNDMLFQMLLA

SEQ ID NO: 59569 - protein, 112 aa, Zea mays
  Coding DNA Sequence Number=SeqID_17790
  Subcellular localization annotation: CTP_CleavageSite=27; ConfidenceScore=5.47e-01
MVGPTGASLTSLETCSSESKPPRRQVPGPYRSGTLTSSLLTLQNTSRQEDTRQGLWRAPWLTRFLVSFFNDNGNPRYLQVKFIAAVYIGWLLWHCLGDRQAVAERLVPPYRL

SEQ ID NO: 59570 - protein, 53 aa, Zea mays
  Coding DNA Sequence Number=SeqID_17791
  Gene Ontology: Mol. function=receptor activity
  Homolog annotation: Hit_ID=Q3LFT6; Match level="QueryCoverage=72%, HitCoverage=11%, E-value=2e-09, Identity=79%"; Hit description =Putative WD-40 repeat protein
MEKKKVAIPLVCHGDSRPVVDLFYSSVTPVRYFLISASKGRKQLALGRMYLNG

SEQ ID NO: 59571 - protein, 94 aa, Zea mays
  Coding DNA Sequence Number=SeqID_17792
  Homolog annotation: Hit_ID=Q94GH3; Match level="QueryCoverage=65%, HitCoverage=19%, E-value=2e-10, Identity=61%"; Hit description =Putative cell differentiation protein
METITSGQKYRDCRQGHYMSHQIAMTVATNPVSYEGCIQGYSIGSVKVDDTEVISFLLQTEIIPLCLRTMEMGSELSKTSLGIKERIPISCHRG

SEQ ID NO: 59572 - protein, 86 aa, Zea mays
  Coding DNA Sequence Number=SeqID_17793
  Gene Ontology: Mol. function=DNA binding; Biological process=DNA integration
  Homolog annotation: Hit_ID=Q1RSZ9; Match level="QueryCoverage=71%, HitCoverage=4%, E-value=2e-12, Identity=58%"; Hit description =Polynucleotidyl transferase, Ribonuclease H fold
MAIARYSASALERQTTDCRFEDEETSVDDQLRDRRGPKKNIVVEGALEVAKNPLGSSEVVLSWGVLVKAHMLDRVDDIGRGEDEVL

SEQ ID NO: 59573 - protein, 91 aa, Zea mays
  Coding DNA Sequence Number=SeqID_17794
MEIKEREMKDVNKCCPKNFVFCPLKYIKAIPNQYVILKENLSPKDCNLADGEYILVPEQGAAQEVAPDPAPEPAPEDLPATALEGKPRFYA

SEQ ID NO: 59574 - protein, 123 aa, Zea mays
  Coding DNA Sequence Number=SeqID_17795
MRQNYWNGGVVNVVVVEAIDVDTHGKNDDDASLTHVEQYVSEVQRRGLSRADDAVVEIKGGDHRELVYGKVEKKADTTNSQVREHDQNRDMGVAMIIGAGNKGRGERPIGITGTTNKTKPTRW

SEQ ID NO: 59575 - protein, 279 aa, Zea mays
  Coding DNA Sequence Number=SeqID_17796
MAELETKHRRAEARFNLGQSRAEDCEQATNLTQQTTQAGSTARRLGEQRDTLVTKLHGEEGHRQEFPARDLQRNTHARPWELSWARREFSRTSAMRATKLGQALVAGRHGEQQEAARRREERSRRAAVRAERDRAGPQLGKERLGAPWESRARRAGPETRTEQGTRGWRRERRWRESAVARELHGRTVVLSAASSIDPCSHQRKHRTGGSSLGGAEEGAEGARRRRREEGDEGAPAMEQRRTAREIHEVGKKTLEMGAQRARAEAHAGEEEDAGCRGSS

SEQ ID NO: 59576 - protein, 71 aa, Zea mays
  Coding DNA Sequence Number=SeqID_17797
  Homolog annotation: Hit_ID=Q0ZPU8; Match level="QueryCoverage=58%, HitCoverage=9%, E-value=3e-08, Identity=61%"; Hit description=CXE carboxylesterase
MSKSSCVTFDFENGKCCSFPIVVQFHGGGFVTGSNTIVAKDAFCTRVAKLYDVIVFICSRSMFTDSLLFFT

SEQ ID NO: 59577 - protein, 107 aa, Zea mays
  Coding DNA Sequence Number=SeqID_17798
MDQGKEQGAGRGAAGNNKERQEEEVLLVHSQVRRIKKEDEEAFRERLLKLRLLETRPNTGAGGVAWRAPRSLSPLRRAGSAIIPVPLPCVLKSCDPIQEPKPAILRA

SEQ ID NO: 59578 - protein, 44 aa, Zea mays
  Coding DNA Sequence Number=SeqID_17799
MGVQPGQSSSTSLSCVMIRTKVEIWMGVGEMVIEGNISASNICA

SEQ ID NO: 59579 - protein, 80 aa, Zea mays
  Coding DNA Sequence Number=SeqID_17800
MGQDRLAPAYGAPDCPVCQKSQRRNPTMGQDRLAPAYGAPDYRTVSGAQAGAPNELAALGKTQRPRLKFIGLPDVHRTIR

SEQ ID NO: 59580 - protein, 641 aa, Zea mays
  Coding DNA Sequence Number=SeqID_17801
  Gene Ontology: Mol. function=protein kinase activity; Cellular component=integral to membrane; Biological process=protein amino acid phosphorylation
  Homolog annotation: Hit_ID=Q6ERW2; Match level="QueryCoverage=98%, HitCoverage=95%, E-value=0.0, Identity=56%"; Hit description =Putative receptor kinase
  Pfam annotation: Domain name=LRRNT_2; Domain location=30-66; Score =36.6; E_value=8.4e-08; Accession=PF08263.3; Description=Leucine rich repeat N-terminal domain
  Pfam annotation: Domain name=LRR_1; Domain location=120-142; Score =12.6; E_value=1.3; Accession=PF00560.23; Description=Leucine Rich Repeat
  Pfam annotation: Domain name=LRR_1; Domain location=144-166; Score =12.1; E_value=1.5; Accession=PF00560.23; Description=Leucine Rich Repeat
  Pfam annotation: Domain name=LRR_1; Domain location=168-187; Score =11.8; E_value=1.7; Accession=PF00560.23; Description=Leucine Rich Repeat
  Pfam annotation: Domain name=LRR_1; Domain location=191-213; Score =12.3; E_value=1.4; Accession=PF00560.23; Description=Leucine Rich Repeat
  Pfam annotation: Domain name=LRR_1; Domain location=71-94; Score=3.1; E_value=75; Accession=PF00560.23; Description=Leucine Rich Repeat
  Pfam annotation: Domain name=LRR_1; Domain location=96-118; Score =9.3; E_value=5.1; Accession=PF00560.23; Description=Leucine Rich Repeat
  Pfam annotation: Domain name=Pkinase; Domain location=350-616; Score =21.9; E_value=7.2e-10; Accession=PF00069.15; Description=Protein kinase domain
  Pfam annotation: Domain name=Pkinase_Tyr; Domain location=349-616; Score=9.7; E_value=4.6e-13; Accession=PF07714.7; Description=Protein tyrosine kinase
  Pfam module annotation: Pfam domain module=LRRNT_2::LRR_1::LRR_1::LRR_ 1::LRR_1::LRR_1::LRR_1::Pkinase::Pkinase_Tyr; Domain location=30 -66::120-142::144-166::168-187::191-213::71-94::96-118::350-616::
MRWAPGRAAYVLLAAALWCASLTPRAAPDLAADRAALLAFRDAVGQRLPWDAAAASPCGWRGVRCDPAASRVTALQLPGASLVGAVPLGTIGNLTALRTLSLRLNALSGGIPADIGSCTELRHLYLQGNQLDGQVPEGFFDLGLLQRLDLSNNRIAGGVSPGFNRLQRLATLYLENNSLNGTLPSNLDLPKLQLFNVSRNNLTGPVPKSLARMPASAFDGTGLCGNPLAPCPTPPPPPSVPAAANGSISAKLSTGAIAGIAAGAAVAFLVLIAVILFLCFRCQRTMAEKSAETAADADLDGSPVSVTVASMDMKNATRRSSQATAGNSDKKLVFLGAAPDAPYDLESLLHASAEVIGKGWLGTTYRATLEGGATTVAVKRLRAAPIPEREFRDKVIALGALRHENLVPVRAYFYSREEKLIVYDFVGGGSLCSLLHGGSPERLDFEARARIALAAARGVAFIHGAGPRSCHGNIKSSNVLVADARDGAYVTDHGILRLVGAHVPLKRVTGYRAPEVTDPRRASQETDTYSFGVLLLEALTGKPPVNSVPGSTGGVELPLWVRTVVQEEWTAEVFDASIAVEERVEEEMVRLLQLAVECTDDRPDRRPRMAEVVARIEVIVRSAELKAKADTEDDDFHSISP

SEQ ID NO: 59581 - protein, 103 aa, Zea mays
  Coding DNA Sequence Number=SeqID_17802
  Subcellular localization annotation: CTP_CleavageSite=58; ConfidenceScore=5.57e-01
MARLLPAARSFLHRVPGLSARAHPYSPARAFCPTVFSSPRTVFRSLLDHGPGFSTALRTQEFPARTVPLQRGAHAELLAHNRTSFLLGLLSIFLQPWCALLAF

SEQ ID NO: 59582 - protein, 44 aa, Zea mays
  Coding DNA Sequence Number=SeqID_17803
  Gene Ontology: Mol. function=protein serine/threonine kinase activity; Biological process=protein amino acid phosphorylation
  Homolog annotation: Hit_ID=Q8LCP3; Match level="QueryCoverage=94%, HitCoverage=10%, E-value=4e-09, Identity=61%"; Hit description=ATMRK1
MANIIRKCWDPNLDKRPDMDEVVRLLEALDTRKRGGMTPKGQAG

SEQ ID NO: 59583 - protein, 110 aa, Zea mays
  Coding DNA Sequence Number=SeqID_17804
  Gene Ontology: Mol. function=oxidoreductase activity, acting on the CH-OH group of donors, NAD or NADP as acceptor; Cellular component =mitochondrion; Biological process=tricarboxylic acid cycle
  Homolog annotation: Hit_ID=Q1RVD4; Match level="QueryCoverage=92%, HitCoverage=27%, E-value=9e-47, Identity=84%"; Hit description =Isocitrate dehydrogenase, NAD-dependent
MEAMHAPVYFETYEVRGDMPTVPAEVIESIRRNKVCLKGGLATPVGGGVSSLNMQLRKELDLYAALVNCFNLPGLPTRHDNVDIVVIRENTEGEYSGLEHELIRAYGQMC

SEQ ID NO: 59584 - protein, 205 aa, Zea mays
  Coding DNA Sequence Number=SeqID_17805
MGSFRRALTLVHYASGPTCRTHPYPKSAPRNKFDRSLREFIGAAPNPILIPPFSDRCGALAARFWPPLGLPDVEIGEEGPPRTNHGYAVASGSTVGLGASSVIVGCVRCGARVDGQPGGGEFLAVDSICLGSPKSKDSALCVVFAGKDTIHHFAFLPPRFSTVRVWILTPVRWAEEIQRAPRVELCFVAALLIGEEDDTVPLDPI

SEQ ID NO: 59585 - protein, 110 aa, Zea mays
  Coding DNA Sequence Number=SeqID_17806
  Gene Ontology: Mol. function=sugar binding
MVEKHMPLPVVVDIIDTHVYGLQSKALRLSFATNLPSLEVTNESSNSVYERELFLDEFNMRFDEWETRWDWRFSPRPAMEPQDAPLVASTLIDSTTDEPSLVPTLGRANS

SEQ ID NO: 59586 - protein, 487 aa, Zea mays
  Coding DNA Sequence Number=SeqID_17807
  Gene Ontology: Mol. function=motor activity; Cellular component =myosin complex; Biological process=signal transduction
  Homolog annotation: Hit_ID=Q7Y1D5; Match level="QueryCoverage=73%, HitCoverage=24%, E-value=1e-173, Identity=86%"; Hit description =Putative myosin heavy chain
  Pfam annotation: Domain name=IQ; Domain location=183-203; Score=19.9; E_value=0.0095; Accession=PF00612.17; Description=IQ calmodulin -binding motif
  Pfam annotation: Domain name=IQ; Domain location=206-226; Score=23.5; E_value=0.00075; Accession=PF00612.17; Description=IQ calmodulin -binding motif
  Pfam annotation: Domain name=IQ; Domain location=231-251; Score=15.4; E_value=0.21; Accession=PF00612.17; Description=IQ calmodulin-binding motif
  Pfam annotation: Domain name=IQ; Domain location=254-274; Score=9.5; E_value=4.1; Accession=PF00612.17; Description=IQ calmodulin-binding motif
  Pfam annotation: Domain name=IQ; Domain location=279-299; Score=29.8; E_value=9.4e-06; Accession=PF00612.17; Description=IQ calmodulin -binding motif
  Pfam annotation: Domain name=IQ; Domain location=302-322; Score=19.1; E_value=0.015; Accession=PF00612.17; Description=IQ calmodulin -binding motif
  Pfam module annotation: Pfam domain module=IQ::IQ::IQ::IQ::IQ::IQ; Domain location=183-203::206-226::231-251::254-274::279-299::302-322
MVTYQTDLFLDKNIDYAVNEHQVLLNASKCSFVSSLFPPCEESTKSTKFTSIGSSFKQQLQSLLETLSATEPHYIRCIKPNNVLKPAIFENSNVLQQLRCGGVLEAIRISCLGYPTRRTFYEFVNRFGILQPKVLGRSHDEVTAAKMLLDKANLAGYQIGKTKVFLRAGQMAELDALRTEVLGLSAKKIQSKLRSFLARKKYIELQQCATQIQAICRGTTARRRYENLRRDVASLKMQTCYRMHYARKNYVEICSASTNIQSGLRGMGARIKLRLKRQTKAAVIIQSRCRCYLVRSRYVRLVKATITAQCGWRRRVARKELRNLKMAAKETGALQAAKSKLEKEVEELTWRLQLEKRIRMLILGRNSKNNEEERLLVKMLGNCELVRIVRVDALTSSTQKLKLLGEASTRIQTRDLWLWYHIRVDALTSSTQKIKLLEGRNLLIHFNKDVRNTDIPNGNALTDEVKIDLNMLHALVLDGVDGEGRRR

SEQ ID NO: 59587 - protein, 483 aa, Zea mays
  Coding DNA Sequence Number=SeqID_17808
  Gene Ontology: Mol. function=transferase activity
  Homolog annotation: Hit_ID=Q6K2J2; Match level="QueryCoverage=90%, HitCoverage=87%, E-value=1e-88, Identity=44%"; Hit description =Putative quercetin 3-O-glucoside-6''-O-malonyltransferase
  Pfam annotation: Domain name=Transferase; Domain location=22-477; Score=53.5; E_value=1.5e-13; Accession=PF02458.6; Description =Transferase family
MAAATATATATEAAGHHQEQQQRFRVVDTALVAPAAAPALPPRSIPLTFFDVKWLHLPPVERVLLYRLSPDADVPAILSGLRTSLSQALRAFYPMAGHVRMPATNNRRHELCYRPGDAVPFTTAEYNVDIDHLIADDSVPVQVAQLAPLAPHLPKGRAVLAVQATLLLGRRGLAVGVTVHHTTCDGAGSTHFLHTWAAAAAARADEHGHLVIPPPPVIDRELIPDPRGLYDVYLRSMPPMVSQDDFEFVLGKPQDPGEDKALATFTLSQQLLQSIKSAVAHEAARRGMVTPPRCSSILATYGFIWSCYCRARGAAAAAAERSYFLFSVDQRSRLKPAAVPEKYLGNCCCPAIARARADEVSAGGIAGLFAACAAVAAALEEEVREGAQERWDTCVARVKEAAAKGMLSVAGSPRFRVYDLDFGFGRPEKVDMVSVAKTGAISVADARVGGGGVEVGISLPVASGDMDRFRQSVADGMEWLRLL

SEQ ID NO: 59588 - protein, 75 aa, Zea mays
  Coding DNA Sequence Number=SeqID_17809
  Gene Ontology: Mol. function=dimethylaniline monooxygenase (N-oxide -forming) activity; Cellular component=intrinsic to endoplasmic reticulum membrane; Biological process=electron transport
  Homolog annotation: Hit_ID=Q9LMA1; Match level="QueryCoverage=87%, HitCoverage=12%, E-value=1e-10, Identity=56%"; Hit description =Probable flavin-containing monooxygenase 1
MYVQFEFMVMCAGKYADVSWMPVFPPGRGAEVFQGQVMHSVDYCKLGEEGDHGADEEEEGGGHLVQEEQHGDLGS

SEQ ID NO: 59589 - protein, 757 aa, Zea mays
  Coding DNA Sequence Number=SeqID_17810
  Gene Ontology: Mol. function=identical protein binding; Cellular component=cellulose and pectin-containing cell wall; Biological process=negative regulation of enzyme activity
  Homolog annotation: Hit_ID=Q8H4X8; Match level="QueryCoverage=96%, HitCoverage=97%, E-value=0.0, Identity=67%"; Hit description =Putative subtilisin-like serine protease AIR3
  Pfam annotation: Domain name=PA; Domain location=352-460; Score=93.4; E_value=7e-25; Accession=PF02225.12; Description=PA domain
  Pfam annotation: Domain name=Peptidase_S8; Domain location=130-600; Score=7.6; E_value=3.5e-07; Accession=PF00082.12; Description =Subtilase family
  Pfam annotation: Domain name=Subtilisin_N; Domain location=26-118; Score=48.8; E_value=1.8e-11; Accession=PF05922.7; Description =Subtilisin N-terminal Region
  Pfam module annotation: Pfam domain module=PA::Peptidase _S8::Subtilisin_N; Domain location=352-460::130-600::26-118
MATRWRRSLLWVAVVQFLTLCVAEHLSYIVYLGSHAYGRDASAEEHARATQSHHHLLASILGGDDHHHHETARQSIFYSYTKSSINGFAAHLEESVAQQIAEHPEVVAVLESKMLKLHTTRSWDFMDLERDGHVLPGSIWNHARFGQDVIIASLDSGVWPESHSFQDDGGQVPARWKGSCQDTVKYGVACNRKLIGARFFNKDMLFSNPAVVNANWTRDTEGHGTHTLSTAAGGFVPRASLFGYATGTAKGGAPRARVAAYKVCWSGETRPSPMTSSHSSTSLPMLGSLHAAIHGVSVICSAGNSGPYDDTVVNAAPWVTTVAATTVDRDFPNVLTLGNSVRLRGTSLESTTLHSSMLYPMIDAARAARTTSNPYDAASCGLGTLDPAAIRGKIVVCRRGGGGGGDVSRVTKGMAVLEAGGAGMILANDRMDGDDIVADPHVLPATMITYSEAVSLYGYMESTSNPVANISPAKTEVGVKNSPSVAGFSSRGPSGTLPYVLKPDIAAPGVDILAAFTEYVGPTELASDKRRSEYAILSGTSMACPHVSGVIALLKAARPEWSPAAMRSAIMTTARTQDNTGAPMRDHDGKEANAFAYGAGNVHPNRAVDPGLVYDAGPDDYFTFLCAMGISAADMKRLSAGKFACPANSAKEAPAMEDLNYPSIVVPSLRGTQTVTRRLKNVGRPAKYLASWRAPVGITMEVKPRVLEFSKVGEEKEFKVTVTSQQDKLGMGYVFGRLVWTDGTHYVRSPVVVNALA

SEQ ID NO: 59590 - protein, 157 aa, Zea mays
  Coding DNA Sequence Number=SeqID_17811
MLLCRSSLDDSFGLHLRVIFACADLPKVFFLTGPSATKQTPNTTHPQPRSPAAPSPPIHNPIPCRPSRDHPFATCPLPSPDGTGSSKTTTGDGLNHPCDLLRANLEVGGGGAEAGGRVTVYGRKEIMMGEQCQPMDFSGVIYYDAEGHQVAQPPPRR

SEQ ID NO: 59591 - protein, 686 aa, Zea mays
  Coding DNA Sequence Number=SeqID_17812
  Gene Ontology: Mol. function=protein serine/threonine kinase activity; Cellular component=mitochondrion; Biological process =protein amino acid phosphorylation
  Homolog annotation: Hit_ID=Q8LNU1; Match level="QueryCoverage=82%, HitCoverage=84%, E-value=1e-153, Identity=31%"; Hit description =Putative chloroplast RNA processing protein
  Pfam annotation: Domain name=PPR; Domain location=177-211; Score =22.5; E_value=0.0015; Accession=PF01535.11; Description=PPR repeat
  Pfam annotation: Domain name=PPR; Domain location=248-282; Score =19.4; E_value=0.013; Accession=PF01535.11; Description=PPR repeat
  Pfam annotation: Domain name=PPR; Domain location=285-319; Score =50.6; E_value=5.3e-12; Accession=PF01535.11; Description=PPR repeat
  Pfam annotation: Domain name=PPR; Domain location=320-354; Score =39.5; E_value=1.1e-08; Accession=PF01535.11; Description=PPR repeat
  Pfam annotation: Domain name=PPR; Domain location=355-389; Score =48.3; E_value=2.6e-11; Accession=PF01535.11; Description=PPR repeat
  Pfam annotation: Domain name=PPR; Domain location=390-424; Score =34.9; E_value=2.8e-07; Accession=PF01535.11; Description=PPR repeat
  Pfam annotation: Domain name=PPR; Domain location=425-459; Score =32.2; E_value=1.8e-06; Accession=PF01535.11; Description=PPR repeat
  Pfam annotation: Domain name=PPR; Domain location=460-494; Score =50.0; E_value=8.2e-12; Accession=PF01535.11; Description=PPR repeat
  Pfam annotation: Domain name=PPR; Domain location=495-529; Score =45.9; E_value=1.3e-10; Accession=PF01535.11; Description=PPR repeat
  Pfam annotation: Domain name=PPR; Domain location=530-564; Score =28.1; E_value=3.1e-05; Accession=PF01535.11; Description=PPR repeat
  Pfam annotation: Domain name=PPR; Domain location=565-599; Score =18.8; E_value=0.02; Accession=PF01535.11; Description=PPR repeat
  Pfam annotation: Domain name=PPR; Domain location=600-634; Score =49.6; E_value=1.1e-11; Accession=PF01535.11; Description=PPR repeat
  Pfam annotation: Domain name=PPR; Domain location=635-669; Score =52.2; E_value=1.8e-12; Accession=PF01535.11; Description=PPR repeat
  Pfam module annotation: Pfam domain module=PPR::PPR::PPR::PPR::PPR::PP R::PPR::PPR::PPR::PPR::PPR::PPR::PPR; Domain location=177-211::248
  Subcellular localization annotation: CTP_CleavageSite=46; ConfidenceScore=5.35e-01
MGWQNPRMAGHGAWWPSIDGADARSRAQGRRRRRQNRRMRTRKHIVIALKSSYENTPQRGNAVTCPHLLRRLHRSCILLPRRRRILLLAAAVAAASPPPRRACGEGTLRPEDAHDLLDELQRRGTPVLGRDLNGFLAALARAPSSAACGSGPALAVALFNRAASRAQGPRVLSPTSHTYAILMDCCTRAHRPELALAFFGQLLRTGLRVDIIIANHLLKGFCEAKRTDEALDILLHRTPELGCVPDVFSYSILLKSLCDQGKSGQADDLLRMMAEGGAVCSPDVVAYTTVIDCFFKEGDVNKACDLFKEMVQRGIPPDLVTYSSVVHALCKARAMGKAEAFLRQMVNKGVLPDNWTYNNLIYGYSSTGQWKEAVRVFKEMRRHSILPDVVTLNMLMGSLCKYGKIKEARDVFDTMAMKGQNPDVFSYKIMLNGYATKGCLVDMTDLFDLMLGDGIAPDIYTFSVLIKAYANCGMLDKAMIIFNEMRDHGVKPDVVTYTTVIAALCRIGKMDDAMEKFNQMIDQGVAPDKYAYHCLIQGFCTHGSLLKAKELILEIMNNGMRLDIVFFSSIINNLCKLGRIMDAQNIFDLTVNVGQHPDAVVYSMLMDGYCLVGKMEKALRVFDAMVSAGIEPNVVVYGTLVNGYCKIGRIDEGLSLFREMLQKGIKPSTILYNIIIDGLFVVNLEE

SEQ ID NO: 59592 - protein, 124 aa, Zea mays
  Coding DNA Sequence Number=SeqID_17813
  Gene Ontology: Mol. function=motor activity; Cellular component =myosin complex
  Homolog annotation: Hit_ID=Q39158; Match level="QueryCoverage=67%, HitCoverage=5%, E-value=2e-30, Identity=72%"; Hit description=Myosin
  Pfam annotation: Domain name=Myosin_N; Domain location=40-81; Score =36.1; E_value=1.2e-07; Accession=PF02736.9; Description=Myosin N -terminal SH3-like domain
  Subcellular localization annotation: CTP_CleavageSite=39; ConfidenceScore=5.03e-01
MQGYAETGDSTNLIPSVSRPPSCGGAAAASRASKSRFVVGSHVWVEDPDEAWMDGLVEQINGDELVVNCTSGKKVTANVSSAYPKDTESPRGGVEDMTRLAYLHEPGVLQNLKSRFMLNEIYIL

SEQ ID NO: 59593 - protein, 162 aa, Zea mays
  Coding DNA Sequence Number=SeqID_17814
MKQWVSRAMGNVAELTEATGATRARWWSRNGRQTLVSGGGSAWLRAQGERARLRAQMSRGKWVSRVRALKGRGCAEVAGKHEVVGASTAGVRGREVRDGGLTGGVPGPARENVSVLKENTADRTGPQGSGRERGERAHEWDRLTGGGHLVFNSNPNQVSISN

SEQ ID NO: 59594 - protein, 361 aa, Zea mays
  Coding DNA Sequence Number=SeqID_17815
  Gene Ontology: Mol. function=hydrolase activity, acting on ester bonds; Cellular component=cellulose and pectin-containing cell wall; Biological process=lipid metabolic process
  Homolog annotation: Hit_ID=Q6YUV2; Match level="QueryCoverage=95%, HitCoverage=94%, E-value=1e-131, Identity=69%"; Hit description =Putative Anter-specific proline-rich protein APG
  Pfam annotation: Domain name=Lipase_GDSL; Domain location=30-352; Score=158.2; E_value=2.1e-44; Accession=PF00657.12; Description=GDSL- like LipaseAcylhydrolase
MSALRHSLPIILLQLYILSGRPAAAKVPALFVFGDSTVDTGNNNYISTLMKSDFAPYGRDLWPGSGGGSTSSGQSTGRFSNGRLAVDFISEAFGLPPLVPAYLDPDANMSSLATGACFASAGAGYDNATSDLFSVLPLWKELDYFKEYAAKLRTFQGDDKAQETLSEALYIVSMGTNDFLENYYAVPSGHAAQYAAASDYAGYLLGVAESFARKLHALGARKLDLNGLPPMGCLPLERHAATGACTEEYNAVAQAFNAGLRDLVARLDAGLGGGARVVYGDVYGPVADVLADPAAYGFEDVGAGCCGTTGRFEMGYMCNEASLLTCPDAGKYAFWDAIHPTEHLHRFLADRKMNTTLYVFQ

SEQ ID NO: 59595 - protein, 129 aa, Zea mays
  Coding DNA Sequence Number=SeqID_17816
MANMIVSTTLARGTPEGAEYGGVAQRRRGSTLASNRAKTRVAHLKRKHWSTGATTEMQGRLGSTVAKLRLHGENSGERGLGELEVLGANRGVSGADDDEAELTEAVDTAGAERRPQNGRETTTSGGGSF

SEQ ID NO: 59596 - protein, 119 aa, Zea mays
  Coding DNA Sequence Number=SeqID_17817
MATADEKRDRRDPLTRGTRSCVRGGGAKRPRQGHGRHAGTRSLMNGPDLTMRALGYHGDSAATRAHAISAGVGGLGRAGLLGLCRVGEEWAEKTDANGPVVNQRTTERYSGKWPESPKL

SEQ ID NO: 59597 - protein, 360 aa, Zea mays
  Coding DNA Sequence Number=SeqID_17818
  Gene Ontology: Mol. function=hydrolase activity, acting on ester bonds; Cellular component=cellulose and pectin-containing cell wall; Biological process=lipid metabolic process
  Homolog annotation: Hit_ID=Q6YUV1; Match level="QueryCoverage=51%, HitCoverage=51%, E-value=2e-81, Identity=76%"; Hit description =Putative Anter-specific proline-rich protein APG
  Pfam annotation: Domain name=Lipase_GDSL; Domain location=3-226; Score=69.2; E_value=1.3e-17; Accession=PF00657.12; Description=GDSL -like LipaseAcylhydrolase
  Subcellular localization annotation: CTP_CleavageSite=34; ConfidenceScore=5.24e-01
MAMVGRIYGYGPAVPVGPFPTTLRRLRARVGRSRAAAIVRGALHVVSIGTNDFLENYFLLATGRFAQFTVPEFEDFLVAGARAFLARIHRLGARRVTFAGLAAIGCLPLERTTNAFRGGGCVEEYNDVARSYNAKLEAMVRGLRDEFPKLSLVYISVYDSFLDLITNPDKFGLENVEEGCCATGKFEMGLMCNEDSPLTCDDASKYLFWDAFHPTEKVNRLMANHTLQAWTIWKHVEGSTSYNEAADRLARDRIPSSLLRIASPGELRLPSFIAFVVVSSPYASLLGVPPRGPQPSARRPPARTCPCPRPLAQAQSYPVFGVAPVPALNVVPSVQLRRCRGTTSARFVLAVCRFTRAVTL

SEQ ID NO: 59598 - protein, 126 aa, Zea mays
  Coding DNA Sequence Number=SeqID_17819
  Gene Ontology: Mol. function=protein serine/threonine kinase activity; Biological process=protein amino acid phosphorylation
  Homolog annotation: Hit_ID=Q93W00; Match level="QueryCoverage=94%, HitCoverage=19%, E-value=8e-13, Identity=38%"; Hit description =Putative CRK1 protein
MGCVCGRPSSFEDGQCRATPPPAAKLSAAVRREEEARKQQLQLQQHARAGSGREEALERRRAMMAMAAACQVRSPVPRAVEAEQVAVGWPPWLVAVAPEAVRGWVPRRAESFEKLDKMGAVKLCGK

SEQ ID NO: 59599 - protein, 68 aa, Zea mays
  Coding DNA Sequence Number=SeqID_17820
MASYIGRDARVIPATFCGPFELIVLGKLVQTVNGKTQGCDSIAMTSVTDKKAKMESLISSATFVEGGI

SEQ ID NO: 59600 - protein, 152 aa, Zea mays
  Coding DNA Sequence Number=SeqID_17821
MTEGPTIQSDKALVLVSNKLGAGNPHAAHLSVYVSALPPHQEIGMLSLSPTMTDVYLLLGARAYWLLRRGHAMALLGARRDGRHTHLQRGARVCCACLRAVEKRGQSGSEPSARYYIHPLPHANVLQILQLLLENGIRVNELTRIEVALVVP

SEQ ID NO: 59601 - protein, 561 aa, Zea mays
  Coding DNA Sequence Number=SeqID_17822
  Gene Ontology: Mol. function=protein serine/threonine kinase activity; Cellular component=membrane; Biological process=protein amino acid phosphorylation
  Homolog annotation: Hit_ID=Q2HTT4; Match level="QueryCoverage=77%, HitCoverage=89%, E-value=1e-120, Identity=49%"; Hit description =Protein kinase
  Pfam annotation: Domain name=Pkinase; Domain location=262-518; Score =226.6; E_value=5.5e-65; Accession=PF00069.15; Description=Protein kinase domain
  Pfam annotation: Domain name=Pkinase_Tyr; Domain location=262-518; Score=205.5; E_value=1.2e-58; Accession=PF07714.7; Description =Protein tyrosine kinase
  Pfam module annotation: Pfam domain module=Pkinase::Pkinase_Tyr; Domain location=262-518::262-518
MEEQNSWLRTKFSNTVYARVDPRRVPVAPLSKDVERKLHKFFKMKKTVSMPVDRDDGDTGTAFKHCASLPLVRSQPQLDREKVNKPERASLEIPSSSQMISESCKTPKARSLVKTPSSMMLLSYLNKSPSNQGHSSHKAYGSRPRSKSPLPSIVPSEVFREAKSSSQRFASPPPQRGGSAKSIYGKSFGRQVSDMGQSPRWRSTPVVSGKHKSQKDNAWTRKYSGGRRVSAVNPADDRRAQMVRMNQAVQTTVDWTLDPSKLLVGHRFASGAYSRLYRGYYDDNPVAIKFIRQPDDDDNGKMAAMLEKQYNSEINSLSHLYHKNVIKLVAAYKCPPVFYIITEFLPGGSIRSYLNNPENHPIPLERTISIALDVARGLEYIHSQGIVHRDIKPENILFDENLCVKIADFGIACQEALCDVLVEDEGTYRWMAPEMIKQKAYNRKVDVYSFGLLLWEMVSGRIPYENLTPYQVAYAVANRKLTPTISPECPPALRSLIEECCALRPDKRPDFWQIVKVLEQFHSVLLQGGCLDIPKSGPGTCQDPKKRLMRWIQKLKPKHSA

SEQ ID NO: 59602 - protein, 90 aa, Zea mays
  Coding DNA Sequence Number=SeqID_17823
  Subcellular localization annotation: CTP_CleavageSite=36; ConfidenceScore=5.20e-01
MTASSSPSLSLRRRFSVRVLANQVSGKCFAQSIRVSHHHLWKTLRRRRAPPHELVARPTPVTSNDDPHIDMTARGSLVSPKPLSELYYRW

SEQ ID NO: 59603 - protein, 301 aa, Zea mays
  Coding DNA Sequence Number=SeqID_17824
  Gene Ontology: Mol. function=pepsin A activity; Cellular component =anchored to membrane; Biological process=proteolysis
  Homolog annotation: Hit_ID=Q1S463; Match level="QueryCoverage=90%, HitCoverage=71%, E-value=4e-74, Identity=53%"; Hit description =Eukaryotic aspartyl protease
  Pfam annotation: Domain name=Asp; Domain location=1-249; Score= -164.0; E_value=0.00064; Accession=PF00026.14; Description=Eukaryotic aspartyl protease
  Subcellular localization annotation: CTP_CleavageSite=52; ConfidenceScore=5.25e-01
MGAQPPASTSQTSCSTTRCGAQLGGDLGSSNQALDGILGFGQSDSSMLSQLAAARRVRKIFAHCLDTVRGGGIFAIGNVVQPKVKTTPLVPNVTHYNVNLQGISVGGATLQLPTSTFDSGDSKGTIIDSGTTLAYLPREVYRTLLAAVFDKYQDLPLHNYQDFVCFQFSGSIDDGFPVITFSFEGDLTLNVYPDDYLFQNRNDLYCMGFLDGGVQTKDGKDMLLLGDLVLSNKLVVYDLEKEVIGWTDYNCSSSIKIEDDKTGSVYTVDAQNISAGWRFQWHNSLILLILIRTIWSCLVIA

SEQ ID NO: 59604 - protein, 149 aa, Zea mays
  Coding DNA Sequence Number=SeqID_17825
  Gene Ontology: Mol. function=sequence-specific DNA binding; Cellular component=nucleus; Biological process=regulation of transcription, DNA-dependent
  Homolog annotation: Hit_ID=Q84V75; Match level="QueryCoverage=68%, HitCoverage=34%, E-value=4e-40, Identity=81%"; Hit description=M23 protein
  Pfam annotation: Domain name=SRF-TF; Domain location=97-147; Score =118.8; E_value=1.6e-32; Accession=PF00319.9; Description=SRF-type transcription factor (DNA-binding and dimerisation domain)
  Subcellular localization annotation: CTP_CleavageSite=15; ConfidenceScore=5.40e-01
MAKHNPKAQFASKIRVAYTRHASDTKQARTSGISRSKKSSLSGSLPEERHCHTTTPPMLNMMTDLSCGPSSKAKGGQPAAAPGSGGDRQGRGKIEIKRIENTTNRQVTFCKRRNGLLKKAYELSVLCDAEVALVVFSSRGRLYEYANNR

SEQ ID NO: 59605 - protein, 811 aa, Zea mays
  Coding DNA Sequence Number=SeqID_17826
MAYGFSIRGYAASMRGTAELGPFSLAARELQPMEVRAFRWWEDELASIKAAEAEAEKEKEKEAVAGAGAEGEEEEEEEEASGNGRAPKKRSITDLFAEAPAVGAGSGPDAVVDDEEEVLRSIVRRSKELRRKRRLEQAALASVAEEPETSAAGERRAAEGNFPRKKSADKPSLGDELDTSGPSKEHQNDLITEKQKIPDLKRRKHGRLSNSLQKKAERLKYLESRKAVKVGKQRDIKKVLPLHSILKKYTKHTSVKMVKEKHGNSKGTGVIQLCRKSVKRVKFSETDDAKKQCSKRPPLESIRELLSAISSSSSSSIEMSSEEEHVIAESSSSHMTEKAVTMASEANENTNHDNQYELSSTRLSTGLLDLNQALPEPTDLNNPYVPNSEVSNLEQAQVGTWNLDQQVLGNGRKNIDSSFDLHGQEQLRHSTELDTTSKGKSPCTLSNGFQDSVHLQQNWSSMTLHHGVSQLSTGGEPSSFEVRESNISHSEKRNFSSETNVEQELRPSAGQTLRLMGHDLTVSDTRVDYLSDAAQNHTNNTADHLTTKVVLELPRQGQPFLALQTQSIPSVSASSARTAQAHFGYRTTHNISHPLLAANVFSGDPSVYEDRCRDFTNLQSHRNSILGYPPLSNHGSAAFLQNSPPWRYYSDHSTRRDSLSAPFTPTVMQHVATPSDYRANLPHQSYGVYSGSSTVRPLNSASFTCTNQIVQAVDSRATANLPSRSPTTGTTRTHHNSNTSSSSRLVLRSGPVKLSAGAKHILIPNENTEDDNSAPMYSCVSFGSSGGNVSAAYQNKGAAAGQEAACFEADS

SEQ ID NO: 59606 - protein, 58 aa, Zea mays
  Coding DNA Sequence Number=SeqID_17827
MPPPAAPAASERVSLPPRAVEAAVSETGGTDQELSVEDYLEGGVTMFDAQTGLSRCWD

SEQ ID NO: 59607 - protein, 132 aa, Zea mays
  Coding DNA Sequence Number=SeqID_17828
  Gene Ontology: Mol. function=electron carrier activity; Cellular component=membrane; Biological process=electron transport
  Homolog annotation: Hit_ID=Q5QN41; Match level="QueryCoverage=84%, HitCoverage=54%, E-value=7e-30, Identity=46%"; Hit description =Phytocyanin protein-like
  Pfam annotation: Domain name=Cu_bind_like; Domain location=36-113; Score=47.8; E_value=3.6e-11; Accession=PF02298.8; Description =Plastocyanin-like domain
MARRIAGVAALNLLSVLMAATCAAGRDFYVGGRAGWAPNPAEPFNAWAERNRFQVNDTLVFRYSKDADAVLLVSQGHYDACNAAQPAQRLDGGDSRFVFDHSGPYYFISPDAARSKETSKNTEKKRKTTNTE

SEQ ID NO: 59608 - protein, 273 aa, Zea mays
  Coding DNA Sequence Number=SeqID_17829
  Gene Ontology: Mol. function=sequence-specific DNA binding; Cellular component=nucleus; Biological process=regulation of transcription, DNA-dependent
  Homolog annotation: Hit_ID=Q84V75; Match level="QueryCoverage=69%, HitCoverage=49%, E-value=7e-68, Identity=76%"; Hit description=M23 protein
  Pfam annotation: Domain name=K-box; Domain location=81-181; Score =132.7; E_value=1e-36; Accession=PF01486.8; Description=K-box region
MVWKGKKLHLRMDSNIYDKKKWASLLYCSVKSTIERYKKANSDTSNSGTVAEVNAQSLYEVQSHAQTAYILQCSLFILAFYGHDYVVDLKTTPHKHYQQESSKLRQAIDSLQNANSRTIVGDSIHTMGLRELKQMEGKLEKAINKIRARKNELLYAEVEYMQRREMDLQTDNMYLRSKIAENNNETGQPAMNMIGVPSTSEYDHMASFVDSRNFLQVNMQQQQPQHYSHQLQPTTLQLGSLKAAVCFWGAPKTPYLYLQNDGVLRVMKKLGAL

SEQ ID NO: 59609 - protein, 360 aa, Zea mays
  Coding DNA Sequence Number=SeqID_17830
  Homolog annotation: Hit_ID=Q69X95; Match level="QueryCoverage=49%, HitCoverage=22%, E-value=2e-32, Identity=48%"; Hit description =Putative receptor-like protein kinase
  Pfam annotation: Domain name=LRR_1; Domain location=277-299; Score =9.5; E_value=4.7; Accession=PF00560.23; Description=Leucine Rich Repeat
  Pfam annotation: Domain name=LRR_1; Domain location=301-322; Score =12.1; E_value=1.6; Accession=PF00560.23; Description=Leucine Rich Repeat
  Pfam annotation: Domain name=LRR_1; Domain location=324-342; Score =8.1; E_value=8.6; Accession=PF00560.23; Description=Leucine Rich Repeat
  Pfam module annotation: Pfam domain module=LRR_1::LRR_1::LRR_1; Domain location=277-299::301-322::324-342
  Subcellular localization annotation: CTP_CleavageSite=68; ConfidenceScore=5.13e-01
MAMRHAAWLFGKGQMGSAPRVPYYAFTQAHPFPDATSSVGPAHCATATETNQTVQGCCTASVSATVPTASSAGNHHYSRRSLGHPWRPPPLRLLLPTPPSPPISRFVRSTSPSTPVHSRDKLFLRPTPRTMPLSPSPSPPPNATAAAAALPLLLLLVCASSIAAQPLASSQAKALLRVRRLLFYPPALEPLRGAPDPCALPPAPALAVACEGGQVTALSVLGDRDPDAAWRAALPASFSSEALFTTLTRLPALARLSLVGLGAWGPLPGAKLRRLQALQQLNLSSNYFYGAVPDGLARLYSLQSLVLSWNWLNGTVPSLSGLQFLEELDLSHNRLGHVTGPVGREQPHRSRSIRADCDHA

SEQ ID NO: 59610 - protein, 643 aa, Zea mays
  Coding DNA Sequence Number=SeqID_17831
  Gene Ontology: Mol. function=nucleic acid binding; Cellular component= nucleus; Biological process=mRNA polyadenylation
  Homolog annotation: Hit_ID=Q69X94; Match level="QueryCoverage=85%, HitCoverage=86%, E-value=1e-164, Identity=57%"; Hit description =Putative polyadenylate-binding protein
  Pfam annotation: Domain name=PABP; Domain location=515-586; Score =108.6; E_value=1.8e-29; Accession=PF00658.8; Description=Poly -adenylate binding protein, unique domain
  Pfam annotation: Domain name=RRM_1; Domain location=125-195; Score =93.7; E_value=5.5e-25; Accession=PF00076.12; Description=RNA recognition motif. (a.k.a. RRM, RBD, or
  Pfam annotation: Domain name=RRM_1; Domain location=211-281; Score =97.6; E_value=3.8e-26; Accession=PF00076.12; Description=RNA recognition motif. (a.k.a. RRM, RBD, or
  Pfam annotation: Domain name=RRM_1; Domain location=314-384; Score =81.1; E_value=3.5e-21; Accession=PF00076.12; Description=RNA recognition motif. (a.k.a. RRM, RBD, or
  Pfam annotation: Domain name=RRM_1; Domain location=37-108; Score =66.5; E_value=8.7e-17; Accession=PF00076.12; Description=RNA recognition motif. (a.k.a. RRM, RBD, or
  Pfam module annotation: Pfam domain module=PABP::RRM_1::RRM_1::RRM _1::RRM_1; Domain location=515-586::125-195::211-281::314-384::37-108
MASPSTTPSAPIAAEVVPVAEGTPAAVLPPLGSMASLYVGDLAETVDEPQLHALFSQVAPVATVRVCRDILSGVSLGYGYVNFYSRQEATRALEALNFTPLIGKYIRVMFSNRDPSLRKSGRANLFVKNLEPNIDSKNLYEIFSSFGAILSCKVATDSAGQSKGYGFVQYETEESAEAAINGLNGMLANNRKMFVGLHMRRRDREVKFTNVYIKNLPTEFSEDDLRQEFAPFGEITSAVVMRDADGASKCFGFVNFKKPEFAIEAVEKANGKAIGDKTLYVGRAQKKEERKAELKTRFGRGRDNKVDKPNGINLYLKNIDDGINDEGLKKLFEEFGQVASCKVMVDARGRSKGSGFVSFATAEAGQRAINRMNGRIVGKKPLYVGLAQPKEERKAMLMAHFAQRNLAMAASQYAGPQQVYFGHPSSPGPIAPPQGAVFGFPQHFVPGMGPISPVMMPPHNMQRPRYPGPAPYRQQQAMIHANANHMPNARPGPYPAMPPQAFPGAGATAWQQHAVSRTTTAVASAGPADQHQILGNKLYALVEQLERDHAGKVTGMLLEMDKAEILQLLRSPEALRAKVREAMAVLQRTKAGGSVDPAAAAAVAKAGDSAADPPPAAAAAAAAVKAGSSADPGAAAAAPTVNA

SEQ ID NO: 59611 - protein, 425 aa, Zea mays
  Coding DNA Sequence Number=SeqID_17832
  Gene Ontology: Mol. function=protein kinase activity; Cellular component=integral to membrane; Biological process=protein amino acid phosphorylation
  Homolog annotation: Hit_ID=Q69X95; Match level="QueryCoverage=99%, HitCoverage=60%, E-value=1e-158, Identity=65%"; Hit description =Putative receptor-like protein kinase
  Pfam annotation: Domain name=Pkinase; Domain location=163-401; Score=- 106.9; E_value=0.034; Accession=PF00069.15; Description=Protein kinase domain
  Pfam annotation: Domain name=Pkinase_Tyr; Domain location=163-401; Score=-126.2; E_value=0.0001; Accession=PF07714.7; Description =Protein tyrosine kinase
  Pfam module annotation: Pfam domain module=Pkinase::Pkinase_Tyr; Domain location=163-401::163-401
MRGNSSARTVLVAGNCFADAKQQRASSYCNPGALAAVLPPPQGNGGGGQGTGKGREIGMVLAIAGSVVGAALLIALAMVVVLRRARRQRPEATILPKSPAATPTNKADGWKAPAKATQKIITTADKRHASQAARVNTLEVPAYRVCTLEELQEATDNFSSSNLIKTSPLAQDYNGQLQDGSRVLVRCLRLKPKYSSQSLVQYMEIISKLRHRHLVSIIGHCIVSDEENPNIASLVYLVSECVTNGSLRSHLTGMNNLNIEHILLDKTLTSKISNFSLPMISTSKNGKILSETPFAVHEDNDIGSAQNAAQGDKEDIYQIGLILLEVITGKPTESQRQLESLKAQLSEALTEDPDRLKDMADPAIHGTFAVDSLSTVAEIALKCTTGDPSDRPSIDDVLWNLQYSMQVQDGWASSESLGLSVKSQA

SEQ ID NO: 59612 - protein, 158 aa, Zea mays
  Coding DNA Sequence Number=SeqID_17833
  Homolog annotation: Hit_ID=Q6QP51; Match level="QueryCoverage=32%, HitCoverage=23%, E-value=1e-11, Identity=68%"; Hit description =Putative growth-regulating factor 1
  Subcellular localization annotation: CTP_CleavageSite=21; ConfidenceScore=5.07e-01
MAVAGGQEQRPRRQPSSRPIRGQQENPLSRREDNAPVLRFSNGSRTRNGRPANHSPRRINSAGLGKGDTPKRILPREGTRLRASLLIRGSKAGPSEGFDSRLRSRGPYTHYWSEVRRLAPRKGSTTASGYSGSAPTTDQGFEGWPPKGSQPPQTQSEG

SEQ ID NO: 59613 - protein, 342 aa, Zea mays
  Coding DNA Sequence Number=SeqID_17834
  Gene Ontology: Mol. function=oxidoreductase activity; Cellular component=cytosol; Biological process=leukotriene metabolic process
  Homolog annotation: Hit_ID=Q69XJ5; Match level="QueryCoverage=99%, HitCoverage=100%, E-value=1e-132, Identity=68%"; Hit description =Putative allyl alcohol dehydrogenase
  Pfam annotation: Domain name=ADH_zinc_N; Domain location=168-301; Score=81.5; E_value=2.7e-21; Accession=PF00107.16; Description=Zinc -binding dehydrogenase
MEVVNRYVATRHHIEGAPTEADFEVKEEMARWAPDSGEVLVRNLYLSIDPYQLNRMKRSSVTHLAVEGILPGQAASTLLSPSPSVKRITTYAAGEVVASACEEYKAGDKVAGVLGWEDYTLFKPSPAVVMSKVADDAAGFPLSHHINVLGTSGMTAYGGFFEVCKPVKGEKVFVSAASGSVGSLVGQFAKLAGCYVVGCAGTAAKVDLLKGKLGFDDAFNYKEEPDLKSALKRYFPDGIDIYFENVGGEMLEAALANMNPYGPGGAQRRHLRVIYKRITIRGFFAYDFLSKFAEFNAVIGGWVRDGKVQVLEDVSDGLESVPSAFAALFRGQNVGKKLVKLA

SEQ ID NO: 59614 - protein, 108 aa, Zea mays
  Coding DNA Sequence Number=SeqID_17835
MGEGRGGGGGRGVGEAGVEVDSLVPGVGEERGGGGADCGSAAVGRRLTAALVWWERGGGGADCGSAAVGRRLRAAVAWWERIRAMRSGGTGLCGRTWCTIVNVYVEGL

SEQ ID NO: 59615 - protein, 45 aa, Zea mays
  Coding DNA Sequence Number=SeqID_17836
MADRGHCCGSEFTGVYLLDESKQLIYFEDLEQKRRPQPLLSRVLQ

SEQ ID NO: 59616 - protein, 516 aa, Zea mays
  Coding DNA Sequence Number=SeqID_17837
  Gene Ontology: Mol. function=DNA binding; Cellular component =nucleosome; Biological process=chromosome organization and biogenesis (sensu Eukaryota)
  Homolog annotation: Hit_ID=Q6WS85; Match level="QueryCoverage=58%, HitCoverage=98%, E-value=1e-125, Identity=80%"; Hit description =Single myb histone 1
  Pfam annotation: Domain name=Linker_histone; Domain location=352-414; Score=24.5; E_value=3.4e-05; Accession=PF00538.9; Description=linker histone H1 and H5 family
  Pfam annotation: Domain name=Myb_DNA-binding; Domain location=219 -261; Score=21.0; E_value=0.0043; Accession=PF00249.21; Description =Myb-like DNA-binding domain
  Pfam module annotation: Pfam domain module=Linker_histone::Myb_DNA -binding; Domain location=352-414::219-261
MSVYFLLLGRVTGDENARLWPASGGRADLCLSRMERLSPRRASETASGLSSGGGQGQAQDPLEWFPFDATAPLSGSAKPDLGLDATSGPLLPEALSQCARWPMGPRIWGSYPRQSAAMFKFLSISRHCAALEPSPPPLFRITVSSIAPWHARPDRPLARPPRILHRNSVWNSGPDRNRTASLRAPLIKKFSRRANARLRRLDPLVGFLGLDLLWMGAPKQRWTPEEEAALKAGVAKHGPGKWRTILRDSDFSALLRLRSNVDLKVTLGSPGRDKWRNLSVTAGGYGSREKARMALKKGRRVVPKLTAEPMDVDVKDMDDAHDTAIDVEPLAMAFESLPTEESPDKSVARLDDLILEAIRKLKEPSGPSKAAIAAYIEDQYWPPADFQRLLSTKLKALVNSGKLIKVNQKYRIAPSPPPSGRIGTKVSSAEGMKAENNNAKRLTKHQVIAELEKMKGMTKEEAAAFAAKAVAEAEVAIAEAEEAARVAEAAENDAEAAKAFLDAVTLSMRNRNAASM

SEQ ID NO: 59617 - protein, 139 aa, Zea mays
  Coding DNA Sequence Number=SeqID_17838
  Pfam annotation: Domain name=Collagen; Domain location=81-139; Score=- 45.7; E_value=0.075; Accession=PF01391.8; Description=Collagen triple helix repeat (20 copies)
MGVTKRCLEAREVEGLPRHAGDKWKRAPSPLSEDFGDSEYSEEVSSRLEGSDESEVSSDEENSSGLSEERSGDDSDDEGSGSGDDSDGGDGGDGGDDGGRGDGGNSAIKGDDGDNGSKGDGGSDSSKGDGKASGKAPLV

SEQ ID NO: 59618 - protein, 178 aa, Zea mays
  Coding DNA Sequence Number=SeqID_17839
MSTQKEAAPPQGKGLDFDRPFTRMSCAHVLRPTPPRPGLSLLIHDLTINPNKESMKGTSRHAVVAQETASGVVHTRPPPLPGLVGRCILLLTVALLRLAHLTQPPPETVRLFSRRPASAHARQQQTPIRLLPARQVRRGRSRRPTGCLWVGCGWEAQVRPVPPNVRFATFSTNIVMTF

SEQ ID NO: 59619 - protein, 191 aa, Zea mays
  Coding DNA Sequence Number=SeqID_17840
MEKDCQDALRKKRRAHVRLADPRQEVKMARPSAKSAALGAGAESGQMAVVSAGSSAGPVVTATGTKGDTGASEDPWARFCAGGEIASVAAATGVATSVAQQLKYMSVANAIAGRIASGALTSKFVTERQRLERRIERLHTQHTEAARDKSAAENKSCNLLEKLWAVEKEREDLSRRLAREKEGIENARAEA

SEQ ID NO: 59620 - protein, 119 aa, Zea mays
  Coding DNA Sequence Number=SeqID_17841
  Homolog annotation: Hit_ID=Q8W4H2; Match level="QueryCoverage=36%, HitCoverage=7%, E-value=2e-10, Identity=65%"; Hit description =Receptor-like protein kinase
MAPGEGGDTSPFLNGDFGEFGYVAPEYASNPVGTMKGDAYAFGVILFELVSGQEAAAVVTDVTEVILLENVELTLEAFDYMQLPFTLKDVQREMKNVEKDIRVATKRNDMLSAKVRSCV

SEQ ID NO: 59621 - protein, 75 aa, Zea mays
  Coding DNA Sequence Number=SeqID_17842
MESYKVDTDRCTQCSRRNDAKERDQLWSSGRSEQSRWDGNGLSAMRLRDCLRNQKSIHLLRIYTGAEGGEKGNEQ

SEQ ID NO: 59622 - protein, 103 aa, Zea mays
  Coding DNA Sequence Number=SeqID_17843
MTIHFGSLNFIINDRGTMISAPEALVLLMNESINISRSLGGLRLGSLQGGVWRRCALQPAYVEIVGMVDPVWNSFHDVLLQGQKVALAPHHVGLAMIQPKSAL

SEQ ID NO: 59623 - protein, 136 aa, Zea mays
  Coding DNA Sequence Number=SeqID_17844
MDYVESHGSSLVELLDNARCHIWDIVDCSIHRGATVALLVGDLRFDCGLWDVVGPPSSLSNKGLEDVLEGFNEVASRIIQRLPPTALYPWIETDFLGEVALGDGWRFTLSRVHRGAAVPLTIAQLHFLGNLHDAIG

SEQ ID NO: 59624 - protein, 214 aa, Zea mays
  Coding DNA Sequence Number=SeqID_17845
  Homolog annotation: Hit_ID=Q6QP51; Match level="QueryCoverage=77%, HitCoverage=97%, E-value=2e-23, Identity=50%"; Hit description =Putative growth-regulating factor 1
MQAGMEQKKPNRRVRSVDRERGYFERDPSPRRKRAPSPPTDQGFEGCPPGKGSTAAPEHSGFRLITDQRFEGWPLGRVRQPPQSTRAPRPLLIRGSKAGPSEGFDSRPEHAERGMTLGTSDTWRGSSYAPEEKVSASPDPRARPSPSASEGGLRLARPQGPASTSTSEGIESLPDPGLGLRRSLRLARPWARTDHAARGLKRSSDGHDTAYTGL

SEQ ID NO: 59625 - protein, 163 aa, Zea mays
  Coding DNA Sequence Number=SeqID_17846
  Gene Ontology: Mol. function=metal ion binding; Cellular component =integral to membrane; Biological process=defense response
  Homolog annotation: Hit_ID=Q5Z6U9; Match level="QueryCoverage=43%, HitCoverage=34%, E-value=2e-25, Identity=68%"; Hit description=EL5 -like
  Pfam annotation: Domain name=PHD; Domain location=104-149; Score= -1.7; E_value=0.084; Accession=PF00628.19; Description=PHD-finger
  Pfam annotation: Domain name=zf-C3HC4; Domain location=105-146; Score= 27.0; E_value=6.7e-05; Accession=PF00097.15; Description=Zinc finger, C3HC4 type (RING finger)
  Pfam module annotation: Pfam domain module=PHD::zf-C3HC4; Domain location=104-149::105-146
MSVGAFLLLLSCLCSLHQGYRNSRANAAADDAAAAAAALAARPQAPPPRPEPWDNQEQWLRRHRSDRDDDGRTRRASLTAGLPSFTYNRTVRHNVTGSGDEAATCSVCLGAFQVGETVRLLPVCMHLYHVECIDPWLEAHATCPLCRSGTEESTMHGRLLLPV

SEQ ID NO: 59626 - protein, 206 aa, Zea mays
  Coding DNA Sequence Number=SeqID_17847
  Subcellular localization annotation: CTP_CleavageSite=86; ConfidenceScore=5.18e-01
MGCTEGAPNGCSPRPSSGFLRIIYSKVFLLCPFAENYPFCFSQPWARTTSVSVSRLLHQRSLVTRSTRRRSSPPSPRGLRLPSLPPASSDDSDDSQGIAAEVWTYIRAVERAGLEGSDESEYSSGEEDSDGGEEGEDDDDDDDDDDGDDGDGGSSGRGGGDGRGSTKGGSGGGGDSTRGSSRGSTRGGGGGRGRGQWLDATGLLRY

SEQ ID NO: 59627 - protein, 91 aa, Zea mays
  Coding DNA Sequence Number=SeqID_17848
MGLWWRTTAPRCVALVLVSGSYLGGVQNICTKTPKKKSYKDLLVTVTRNHHFDAKDRKETKKQEPGLFNNVTESLRRGRIVLKGNGMDKAN

SEQ ID NO: 59628 - protein, 145 aa, Zea mays
  Coding DNA Sequence Number=SeqID_17849
  Subcellular localization annotation: CTP_CleavageSite=34; ConfidenceScore=5.02e-01
MRCFSIYQQPVQPRQRFGITPRRGGGKAKRVPTRHQQRRQPLRKGDREKETLRLAGHQPRAPPPDATQEALIGRQQSIVIVHALLPASSAAAKRYTYADSVDVSDEAMQPMPDALYLYQPARPLELNLNGSNLSVSISRHPVKKS

SEQ ID NO: 59629 - protein, 1080 aa, Zea mays
  Coding DNA Sequence Number=SeqID_17850
  Gene Ontology: Mol. function=protein serine/threonine kinase activity; Cellular component=integral to membrane; Biological process=protein amino acid phosphorylation
  Homolog annotation: Hit_ID=Q9LKZ5; Match level="QueryCoverage=83%, HitCoverage=94%, E-value=0.0, Identity=58%"; Hit description =Receptor-like protein kinase 2
  Pfam annotation: Domain name=LRR_1; Domain location=161-183; Score =11.2; E_value=2.3; Accession=PF00560.23; Description=Leucine Rich Repeat
  Pfam annotation: Domain name=LRR_1; Domain location=185-208; Score =13.3; E_value=0.87; Accession=PF00560.23; Description=Leucine Rich Repeat
  Pfam annotation: Domain name=LRR_1; Domain location=210-232; Score =10.1; E_value=3.7; Accession=PF00560.23; Description=Leucine Rich Repeat
  Pfam annotation: Domain name=LRR_1; Domain location=234-256; Score =15.7; E_value=0.16; Accession=PF00560.23; Description=Leucine Rich Repeat
  Pfam annotation: Domain name=LRR_1; Domain location=258-281; Score =4.5; E_value=41; Accession=PF00560.23; Description=Leucine Rich Repeat
  Pfam annotation: Domain name=LRR_1; Domain location=283-305; Score =11.8; E_value=1.8; Accession=PF00560.23; Description=Leucine Rich Repeat
  Pfam annotation: Domain name=LRR_1; Domain location=307-329; Score =12.2; E_value=1.5; Accession=PF00560.23; Description=Leucine Rich Repeat
  Pfam annotation: Domain name=LRR_1; Domain location=331-353; Score =19.7; E_value=0.011; Accession=PF00560.23; Description=Leucine Rich Repeat
  Pfam annotation: Domain name=LRR_1; Domain location=355-377; Score =9.1; E_value=5.7; Accession=PF00560.23; Description=Leucine Rich Repeat
  Pfam annotation: Domain name=LRR_1; Domain location=379-401; Score =9.0; E_value=6; Accession=PF00560.23; Description=Leucine Rich Repeat
  Pfam annotation: Domain name=LRR_1; Domain location=403-422; Score =14.9; E_value=0.28; Accession=PF00560.23; Description=Leucine Rich Repeat
  Pfam annotation: Domain name=LRR_1; Domain location=427-449; Score =4.9; E_value=35; Accession=PF00560.23; Description=Leucine Rich Repeat
  Pfam annotation: Domain name=LRR_1; Domain location=451-473; Score =9.3; E_value=5.2; Accession=PF00560.23; Description=Leucine Rich Repeat
  Pfam annotation: Domain name=LRR_1; Domain location=475-497; Score =6.4; E_value=18; Accession=PF00560.23; Description=Leucine Rich Repeat
  Pfam annotation: Domain name=LRR_1; Domain location=500-522; Score =14.7; E_value=0.35; Accession=PF00560.23; Description=Leucine Rich Repeat
  Pfam annotation: Domain name=LRR_1; Domain location=524-546; Score =8.2; E_value=8.3; Accession=PF00560.23; Description=Leucine Rich Repeat
  Pfam annotation: Domain name=LRR_1; Domain location=548-570; Score =6.4; E_value=18; Accession=PF00560.23; Description=Leucine Rich Repeat
  Pfam annotation: Domain name=LRR_1; Domain location=572-594; Score =14.0; E_value=0.54; Accession=PF00560.23; Description=Leucine Rich Repeat
  Pfam annotation: Domain name=LRR_1; Domain location=596-618; Score =6.4; E_value=18; Accession=PF00560.23; Description=Leucine Rich Repeat
  Pfam annotation: Domain name=LRR_1; Domain location=620-641; Score =6.7; E_value=16; Accession=PF00560.23; Description=Leucine Rich Repeat
  Pfam annotation: Domain name=Pkinase; Domain location=738-1009; Score= 124.7; E_value=2.6e-34; Accession=PF00069.15; Description=Protein kinase domain
  Pfam annotation: Domain name=Pkinase_Tyr; Domain location=738-1009; Score=135.8; E_value=1.2e-37; Accession=PF07714.7; Description =Protein tyrosine kinase
  Pfam module annotation: Pfam domain module=LRR_1::LRR_1::LRR_1::LRR _1::LRR_1::LRR_1::LRR_1::LRR_1::LRR_1::LRR_1::LRR_1::LRR_1::LRR _1::LRR_1::LRR_1::LRR_1::LRR_1::LRR_1::LRR_1::LRR_1::Pkinase::Pki
  Pfam module annotation: Domain location=161-183::185-208::210 -232::234-256::258-281::283-305::307-329::331-353::355-377::379 -401::403-422::427-449::451-473::475-497::500-522::524-546::548 -570::572-594::596-618::620-641::738-1009::738-1009
MTSRSMLSLRFGHEGLWLHCPEVSFPLRKRENDIAGFMIGVSARYFIKSIVRSSLVRFPKAARSGPPTPPSRGEAEGVEGRRDDVVALGRDRSGGHCPDHVSFWRMVKSRLSKRMDDPGNVQAYYLARQLSMFRTSLRQRLSVAANGFYGPIPPSLARLQLLVHLNLSNNAFNGSFPPALARLRALRVLDLYNNNLTSATLPLEVTHMPMLRHLHLGGNFFSGEIPPEYGRWPRLQYLAVSGNELSGKIPPELGNLTSLRELYIGYYNSYTGGLPPELGNLTELVRLDAANCGLSGEIPPELGRLQNLDTLFLQVNGLTGSIPSELGYLRSLSSLDLSNNALTGEIPASFSELKNLTLLNLFRNKLRGDIPGFVGDLPSLEVLQLWENNFTGGVPRRLGRNGRLQLLDLSSNKLTGTLPPELCAGGKLQTLIALGNFLFGAIPDSLGQCKSLSRVRLGENYLNGSIPKGLFELPKLTQVELQDNLLTGNFPAVIGAAAPNLGEISLSNNQLTGALPASLGNFSGVQKLLLDQNAFSGAIPPEIGRLQQLSKADLSSNKFEGGVPPEVGKCRLLTYLDMSQNNLSGKIPPAISGMRILNYLNLSRNHLDGEIPPSIATMQSLTAVDFSYNNLSGLVPGTGQFSYFNATSFVGNPGLCGPYLGPCGAGIGGADHSVHGHGWLTNTVKLLIVLGLLICSIAFAVAAILKARSLKKASEARVWKLTAFQRLDFTSDDVLDCLKEEHIIGKGGAGIVYKGAMPNGELVAVKRLPAMGRGSSHDHGFSAEIQTLGRIRHRHIVRLLGFCSNNETNLLVYEYMPNGSLGEMLHGKKGGHLHWDTRYSIAIEAAKGLCYLHHDCSPLILHRDVKSNNILLDSNFEAHVADFGLAKFLQDSGASECMSAIAGSYGYIAPEYAYTLKVDEKSDVYSFGVVLLELVTGRKPVGEFGDGVDIVQWAKMTTNSNKEQVMKVLDPRLSTVPLHEVTHVFYVALLCTEEQSVQRPTMREVVQILSELPKPPSTKQGEENSTKQGEEVPNSGDGSAPSPLHSAPVGTNEAPAVEARDHQQQTSSPSSPPPPDLISI

SEQ ID NO: 59630 - protein, 396 aa, Zea mays
  Coding DNA Sequence Number=SeqID_17851
  Gene Ontology: Mol. function=L-lactate dehydrogenase activity; Cellular component=glyoxysome; Biological process=tricarboxylic acid cycle intermediate metabolic process
  Homolog annotation: Hit_ID=Q42972; Match level="QueryCoverage=98%, HitCoverage=99%, E-value=1e-152, Identity=72%"; Hit description =Malate dehydrogenase, glyoxysomal precursor
  Pfam annotation: Domain name=Ldh_1_C; Domain location=192-361; Score =215.5; E_value=1.2e-61; Accession=PF02866.8; Description =lactatemalate dehydrogenase, alphabeta C-t
  Pfam annotation: Domain name=Ldh_1_N; Domain location=47-190; Score =242.9; E_value=6.9e-70; Accession=PF00056.13; Description =lactatemalate dehydrogenase, NAD binding do
  Pfam module annotation: Pfam domain module=Ldh_1_C::Ldh_1_N; Domain location=192-361::47-190
MQPDANAPSHRLARVAAHLNPQRPQMEEGASALRLVVCRAKGGAPGFKVAILGAAGGIGQPLSLLMKMNPLVSVLHLYDVVNTPGVTADVSHMDTSAVVRGFLGAQQLDAALTGMDLVIIPAGLPRKPGMTRDDLFNKNAGIVRTLCEGVARCCPNAIVNLISNPVNSTVPIAAEVFKKAGTYDPKRLLGVTTLDVARANTFVAEVLGVDPRDVSVPVVGGHAGITILPLLSQVTPPSSFTQDETRYLTDRIQNGGTEVVEAKAGSGSATLSMKKKSQAFAASKFADACLRAMRGEAGIVECSYVASEVTELPFFATKVRLGRGGAEEILPLGPLNDFERIVIPSRQNLLDDEFSRSPKSNGLTLIGSLGENRAGLEAAKKELGESIQKGIAFMSK

SEQ ID NO: 59631 - protein, 177 aa, Zea mays
  Coding DNA Sequence Number=SeqID_17852
  Homolog annotation: Hit_ID=P56766; Match level="QueryCoverage=25%, HitCoverage=6%, E-value=3e-14, Identity=91%"; Hit description =Photosystem I P700 chlorophyll a apoprotein A1
  Subcellular localization annotation: CTP_CleavageSite=16; ConfidenceScore=5.07e-01
MAPGPGWLISFLRHCRCGMMQYAVCAGRRASFSASVAEPARVSVVGSGSSSYVLYAPYPYLATNYGTQLSLFTHHMWIGGFLIVGAAAHAVIFMNKKLTTLSLNKKLRIIFMAISVSCSYIFMAIHVLYGWSLERSSDAPSTGAKVRADRWLPGTSPPPHHHHQIAARCNRCEQIAA

SEQ ID NO: 59632 - protein, 467 aa, Zea mays
  Coding DNA Sequence Number=SeqID_17853
  Gene Ontology: Mol. function=pepsin A activity; Cellular component =cellulose and pectin-containing cell wall; Biological process =proteolysis
  Homolog annotation: Hit_ID=Q69QQ2; Match level="QueryCoverage=81%, HitCoverage=79%, E-value=7e-73, Identity=42%"; Hit description =Putative nucleoid DNA-binding protein cnd41
  Pfam annotation: Domain name=Asp; Domain location=125-464; Score= -96.2; E_value=6.3e-08; Accession=PF00026.14; Description=Eukaryotic aspartyl protease
  Subcellular localization annotation: CTP_CleavageSite=54; ConfidenceScore=5.43e-01
MAAYWILHMALLLLSITSQQVLAARQQHRHTISVHQSSLLPSSMCSSSPPAPVSRSGAGNTIQIVHRACLQSGDRKTVPDHHPHYTGILRRDHNRVRSIHRRLTGAGDTAATIPASLGLAFHSLEYVVTIGIGTPARNFTVLFDTGSDLTWVQCKPCTDSCYQQQEPLFDPSKSSTYVDVPCGTPQCKIGGGQDLTCGGTTCEYSVKYGDQSVTRGNLAQEAFTLSPSAPPAAGVVFGCSHEYSSGVKGAEEEMSVAGLLGLGRGDSSILSQTRRGNSGDVFSYCLPPRGSSAGYLTIGAAAPPQSNLSFTPLVTDNSQLSSVYVTPRLSTSARSSTPAPVITHMPAAAYYVLRDEFRRHMGGYTMLPEGHVESLDTCYDVTGHDVVTAPPVALEFGGGARIDVDASGILLVFAVDASGQSLTLACLAFVPTNLPGFVIIGNMQQRAYNVVFDVEGRRIGFGANGCS

SEQ ID NO: 59633 - protein, 109 aa, Zea mays
  Coding DNA Sequence Number=SeqID_17854
MQPVKFQAVAPHAVEDLLEVVDEVLQVHGFDHHIVNTDLVISQVTVQESMEQPTKSDERVFLFGGEAGTDDRRLVFIGKTKVGSLGFFDQSQGGSGRCFICGDCEVIPW

SEQ ID NO: 59634 - protein, 75 aa, Zea mays
  Coding DNA Sequence Number=SeqID_17855
MGRGHQVGEEEQGKCRHILKMCSRYKDETLERFAGFRGRAVLNFDTTLKVVVILKTPIVLFFPPFNDELVIAVFI

SEQ ID NO: 59635 - protein, 74 aa, Zea mays
  Coding DNA Sequence Number=SeqID_17856
MTGDARAIAAAGCHRGLAWTGHLGLPPAQPTPWLGAPSTRDGSAGPAALGRRRRAPARQGRSPFPYFVLKFENS

SEQ ID NO: 59636 - protein, 385 aa, Zea mays
  Coding DNA Sequence Number=SeqID_17857
  Gene Ontology: Mol. function=GPI anchor binding; Cellular component =membrane; Biological process=cell wall catabolic process
  Homolog annotation: Hit_ID=Q4VVD8; Match level="QueryCoverage=52%, HitCoverage=49%, E-value=3e-86, Identity=77%"; Hit description=LysM -domain GPI-anchored protein
  Pfam annotation: Domain name=LysM; Domain location=139-188; Score =9.1; E_value=0.064; Accession=PF01476.10; Description=LysM domain
  Pfam annotation: Domain name=LysM; Domain location=208-250; Score =36.1; E_value=1.3e-07; Accession=PF01476.10; Description=LysM domain
  Pfam module annotation: Pfam domain module=LysM::LysM; Domain location=139-188::208-250
  Subcellular localization annotation: CTP_CleavageSite=38; ConfidenceScore=5.23e-01
VEEHYSHELHSPSSHSQVLASLGMVKSRGFVMAAVMVVAAVVVVVSVAPRGAEVKTTIEPCSGSDSCPALLGYTLYADMKVSEVAALFVVDPVALLATNALDFGAPGAAHRILPMGLFVRVPTRCSCADGVRKSVSVRYTACPADTLATVSDVVFAGLASSDQIRNENGLTSADPDAPLDAGQKLAIPLPCVCFNSSDNNLPAVYLSYVVQVGDTVPAIAASYETTVTDVMNVNAMGSPVAAPGDILAIPLPARQPPPCPSPTIEAPSPVAPAPDLAPVADPALALCGSAVGLCAGVLRRLPPAQKIIVFKNGNGTLSSSGGSATKAETDSPMAASSWSFTQDCTDELICSTVDSIDSDGRISVPSLPVSDAGGSGMRLLLLLDD

SEQ ID NO: 59637 - protein, 93 aa, Zea mays
  Coding DNA Sequence Number=SeqID_17858
MVDVLTACRGAGSSALVARLLLLGARRGAGCARVARRLGVAWGRKQGGERGRGRRERKRKADGQRRTGGYQGRSGGGCEPRGEGGAGFSFKKK

SEQ ID NO: 59638 - protein, 109 aa, Zea mays
  Coding DNA Sequence Number=SeqID_17859
MTSWSPDLKIVFQLLAKINLQTFAPQFGEGSFMQWWQRCSDQLRGIAKKGFNSLITLRLWTLWNHRNGCVFDKILPNLGAAIRKAEERDLWVLAGAKNLDLLTAPIPGL

SEQ ID NO: 59639 - protein, 32 aa, Zea mays
  Coding DNA Sequence Number=SeqID_17860
MTREAGQGSGSSERMGGHAIYVAICLFSVVPS

SEQ ID NO: 59640 - protein, 126 aa, Zea mays
  Coding DNA Sequence Number=SeqID_17861
  Homolog annotation: Hit_ID=Q6ASU1; Match level="QueryCoverage=70%, HitCoverage=27%, E-value=1e-26, Identity=67%"; Hit description =Expressed protein
MAPLLNDPGGASAVTACLRGFGSGAGNDSLCRWLYDVFRSNVPELQLALLVPSLARAHLCHAMSRKPLAGFEAVLLALYAHVASQRDAGEVETRDHIAPEPGKDFGTSQREPVGKIEQVQSIGEVH

SEQ ID NO: 59641 - protein, 229 aa, Zea mays
  Coding DNA Sequence Number=SeqID_17862
MGCHILVSASYVTRKMSSSTHSSVLRLLLGDLDQNPLFCWTAGRCPATERNFARWWGCAVKKVPKEKRREFNSLVMLVAWTIWNIGMRDFLRVLVLVFPCSLASLLEESKFQQLPLPCEDLPRQQPWHGSNPVSMGETALEKRKLETLQDDRRASSGADRQAMEEKVCFRQTTRSQEVADVEDGTKQKLCLGRHRQDETTPSSWDQMRKPEHEPEPTSRGTPYGQAHNT

SEQ ID NO: 59642 - protein, 387 aa, Zea mays
  Coding DNA Sequence Number=SeqID_17863
  Homolog annotation: Hit_ID=Q67VX6; Match level="QueryCoverage=9%, HitCoverage=7%, E-value=6e-08, Identity=68%"; Hit description=Ulp1 protease-like
MWGSRRLQGAKCNPLEGGCRPRSGRRREALESAGVGRGGEGTRGKGVEGTHLGHRVFEYSRFLKEEWNYLNENISSKECPLRETVWKNLPRKVEKKIVEAIRHNLPTDRAPDPDGFTNFTNPVGWSSNLILWLQSSPYNKITCRLPGWKASHSNKFGLAVLVKSPERRKANEKIFENSRRHTQWVCPRGVLRQEGSRWPRRADGKHKRASSPPSEDFGESEYSEEVSSESDRFTCPGFSPRRHPRTRMTPWGLSTVARAYWRSIERAGLGGSDESGVSSDEADSSDSSEEWSGGDGDDKDDGSSSCDDDKGDNDKGDGDNSDNSGKGDGGDDSSDDDKGDGDGSGGDDSGKGDDDSGKGDGSGDSDGSGDSDGSGKGGKAIGIMPLI

SEQ ID NO: 59643 - protein, 90 aa, Zea mays
  Coding DNA Sequence Number=SeqID_17864
FGGQPRLLGALSPEREAGRVQQDVEACEPPQRGWESQRPAGGGQLGRGRGAGKGGRRLGAQAPTARCAGAGDWGGKGKGEALVPSWNGKP

SEQ ID NO: 59644 - protein, 530 aa, Zea mays
  Coding DNA Sequence Number=SeqID_17865
  Gene Ontology: Mol. function=transcription factor activity; Cellular component=nucleus; Biological process=regulation of transcription, DNA-dependent
  Homolog annotation: Hit_ID=Q84U24; Match level="QueryCoverage=36%, HitCoverage=31%, E-value=7e-46, Identity=58%"; Hit description =LIPLESS1
  Pfam annotation: Domain name=AP2; Domain location=202-309; Score= -6.3; E_value=0.0029; Accession=PF00847.10; Description=AP2 domain
MWDLNDSPAAEAAPPSPSADDSGASSSSAAALVEIPDDADDDSAAAAAEAVVTRQFFPAPAAVGAAPGPGSSSARAGWLRLAAAAPPPAAGGSNGVAQTGGPRRRRRRLARRAGAGRGRAARSTAASRSTPDGAVGVAHMGLRQAGLFGAYDRAAIKFRGVEADINFSLEDYQDDMKQMGHLSKEEFVHVLRRQSTGFPRGSSKYRGVTLHKCGRWEARMGQFLGKKYAVVLVRPSPFSPSFLPSFLLPTTTAFLFSSQSLHRHRHRPFSFLVVAHLIVHGCHFRAYDRAAIKCNGKDAVTNFDPSIYAEELEPAGSSIPRPRSPPRSRPLVAVRRFRYRLQPIQASSDGPLFRRAASTGGGGDDHNHNLDLSLGSSAGNKRGSLDDGGGGGGGGDDETSDQRVPMAFDVDWQTAAPRSTKAKSQFLSNGGDPGTSGGLSLAIGGAGGGHWPPQLQHLQQQRLHGAWANGGGTSWPPPPHPHPHPHPPPPSTAATAAAASSRFPPYVVTTTQGPAGWAQKNGFHSLARPT

SEQ ID NO: 59645 - protein, 152 aa, Zea mays
  Coding DNA Sequence Number=SeqID_17866
MLWDSDNEDKVHMVDHPTERHAATHADKGKAMADTNTSSSGADVVRSYPNLTAPRLGRAARLLQEHLNLDSSCFNGAADWRRPLLLAAWTLLPRALPLRRPRQPRHGGAYSPELLPVRATAADKVVGGFLSYYEVTREAPNICVAPLRLVVT

SEQ ID NO: 59646 - protein, 47 aa, Zea mays
  Coding DNA Sequence Number=SeqID_17867
MTSGGTISTSRQLEAKRDLVAGVVYGTDFFTKRKIQDSRGILIGQIE

SEQ ID NO: 59647 - protein, 76 aa, Zea mays
  Coding DNA Sequence Number=SeqID_17868
  Homolog annotation: Hit_ID=Q9AV73; Match level="QueryCoverage=48%, HitCoverage=10%, E-value=2e-12, Identity=97%"; Hit description =Putative peroxin
  Subcellular localization annotation: CTP_CleavageSite=47; ConfidenceScore=5.20e-01
MLFQVGGQGARPTFFEMSAAQQLPASLRAALTYSLGVKPPASFPCCCSSPIGSIESLRLYAWFGGLSNRACPRCTS

SEQ ID NO: 59648 - protein, 66 aa, Zea mays
  Coding DNA Sequence Number=SeqID_17869
MSPTTHGSWRLEGVVAERYARAVEPQAEKQAGSKAGEGELEQRRPRYGVSHSTPYRALRHCTYLAQ

SEQ ID NO: 59649 - protein, 237 aa, Zea mays
  Coding DNA Sequence Number=SeqID_17870
  Subcellular localization annotation: CTP_CleavageSite=52; ConfidenceScore=5.53e-01
MASLLSLYGGDAAGGRRRMSRGSGTAPAPVRRLLRRLRSSFIRRSAARPRTRAAARFAYDLRSYSQNFDDGVISSRRRRDLPCAPGGRRPKSLRARPRAPSAAAGTCPCVPGRRRQEPCAPGRAASQPSAAQDSAPPSSPCAPGRARSQPTERRPGICAAVSVRPSGCASAPGGRRQESLRARPRLQPSEAAQPAHAVACGYDDSQTRTKSPYFGRPGAACWAVGSGFAARGAALVS

SEQ ID NO: 59650 - protein, 1422 aa, Zea mays
  Coding DNA Sequence Number=SeqID_17871
  Gene Ontology: Mol. function=transferase activity, transferring glycosyl groups; Cellular component=membrane; Biological process =cellulose biosynthetic process
  Homolog annotation: Hit_ID=Q6UDF1; Match level="QueryCoverage=77%, HitCoverage=100%, E-value=0.0, Identity=88%"; Hit description =Cellulose synthase catalytic subunit 10
  Pfam annotation: Domain name=C1_3; Domain location=356-389; Score =6.3; E_value=0.092; Accession=PF07649.3; Description=C1-like domain
  Pfam annotation: Domain name=Cellulose_synt; Domain location=561 -1417; Score=2163.1; E_value=0; Accession=PF03552.5; Description =Cellulose synthase
  Pfam annotation: Domain name=IF4E; Domain location=6-210; Score =385.5; E_value=8.1e-113; Accession=PF01652.9; Description=Eukaryotic initiation factor 4E
  Pfam annotation: Domain name=PHD; Domain location=357-406; Score= -1.7; E_value=0.084; Accession=PF00628.19; Description=PHD-finger
  Pfam annotation: Domain name=zf-C3HC4; Domain location=358-403; Score= 2.5; E_value=0.087; Accession=PF00097.15; Description=Zinc finger, C3HC4 type (RING finger)
  Pfam module annotation: Pfam domain module=C1_3::Cellulose _synt::IF4E::PHD::zf-C3HC4; Domain location=356-389::561-1417::6 -210::357-406::358-403
MAEVEAPAAAVAAATPEVATVTEGGAATEAKGPHKLHRQWTFWYDIQSKPKPGAAWGTSLKKAYTFDTVEEFWGLYDHVFRPSKLPGTADFHLFKAGVEPKWEDPECANGGKWTVPCNRKPTFETMWLETLMALVGEQFDETDDICGIVASVRPRGDKLALWTRTASNEAVQVNIGKKWKDVIDYNDKIIYTFHDDSRRDKPSRGGRYTVKLGRAGRAQHVCFGNTASVRHISRLDLEASPDVFVMHLPALACALINAGLPNSRLVRDATPPPYRPPRRLTSHHTSRLPSAISPWPLPCPFTDTSPPQPPVDRSAIGMDAGSVTGGLAAGSHMRDELHVMRAREEPNAKVRSADVKTCRVCADEVGTREDGQPFVACAECGFPVCRPCYEYERSEGTQCCPQCNTRYKRQKGCPRVEGDEEEGPEMDDFEDEFPAKSPKKPHEPVAFDVYSENGEHPAQKWRTGGQTLSSFTGSGEWCAVPLTMMLACRKMGLLTNMSPRAVAGKDLEAEREMEGSMEWKDRIDKWKTKQEKRGKLNHDDSDDDDDKNEDEYMLLAEARQPLWRKVPIPSSMINPYRIVIVLRLVVLCFFLKFRITTPATDAVPLWLASVICELWFAFSWILDQLPKWAPVTRETYLDRLALRYDREGEACRLSPIDFFVSTVDPLKEPPIITANTVLSILAVDYPVDRVSCYVSDDGASMLLFDALSETAEFARRWVPFCKKFAVEPRAPEFYFSQKIDYLKDKVQPTFVKERRAMKREYEEFKVRINALVAKAQKKPEEGWVMQDGTPWPGNNTRDHPGMIQVYLGNQGALDVEGHELPRLVYVSREKRPGYNHHKKAGAMNALVRVSAVLTNAPFILNLDCDHYVNNSKAVREAMCFLMDPQLGKKLCYVQFPQRFDGIDRHDRYANRNVVFFDINMKGLDGIQGPVYVGTGCVFNRQALYGYDPPRPEKRPKMTCDCWPSWCCCCCCFGGGKRGKARKDKKGDGGEEPRRGLLGFYRKRSKKDKLGGGSVAGSKKGGGLYKKHQRAFELEEIEEGLEGYDELERSSLMSQKSFEKRFGQSPVFIASTLVEDGGLPQGAAADPAALIKEAIHVISCGYEEKTEWGKEIGWIYGSVTEDILTGFKMHCRGWKSVYCTPTRPAFKGSAPINLSDRLHQVLRWALGSVEIFMSRHCPLWYAYGGRLKWLERFAYTNTIVYPFTSIPLLAYCTIPAVCLLTGKFIIPTLNNLASIWFIALFLSIIATSVLELRWSGVSIEDWWRNEQFWVIGGVSAHLFAVFQGFLKVLGGVDTSFTVTSKAAGDEADAFGDLYLFKWTTLLVPPTTLIIINMVGIVAGVSDAVNNGYGSWGPLFGKLFFSFWVIVHLYPFLKGLMGRQNRTPTIVVLWSILLASIFSLVWVRIDPFIPKAKGPILKPCGVEC

SEQ ID NO: 59651 - protein, 87 aa, Zea mays
  Coding DNA Sequence Number=SeqID_17872
  Subcellular localization annotation: CTP_CleavageSite=54; ConfidenceScore=5.10e-01
MTKLWSYPFSKKLPWRTLVLGRKKLLLRSFPKQHRGRQMHSSTRMKEEYTQPALANTKGKGAAEIDEAKKAIEEDVSIGEGWEGDCP

SEQ ID NO: 59652 - protein, 77 aa, Zea mays
  Coding DNA Sequence Number=SeqID_17873
MDYTVFEIAELDRAAMIYHTNNKMKDGQTAAQHEPDACGPQLWPRHVIPAWLKNGAEGRIRTHVPMEEGWEPLDKAI

SEQ ID NO: 59653 - protein, 150 aa, Zea mays
  Coding DNA Sequence Number=SeqID_17874
MAESVSGSNPTRTSRSDGQELSAPFLQRDGGAAHGMRRSPAGTKRLRDPRSQPQAKRVLHEEKNIVIRMGRGSPETVAETALPTIRGNSTAEEGRGEELPSHRWLRVPKYEHAQPPARWRTSLSSLRAPEGAEEGKPRRRRELLLRRVGR

SEQ ID NO: 59654 - protein, 709 aa, Zea mays
  Coding DNA Sequence Number=SeqID_17875
  Gene Ontology: Mol. function=binding; Cellular component=COPI vesicle coat; Biological process=protein transport
  Homolog annotation: Hit_ID=Q8RZX0; Match level="QueryCoverage=86%, HitCoverage=64%, E-value=0.0, Identity=93%"; Hit description =Putative adapter-related protein complex 4 epsilon 1 subunit
  Pfam annotation: Domain name=Adaptin_N; Domain location=41-597; Score= 210.4; E_value=4.2e-60; Accession=PF01602.10; Description=Adaptin N terminal region
  Pfam annotation: Domain name=HEAT; Domain location=152-188; Score =23.7; E_value=0.00066; Accession=PF02985.12; Description=HEAT repeat
  Pfam annotation: Domain name=HEAT; Domain location=361-393; Score =5.3; E_value=9.6; Accession=PF02985.12; Description=HEAT repeat
  Pfam module annotation: Pfam domain module=Adaptin_N::HEAT::HEAT; Domain location=41-597::152-188::361-393
MEQLRTFGRELAMGSQGGWGQSKDFLDLVKSIGEARSKAEEDRIIARELEHLKRRLADPDVPRRKMKELLLRLVYAEMLGHDASFGHIHAVKMTHDESLPLKRTGYLAVALFLDERHDLVILVVNTIQKDLRSDNYLVVCAALTAACRLIGEEAIPAVLPQVVDLLVHPKEAVRKKAVMALHRFYQRSSSSVSHLVSNFRKRLCDNDPGVMGATLCPLYDLISEEPNSYKDLVVSFVNILKQVAERRLPTSYDYHQMPAPFIQIKLLKILAVLGSGDKQASGHMYTVLGDIFKKGDTASNIGNAILYECICCISSIFPNPKMLVAAAETTSKFLKSDSHNLKYMGIDALGRLIKINPDIAEEHQLAVIDCLEDPDDTLKRKTFELLYKMTKSTNVEVIVDRMIEYMINITDHHYKTEIASRCVELAEQFAPSNQWFIQTMNRVFEHAGDLVNIRVAHNLMRLIAEGFGDEDEGADSQLRSSAVDSYVRIVGEPKLPSSFLQIICWVLGEYGTADGKHSASYIIGKLCDVAEAHLTDDTVKAYAISAILKIFAFEIALGRRIDLLPECQTLVDELLASHSTDLQQRAYELHALLGLGKNDVESVMPADASCEDIERLLMPWGSHAPRCTPSAAPIHDITPDYVKFEVDFPGAYNAILGSPGYVKFMVVSNYTYLKLKMPDPMGSLWRPLPSKQPMRVSKLAASSRQDKPL

SEQ ID NO: 59655 - protein, 209 aa, Zea mays
  Coding DNA Sequence Number=SeqID_17876
  Subcellular localization annotation: CTP_CleavageSite=33; ConfidenceScore=5.39e-01
MGVACSPALEVSSPRAPGCMSSFRPPELRWIGRCNARSSLRAPRTSRDAARTSRLVCRCRYSHIEGHRLLAGLGSAAASGPGDAAACPHKGTAVAHPLDRGATAGGLGIAASTPDRGTAATARRGRGVAATAATGRGSTAATGRGSTAATGRGSTAATGRGCQGVGAIDLGADPLDGEVDDAYLGAKIYDIENLDANDDDAEPRVHFLK

SEQ ID NO: 59656 - protein, 202 aa, Zea mays
  Coding DNA Sequence Number=SeqID_17877
  Subcellular localization annotation: CTP_CleavageSite=73; ConfidenceScore=5.64e-01
MTRNDRPYASGTTAEKPPLAVSPSLVPRSTLPRCPAPRPSRGPSPTPSSSRPPPLQPPAAGNPAAGRHRPKKRCHGGVDSASPTLTPDSVVLAILIGDEDIEPAMLAKEANGGHMAIEAPTRWLHQIQKTEVEKRSEPKQAGFKNKLEKHRRTDQGLKKGVLKFEFFLQESQSQMRKLKRFEASSPASEKEKKQDRKQDRSP

SEQ ID NO: 59657 - protein, 148 aa, Zea mays
  Coding DNA Sequence Number=SeqID_17878
  Subcellular localization annotation: CTP_CleavageSite=77; ConfidenceScore=5.81e-01
MANPSFSAQTRGRTALPPVANVPSCPSPKAYVGASVSFHTLGLSFSCGRARTHGGFRPLATLRLGRFRSEDRCPSPVGSKPSRWALCRVGGGTNPCDAGLDLSGSWQQGHSATYNAPSRFKSSAKDSARRPLGRELRGGPPRRVDRAG

SEQ ID NO: 59658 - protein, 69 aa, Zea mays
  Coding DNA Sequence Number=SeqID_17879
MEQWKNSNAKDFVDRERELREMASRTFTNGRLTEDHRAHTRSYEKRRTMGQRTFAMKKPMRSDDSRAVG

SEQ ID NO: 59659 - protein, 100 aa, Zea mays
  Coding DNA Sequence Number=SeqID_17880
MADPLWWRWCRGSGRTEVAASAKQIWAVGGDHVGAGDLGAGDDRLHGRGGAGDLGVGDDVDSGWRPIFIALEAALPHLLTHTTQQDCPLDAKETTEDSQK

SEQ ID NO: 59660 - protein, 194 aa, Zea mays
  Coding DNA Sequence Number=SeqID_17881
MKGAQILYGKLVLRERRSEHNVINMQEEKRDVEKWKQVAVGCKGPRAIIADEKARVARSFMGKSKGSNSIEQELSVIYQQTDNRFLNDMWGDENIAKMKAPGKNQITNRAAEKVEGRAIKDGLPEAIEATMPFIWWQYSVAESTTTLSNDILQFNSDGPEDTRKDHIIHPLPRGNNEPIAAAIVYLTCSSHAFS

SEQ ID NO: 59661 - protein, 249 aa, Zea mays
  Coding DNA Sequence Number=SeqID_17882
MATCYSCVHEPVKEYSALESDNEGYSSCKQSTIGSSAPPDPGLGLGLSPGRRRTPLRPTQGSDSGLSPGRRRTPLRPTQGSDLGSALEDDEFRSARPRARTRAKPRKTANSAPPDLGLGLRLSPGRRRTPLRPTQGSDLGSALEDDEFRSARPRARTRAKPRKTANSTPPDPGLGLGLSPGRRRTPLRPTQGSDLGSAPEDDEFRSARPTLPRPQPTASASPDLGARTRPRSRKTDSTSTSEKPPHRPT

SEQ ID NO: 59662 - protein, 83 aa, Zea mays
  Coding DNA Sequence Number=SeqID_17883
  Subcellular localization annotation: CTP_CleavageSite=38; ConfidenceScore=5.44e-01
MTLQAPSTPPSPCPPPPSSDQISTHHGTFQREVSRSCTADAVVGAEVTRLVGGDGSVEQWDAARRSTRGGVSRGALRASRRDG

SEQ ID NO: 59663 - protein, 233 aa, Zea mays
  Coding DNA Sequence Number=SeqID_17884
  Gene Ontology: Mol. function=methyltransferase activity; Biological process=metabolic process
  Homolog annotation: Hit_ID=Q6Z692; Match level="QueryCoverage=65%, HitCoverage=23%, E-value=4e-80, Identity=90%"; Hit description =Putative early-responsive to dehydration stress protein
MSRPLYRGVSGIGGKLAAADEAYYDPKEPSENGIGGGFGGAARGSGTRGRGGEDRGPAAAGGGARGLGREQLVTDLLDIGELAGGGVRAKEAEVCPPEYDNYVPCYYNITDAVDVSDLGAGVVISYDRQCTRDGRVTCLVAPPRSYRVPVRWPSGKGFIWKDNVRISGQEFSSGSLFKRMMVEEDQISFPSDAHMADGVEDYAHQIAEMIGLRNEFNFNEAGDSGHLYFIVVP

SEQ ID NO: 59664 - protein, 579 aa, Zea mays
  Coding DNA Sequence Number=SeqID_17885
  Gene Ontology: Mol. function=amidase activity; Cellular component =chloroplast
  Homolog annotation: Hit_ID=Q6Z697; Match level="QueryCoverage=96%, HitCoverage=97%, E-value=0.0, Identity=56%"; Hit description =Putative Toc64
  Pfam annotation: Domain name=Amidase; Domain location=59-461; Score= -86.8; E_value=1.3e-07; Accession=PF01425.11; Description=Amidase
  Pfam annotation: Domain name=TPR_1; Domain location=463-496; Score =23.8; E_value=0.00063; Accession=PF00515.18; Description =Tetratricopeptide repeat
  Pfam annotation: Domain name=TPR_1; Domain location=497-530; Score =40.3; E_value=6.4e-09; Accession=PF00515.18; Description =Tetratricopeptide repeat
  Pfam annotation: Domain name=TPR_1; Domain location=531-564; Score =31.1; E_value=4e-06; Accession=PF00515.18; Description =Tetratricopeptide repeat
  Pfam annotation: Domain name=TPR_2; Domain location=463-496; Score =23.4; E_value=0.0008; Accession=PF07719.7; Description =Tetratricopeptide repeat
  Pfam annotation: Domain name=TPR_2; Domain location=497-530; Score =30.2; E_value=7.2e-06; Accession=PF07719.7; Description =Tetratricopeptide repeat
  Pfam annotation: Domain name=TPR_2; Domain location=531-564; Score =28.4; E_value=2.6e-05; Accession=PF07719.7; Description =Tetratricopeptide repeat
  Pfam module annotation: Pfam domain module=Amidase::TPR_1::TPR_1::TPR_ 1::TPR_2::TPR_2::TPR_2; Domain location=59-461::463-496::497-530::531- 564::463-496::497-530::531-564
  Subcellular localization annotation: CTP_CleavageSite=25; ConfidenceScore=5.37e-01
MASSSQSGGAGGGGTVASNPRVWIVASIAVAGVLVLAEVARRRRRWLRGMSGTAPDAGSFCDRFELHPPAQPPPPAARHILSGLTFAASDNFEIEGYVAGFGNPDWKKTHETARHTAVAVTMLRKQGATCVGRTIMDELGFGVTGENLHHGTPANPVSSSLVPGGSCSGSAVAVAAQLIDFAIGWFARDPCILHRVGEVLLPAAVGGLKQTRQFVFADDCFQLLKVSNQKTVHAIKNAVQALRGYQPPKHINIGQYIYSNVPSLKEFCEPATKLEEGTSALKAISTVMLLLQRYEFKANHEEWVNTVKPKLGLDISTRVLQAVNFARENIKSLYAIRNELRVALKNLLKLHALQKSDTPCADAPGRDSSMPSDQQLLQRDLHRHSLSGCAPRDWDTGILVLPTTAGYPLKRNSKERLSSGFEDRMYKFVGVAALSGCCEDQVVLASKLETAPVTNVDVDVNASELLKEKGNSAFKRRQWIKAIEFYSEAISLSDTNATYYCNRAAAYLELGRFKQAEADCDRALLLDRKNVKAYLRRGFAREVTLNYKEALQDFRHALALEPQNKTALAAERRLQKLLK

SEQ ID NO: 59665 - protein, 39 aa, Zea mays
  Coding DNA Sequence Number=SeqID_17886
MTPSTLLTFLKVDESPLEEDTKSHKYHHTLTCLLLAEST

SEQ ID NO: 59666 - protein, 156 aa, Zea mays
  Coding DNA Sequence Number=SeqID_17887
MAELVEELPRANPWQVEEFMAWPRGELDAMEAFVGRGGDHDRRWESRGDCVAMRTSRMGQTRDEDEERLSRRRRRAGASRASDKRGHTVPIRYLGRTKHRWNMGHMKILAQDTSIVCGAFFTIVVSAIPASETGRERLISVGAAPNVNLLAAQWRW

SEQ ID NO: 59667 - protein, 1517 aa, Zea mays
  Coding DNA Sequence Number=SeqID_17888
  Gene Ontology: Mol. function=zinc ion binding
  Homolog annotation: Hit_ID=Q108W5; Match level="QueryCoverage=99%, HitCoverage=99%, E-value=0.0, Identity=51%"; Hit description =Expressed protein
  Pfam annotation: Domain name=PHD; Domain location=403-452; Score =18.0; E_value=0.00089; Accession=PF00628.19; Description=PHD-finger
MRDLYNRTRHKDFPALEESAEGRSGGRPSGSEQRELASKMEDKAVVRKRLVSSNNTHAKVESGTCNVCYAPCSSCLHPHIRVVDSNVECASSQTCSTRSEVKNNSLVRNEKGLCSKGENDDEFSATSGHVSDSVVARASIADDSSEVNMPSKRRRLLNENTRLPRAEYLEDSNSCVTGISAEGKLHVDKKKLSTSASSRDLTAKDYKVNSMANHSKLRNQCIDESKKGSDGRDMHPSSSGRFSPVDSSVMTKKMLRTQSSVSALSRLSPNRQAHEFGKALDNLSHQPCEKASLLKNNEQLRCGQLNPCIAGENNHGTLAGYSNRHADKDVFSLKDLDNGTLCSKDEIQEHGGIHSNDDVKKNVCGEQALDQDCSRDISSDRKLNIQHDVTDCGNSEGLIDVNVCDICGDVGREYLLATCTRCLEGAEHIYCMRVKLEKVPVGEWFCEECQLKEDQNNTSNYGISVVNVTEGKNQRTESRSKPKTLQIVVPDFDALEVTHSALTADRCDGNSKRLHLASTDTQTRQLKDTTPAAQRLDVKNKKSLSVTNRNKLQVLTSDLDTRPHNYGTSTSGVYTNKSQSSEFLLNHKKLRVSTDMQSPLSSEGLRSPPISCKRHAESMSSPKPRIVKAGTLGKQDVISRANSFKKSNKGGLSSVDNIPVRTTQAVKSSDSQTLSRSYSLGNMVNAKAPVPSPRGFLSKQLSFNSTNNGPKVKQLADGVSSKLRPAEHSPRDPRDKKSIKKIVQSGSFKHEGSDSIVAGSSKKKQTFHLSQDEKPGVLKVIKENNLTERRASFSLKKRNIPSSPRPDSCMKSGERKNDQDISRSGTSILKSSKKPGYAEKKQNNDLSRSDNGKEDVTVHPKTMEVSGKDAYVVKTSDPPVQPQCAKKDRPNDVEDDDLLISVNNVNIAPNEHAEVVPTTFAAMTYESDLQDVPRESTSDDSAPKVVCCQQKLLENTGDDSGKIVEVVQDSGDILSVTPHGLQMAHNLYPPDNKLHKPDLKKEAFADQSSALGNCLKDFVIPEQSYIWQGGFEVSGHGNSPEMFDGFQAYLSTCASSKVREVGEQLPDKIQLAEVPRHSSWPLQFNEVNPTEDNIALFFFAKDVESYERAYGKLLDNMLLGDLSLKANIGGTELLIFPSDKLPERIQRWNGLPFFWGIFYARKASSPLELPTNNCPLEQINEPVIQHDIGSPKAHQPLGIDLNECPNDYISDLSLSLGSESEKSGASLDRNIVLESKREDRSLNASEIHHEETAGTRQIIPGHPSVASCGTNLPTISTGGHDMIQDYLAAAKGSTGTPGGNKMEKTDQNETLFRFSQQLGATRSISHEIELNKHGLLPSHCHLSGSKICDDQTKSTPNSDMGPLDFDITNKRQKTYGKHSCIFGDAMTPMKCLSKIHPLPAGQDNPCDVLQHCHRGPSDPASLKKPLPDHFIHVLSSDDEDSPEPSTSLNKASSKADEGSSILCSLSLSMVATKRNLSGSDIVDDEPLSLSLGLPSVVGGRADQEMKQFLPEKPGINT

SEQ ID NO: 59668 - protein, 426 aa, Zea mays
  Coding DNA Sequence Number=SeqID_17889
  Homolog annotation: Hit_ID=Q6ZHH2; Match level="QueryCoverage=33%, HitCoverage=45%, E-value=4e-30, Identity=54%"; Hit description =Tyrosine specific protein phosphatase-like
MRSPLAAEDCHGDNHVSVPLQLPQHDILLIVAASPTLSTSASTHDGSGIVVRARLADSGIEQPQPHIVGTIRSADVWIHGLQVWIQLNIPQIWCDIQHEEGRRRHRIFEAERWWLLEHGTLPQTDVLADALAGKLDNSGCSLSELKRKVRSLQSQYAKAVKKGAPPSKDQDRRLFDLCKNVWPSVSNTKASANGGAGREPDEMCELYPYLVEEVRALQRPHPGLFKREFGMIDDSKACALDERTTKPGPAKGTIGSSARPRARTRAQPRKTANSAPPDPGLGLGLRPGRRRTPLRPTPGLGLGLRPGRRRTPLRPTPGLGLGLSPEDDELRFARPQGSDTALASADDLRLARPRGSDSASAMEDRLDLGFGGASTSPNLGRGRQQGHNRSDSCPSARLRRSSDGHDITLVGLQDLSGCHIGMYSGH

SEQ ID NO: 59669 - protein, 42 aa, Zea mays
  Coding DNA Sequence Number=SeqID_17890
MKQGLLNQLVAHPVDGMRAGPKQRGSSLAERANNGALDPIHG

SEQ ID NO: 59670 - protein, 145 aa, Zea mays
  Coding DNA Sequence Number=SeqID_17891
MARQHHERPELRPSASAVSTTRIHRPQTPKLHATLADPGTRSSKQRAKEHRAGPSAVASWRLKRAKARRQKPHCCAQGKQGSGGTTAMAQQRERRELELEEGARTGGASADWEKQRKKLANRNQLELEKRRRGRRRNWKCSPEVD

SEQ ID NO: 59671 - protein, 46 aa, Zea mays
  Coding DNA Sequence Number=SeqID_17892
MDYMVFEVAELNGAAMICHTNNKIKGGGVRTHALREEGREILGETV

SEQ ID NO: 59672 - protein, 468 aa, Zea mays
  Coding DNA Sequence Number=SeqID_17893
  Gene Ontology: Mol. function=protein serine/threonine kinase activity; Cellular component=nucleus; Biological process=protein amino acid phosphorylation
  Homolog annotation: Hit_ID=Q6K988; Match level="QueryCoverage=99%, HitCoverage=100%, E-value=0.0, Identity=88%"; Hit description =Putative casein kinase I
  Pfam annotation: Domain name=Pkinase; Domain location=9-278; Score =142.9; E_value=8.9e-40; Accession=PF00069.15; Description=Protein kinase domain
  Pfam annotation: Domain name=Pkinase_Tyr; Domain location=9-273; Score=-133.2; E_value=0.00027; Accession=PF07714.7; Description =Protein tyrosine kinase
  Pfam module annotation: Pfam domain module=Pkinase::Pkinase_Tyr; Domain location=9-278::9-273
MDHVVGGKFKLGKKIGSGSFGELFLAVNVQTGEEVAVKLENVKTKHPQLHYESKLYMLLQGGTGIPHLKWFGVEGDYNVMVIDLLGPSLEDLFNYCSRKFSLKTVLMLADQMINRVEYMHQKGFLHRDIKPDNFLMGLGRKANQVYIIDYGLAKKYRDLQTHKHIPYRENKNLTGTARYASVNTHLGVEQSRRDDLESLGYVLMYFLRGSLPWQGLKAGTKKQKYDKISEKKMLTPVEVLCKSYPSEFISYFHYCRSLRFEDKPDYSYLKRLFRDLFIREGYQFDYVFDWTILKYPQIGSNPRTRAGERTSGAAGPSMDRIEKTPGEASGRRNPSGPVNQSDSYAQRPRETVSMSLKEIMHSTDRSGERTVERPRTSSRTGSASRRAVASSSRPATSSMEPSEQQYSRASRLFSSNSGSRPSSAQRVNPAPGESRATSLSRAAVARGSRDEPLHRSLELLSLGSGKRK

SEQ ID NO: 59673 - protein, 224 aa, Zea mays
  Coding DNA Sequence Number=SeqID_17894
MGMGIPNAFEGDMVRRRAQSYLSPVETLLICPDPLCSSVWTKIFLPDLGFLGQLLAIAISHTGQQIASAPLTVGGAQQVNGVRDKMQLENSAACPAPTYVPPARVRLTTAKFSLRRNRKLRLAQPWASALGGGLRLARPQGSAPASASGEGLRLARPQGSASTSASEDGLRLARPQGSAPASASGGGLRHARPQGSVSTSTSEGIASSPDPGLGLGRSLRLARP

SEQ ID NO: 59674 - protein, 156 aa, Zea mays
  Coding DNA Sequence Number=SeqID_17895
MGKNNKRKREPTPPSEDFGDSEYSEEEFSSESEGSPAPIPLRESSDDSDDSQGLAAEVWTYIRAVERSGLEGSDESEYSSDEEDSDGGGEDEDDDDDDDDDDEGGGGGDGDGSGRGGSGDGKDGDGDGSRGGSGGGGSSRGSNRGGSGGGSNRASG

SEQ ID NO: 59675 - protein, 109 aa, Zea mays
  Coding DNA Sequence Number=SeqID_17896
MARAGDSTREKRAWGGWSWSGGLGTTARYRYRRSPAANRWNRENRGGRKRGPTGKFTLGGARTMARLCLTVAKHGWGRWSRSAGGGFGRRRPGDGEASASLKNRCAQLG

SEQ ID NO: 59676 - protein, 92 aa, Zea mays
  Coding DNA Sequence Number=SeqID_17897
MTLDSEKGFRPNPWWPAGKVMGAKQLAEAIHFAKQMRYPLGSTIFGDSEDDYLYFCPNSKGTYLRVILTKELILYNFIGLDPKQSFEKQEES

SEQ ID NO: 59677 - protein, 66 aa, Zea mays
  Coding DNA Sequence Number=SeqID_17898
MGPSGRAVGLDRANRTDRDESEYLESGRSHLDPTAGLTLGTWRDPQSSNPNPMDGVTRYPFADTFC

SEQ ID NO: 59678 - protein, 119 aa, Zea mays
  Coding DNA Sequence Number=SeqID_17899
MLTGAEQPANNDATTAGVAAAANGAGAQAACDDPNEDGSAVAASRCESGEERDRGREFGTSRAEDRRGKEESRSSPGRRQRGGSSSGLCAAAVPVASSRIRSGGSIGSTWNKARNELIR

SEQ ID NO: 59679 - protein, 72 aa, Zea mays
  Coding DNA Sequence Number=SeqID_17900
MASSPKLHLPALSLPIAVGRVSLVADLAPAFPLYPAEFAQPLASPPHQRPQPWMQNPLSSMPFFAAPVSLCV

SEQ ID NO: 59680 - protein, 50 aa, Zea mays
  Coding DNA Sequence Number=SeqID_17901
MARACVFLVVLLLAAVAMAPFAGAARIDVVEGRSLQVPELVSISENDMHN

SEQ ID NO: 59681 - protein, 180 aa, Zea mays
  Coding DNA Sequence Number=SeqID_17902
  Pfam annotation: Domain name=GRP; Domain location=57-125; Score= -21.2; E_value=0.011; Accession=PF07172.2; Description=Glycine rich protein family
MTVDKPLVSTSLRRDQQPYLAAIATLTFAVISRSEKQFSSGYEHVLDKTSKPGRAAAAVLLLTLLAALHVAAHNNNTENRNPGGGGGDPGAFFTRMPRFSGGGVPGGGGFFGGWGEGGLGYRRGAVVPPFAALHQDAGSSSPPLRAASGPSATTARTGGAAEAAEAVASTAPSAAPPPAE

SEQ ID NO: 59682 - protein, 46 aa, Zea mays
  Coding DNA Sequence Number=SeqID_17903
MNEWDKVTHYDVVKAPKHVAQGREVDNSEIQSSKVSLVHWFWDLGI

SEQ ID NO: 59683 - protein, 75 aa, Zea mays
  Coding DNA Sequence Number=SeqID_17904
  Subcellular localization annotation: CTP_CleavageSite=65; ConfidenceScore=5.03e-01
MARVACTLHGKRLDGGVSVLLVALPKAFGKGVVSGSVESLLFLRVRKKQFFVAFVPRWCLKKKIRTEASKGSVLL

SEQ ID NO: 59684 - protein, 134 aa, Zea mays
  Coding DNA Sequence Number=SeqID_17905
MKVMLAEDVQSSRNGSEFTGANYKCTFGLKEGKGTSVMLKRMPSQHEQYGSAACVDGDYQPSLRVLGVPLIMVPDNRILLKLVRQFLSKQYLLRLPKKASKQNLRKLSRHSQHWEKKVVLKNLGSLLPEPLARS

SEQ ID NO: 59685 - protein, 79 aa, Zea mays
  Coding DNA Sequence Number=SeqID_17906
MAVEAEESHDAQVEAKEAEDSGERALIIVGLSPPPEPYNPEADPVMKEALDVMKVANIIVDEVVDCLLNEAAERVLKED

SEQ ID NO: 59686 - protein, 138 aa, Zea mays
  Coding DNA Sequence Number=SeqID_17907
MVPRLALVVIYAPNHQALCRERGAEQRKWRGEREEDAASLRRFCDAMLERLVVGVADTEKYDGDGGHQHNGGHKGPVRMQDPLCGRLVVFGLAVGAPEVPSLCSGNGGYVLGGVSLASVFDGQEVEEESMAVGFRIGG

SEQ ID NO: 59687 - protein, 112 aa, Zea mays
  Coding DNA Sequence Number=SeqID_17908
MALHVLTTFCGFHPLEMSTHPIGLFPAEKEDDPMWKDRVEHAKDSTEITLDNREDLVVDLSTELVEKDLQVEQMANHIQEIEDMEAEGADEDVDIEGGEELEPASSLDTAGS

SEQ ID NO: 59688 - protein, 76 aa, Zea mays
  Coding DNA Sequence Number=SeqID_17909
MEFVVLELPWRAIETEVAVQLNIQQRAATILHDMLMNLGPSAQERDPKWKTSAVVKLMMVLKTMAKELSWIDAAHI

SEQ ID NO: 59689 - protein, 105 aa, Zea mays
  Coding DNA Sequence Number=SeqID_17910
  Subcellular localization annotation: CTP_CleavageSite=26; ConfidenceScore=5.37e-01
MGPNPCCRSKHELNPMGFTTPPSLCSGSSRAKRCKGARQIARRSFDAVPRRGPNLWLHDSRVAIHVIKPWPLDLGWASENRSQLRGSFEPWISDPRVHVMYRFGL

SEQ ID NO: 59690 - protein, 396 aa, Zea mays
  Coding DNA Sequence Number=SeqID_17911
  Homolog annotation: Hit_ID=Q2QX94; Match level="QueryCoverage=13%, HitCoverage=6%, E-value=2e-21, Identity=90%"; Hit description=ZW18 protein, putative, expressed
MGGQMKISAMWEEGGNKTPASPARVVQYEASDVGADDALGIWKIDDVDNSFHTQAFRINSSPSAASELWLLPAGKMPLRHRPPLRCGFFLARKMPPNPSWLPLVTYSYLANVFHCAGNEQFSRGFRMDSHGQGLKEMDKLVVDVNMQVKAGSVGERYSSWNWNCRLQSTRRGFFVQWSTSWPAQAGLFRLRRRRQPPSPVPKLIFLEGKLVQTLGPKRRVRVAALDEALQIPQELAAFVTCYGQSLHVLVGCALASLADFWHLRSEEEGIRNSIIVRLSDYALKIWLPFVLKFFRDIKHVREQGVIDDRDTFLHAVRDLLCFHSTQRVGGNFMHEQALLYRPSGDYNPLHLDPDIAQLAGVHYQTKLVVGESCATNQTCSYRGRFGHMLGHLEIKE

SEQ ID NO: 59691 - protein, 62 aa, Zea mays
  Coding DNA Sequence Number=SeqID_17912
  Gene Ontology: Mol. function=zinc ion binding
  Homolog annotation: Hit_ID=Q8H6I1; Match level="QueryCoverage=77%, HitCoverage=8%, E-value=8e-11, Identity=61%"; Hit description =Putative MURAZC
MKTVELRDKLQEDFYCEIHYDTVWKGRQKALRELHGSWEQSFQLLFNWRAEGACYVAWGEHK

SEQ ID NO: 59692 - protein, 141 aa, Zea mays
  Coding DNA Sequence Number=SeqID_17913
MANGQITRPWRRHNARDSDTVDAPFTPDDSTSIIIVTQQRSLGIHSTPSNGGWSFPTQRPIPTTPRAPTATVEILRGSPDGPHVGEEREGLTSTCRRRDGSSRMLGRKVVLAQHSGFFCKCTRAKGYLLPSSVGSQAHHQD

SEQ ID NO: 59693 - protein, 474 aa, Zea mays
  Coding DNA Sequence Number=SeqID_17914
  Gene Ontology: Cellular component=integral to membrane; Biological process=transport
  Homolog annotation: Hit_ID=Q10FY4; Match level="QueryCoverage=94%, HitCoverage=92%, E-value=0.0, Identity=75%"; Hit description =Expressed protein
  Pfam annotation: Domain name=DUF580; Domain location=100-464; Score =96.0; E_value=1.1e-25; Accession=PF04515.3; Description=Protein of unknown function, DUF580
MTNIPNLTQAAVESEEQIYSPAFGNIEVQDSRGCCSGFTGSVTKLLFIFHLLAFIALTAFLGVQASYHQNPAYKPFSNFIPLVSSVIVSTIAACFWVILAVTNPPKAIKTSLWAAPVSALACDVVILLVGNTAALGIGALVVVFAIAAGLYSCWATGPRLKHASDMLSVSVIGAHLPPATSCLVVYVLLATFGYMAFWTVAISCIAAAEGHFMDYRMAYVAALLVSMAWTMQVLRYIVYVAVAKLAHGRLTYGIHVLGGAVEAFCDTIFGPAFGDICMGAVAVPVNSAVRGLARAMKTAAGGNDEFILSGQGCCFAVSEKMLGRANRWGFVHVGARGKAFCVASRDVWSLFVLRGIAELVDSDLTGSFCFLSSVTSGALASLVSGSWALAMDKDQKKLALPISIYAFLIGYYMCRMMIAWPQACVAAYHVAYAENPQNPQLGTLIPEHLRELQAMAADQDRPRVIHFSDDIDNS

SEQ ID NO: 59694 - protein, 92 aa, Zea mays
  Coding DNA Sequence Number=SeqID_17915
MEAKRQREEGDVEDPMYQEDRLRVVTLFEVVGGGAGETSTTGTALSGTITTVGEETPAGSFPTQCMGNAEDTSRNGRTILQESRDTQDHQIM

SEQ ID NO: 59695 - protein, 137 aa, Zea mays
  Coding DNA Sequence Number=SeqID_17916
  Gene Ontology: Mol. function=sialyltransferase activity; Cellular component=integral to Golgi membrane; Biological process=protein amino acid glycosylation
MKRQWSHQSVVLPLLVAVFLLLMFRTSYAVDVTLAELAAVDPAASAVLRATEALLEANLTRAPSERRDAAVRGLHDWLGKQRFEPQVMAELVDLIKRPMDRLELITSRPEARNEQALEAGYNAPPRTSSRQTGNSGS

SEQ ID NO: 59696 - protein, 100 aa, Zea mays
  Coding DNA Sequence Number=SeqID_17917
  Homolog annotation: Hit_ID=Q9SQZ0; Match level="QueryCoverage=44%, HitCoverage=7%, E-value=3e-12, Identity=77%"; Hit description =Putative amino acid transporter; 33388-30195
MRAAWWGSGLVAWWGAGVFVTTGRAARLYAGPGLVVSYAIVGLCALLSAFCVRLRGHGRRRAGGPRQPRRAPLLPHHLQGLAAAEPTRDLTGALTDRRDR

SEQ ID NO: 59697 - protein, 539 aa, Zea mays
  Coding DNA Sequence Number=SeqID_17918
  Gene Ontology: Mol. function=binding; Cellular component =intracellular; Biological process=metabolic process
  Homolog annotation: Hit_ID=Q6ETD1; Match level="QueryCoverage=99%, HitCoverage=93%, E-value=1e-125, Identity=34%"; Hit description =Putative pentatricopeptide (PPR) repeat-containing protein-like protein
  Pfam annotation: Domain name=PPR; Domain location=1-35; Score=35.5; E_ value=1.9e-07; Accession=PF01535.11; Description=PPR repeat
  Pfam annotation: Domain name=PPR; Domain location=133-167; Score =25.4; E_value=0.0002; Accession=PF01535.11; Description=PPR repeat
  Pfam annotation: Domain name=PPR; Domain location=234-268; Score =36.5; E_value=9.2e-08; Accession=PF01535.11; Description=PPR repeat
  Pfam annotation: Domain name=PPR; Domain location=269-303; Score=9.8; E_value=0.52; Accession=PF01535.11; Description=PPR repeat
  Pfam annotation: Domain name=PPR; Domain location=305-339; Score=5.3; E_value=1.7; Accession=PF01535.11; Description=PPR repeat
  Pfam module annotation: Pfam domain module=PPR::PPR::PPR::PPR::PPR; Domain location=1-35::133-167::234-268::269-303::305-339
MSWNILIGGYVKNGDLETARKLFDEMPARNVATWNAMVAGLTNSGLNEESLGFFFAMRREGMQPDEYGLGSLFRCCAGLRDVVSGRQVHAYVVRSGLDRDMCVGSSLAHMYMRCGFLRDGEAALRALPSLNIVSCNTTISGRTQNGDAEGALEFFCLMRGAGVEANAVTFVSAVTSCSDLAALAQGQQIHALAIKTGVDKVVPVMTSLVHMYSRCGCLGDSERVCLEYSGTDLVLCSAMISAYGFHGHGQKAVGLFKQMMAAGAEPNEVTFLTLLYACSHSGLKDEGMNCFELMTKTYGLQPSVKHYTCIVDLLGRSGCLNEAEDLILSMPVQPDGVIWKTLLSACKTQKKFDMAERIAERVIELDPHDSASYVLLSNIRATSSRWEDVSKVRETMREQNVRKEPGVSWVELKGQIHQFCTGDESHSRQREIVECLEEMMTRIRQCGYAPDMSMVFHDMEDEEKEVSLAHHSEKLAIAFAFLSLPEGVPIRVMKNLRVCDDCHVAIKLMSKVIGREIVVRDVSRFHHFKDGKCSCGDYW

SEQ ID NO: 59698 - protein, 173 aa, Zea mays
  Coding DNA Sequence Number=SeqID_17919
MELRRAIPVNPATVLARDVDEDHRCELAKTRGYRMFSQRRSRRRTMVIGDPRRLLSHGRATAAASAHTVETHWRTPRMHKPGPVAKFPGAMAREAQGGHDGGVLTSCGSTQGSAHAHHRGERESGGRREREGNLVRLNESVEEIDTGLGKGMTNRSHMAAVLVWYAWTRLGRW

SEQ ID NO: 59699 - protein, 48 aa, Zea mays
  Coding DNA Sequence Number=SeqID_17920
MKRREGVFFDEGSKTKSINDFIDNGIGNTDDIQRLFHNEIDLGVVWLG

SEQ ID NO: 59700 - protein, 67 aa, Zea mays
  Coding DNA Sequence Number=SeqID_17921
MARITFRQLSREAWVDYHGGDLVSVERFTAIVKVAYAWYGCNNPGVYHQLNSEYGLKHRIWTLPKFS

SEQ ID NO: 59701 - protein, 165 aa, Zea mays
  Coding DNA Sequence Number=SeqID_17922
MEFRCRDTEGDTRRDRAVGDMDRQVRAGRLARWSSKTRPRPGELEQGQAGEPAPTREEDPAQRATRERGAELKQGGAPAVKRPGELETRRPSAMAQGKAEQGAIRVGRAGRGAGGEMEGERSKGARHGKDRAGAGAKAGGGVLERGGRDLQRSFARAERRKKPRE

SEQ ID NO: 59702 - protein, 193 aa, Zea mays
  Coding DNA Sequence Number=SeqID_17923
  Subcellular localization annotation: CTP_CleavageSite=10; ConfidenceScore=5.04e-01
MAAPLNLLARARAAGQAHPQRGLGPGGHAAPASLVVGAQPRRAWARLQHPQSAAWRPGAGTTTSVTRALGLQRGTAARQTSGPPARHRMGMGARPPPACEQPPQNPGGPSPATAARRRECSPNGVQGVTVPARVGEAPSATARVRGPLRNCACAATARDRGPAARSRAHTARRWHMPPVKVNAMFTKEIRTVV

SEQ ID NO: 59703 - protein, 37 aa, Zea mays
  Coding DNA Sequence Number=SeqID_17924
MVGASQGRWSVSPEIEKDLDDLNKVAVCRCACAGLFV

SEQ ID NO: 59704 - protein, 267 aa, Zea mays
  Coding DNA Sequence Number=SeqID_17925
  Homolog annotation: Hit_ID=Q9SJV8; Match level="QueryCoverage=56%, HitCoverage=64%, E-value=5e-10, Identity=32%"; Hit description =Expressed protein
  Pfam annotation: Domain name=Hin1; Domain location=61-209; Score =16.1; E_value=6.7e-05; Accession=PF07320.4; Description=Harpin -induced protein 1 (Hin1)
MDDRGGASSSGSSRWRGCRDKESSYGHHHHWPPPHSARCLCLCLLLSLTLLLAAAAALLAVFVTRLKKPAFYLQSIQMDRSFSLLTWSSNPNRSADDGTAAPCAVASLVFAAQNLNGVGIRYGATVLDVAYANESVGALDVPALYQPPRSANVTVLVHAVLAQRNVTRLLVGELSAQRRYMEVRVAGRVDARTHIMNVPLPKVQFSLDCRFGANYTEIVLREGIESVMTRKALVVPSLPHLSQKCSIKISLRPRRAKGTSLDDLLGC

SEQ ID NO: 59705 - protein, 73 aa, Zea mays
  Coding DNA Sequence Number=SeqID_17926
MACSRAAKKPFSYACPTHLTPLPRRTPCAADAHWPLAVIKFLGGAFIGAVLEVTYGGAVGPMPSAIAGGVGRK

SEQ ID NO: 59706 - protein, 143 aa, Zea mays
  Coding DNA Sequence Number=SeqID_17927
MRERRRRWGTPARRQLWWLAQNAAYGATQQGGVSRRGARDAWPGRISRPSWLAAPGHWGLAARAGELDGLAASTTARRRHDTNKEAKRDTAQGELAGMKWEDAMELTCTVATSSSGEARASSTVLIQAVMDGWASDFGEGEVT

SEQ ID NO: 59707 - protein, 66 aa, Zea mays
  Coding DNA Sequence Number=SeqID_17928
MALATQRRKALLRRELLTSSTGKDIKALLSPWTLKLLERNERLYKIIHATINVEDTYRKVIGDDKQ

SEQ ID NO: 59708 - protein, 49 aa, Zea mays
  Coding DNA Sequence Number=SeqID_17929
MDGDVVRPGPMSHAPPPHCAAPPHCATPQCASHPALNSSRRRLLLEELP

SEQ ID NO: 59709 - protein, 49 aa, Zea mays
  Coding DNA Sequence Number=SeqID_17930
MNVSDPERQWAADPLLSMGAALLLLTADEGWYATEHFGLDVIFHSRMRQ

SEQ ID NO: 59710 - protein, 224 aa, Zea mays
  Coding DNA Sequence Number=SeqID_17931
  Homolog annotation: Hit_ID=Q10RU8; Match level="QueryCoverage=42%, HitCoverage=12%, E-value=1e-25, Identity=68%"; Hit description=DENN domain containing protein, expressed
MEEEELTSGGGDAALLAPEPREQAAEEGRSPRDAEAFEDAVEEASAASTSPVACCNGDAAETSSPPAWKSQVDGPSAPEEAETYESPSASSSGCAAMEVESSLVSELREEPGRVDAGSAASPSGAARGRHGGAREFDGHAGGQDRRPGRRRTRIKQQSRHVRTGSFQRFREQMQRAWKWGPIGGGGGGERSPREQLLRTTVNIEAMANQKRHWYQVRSKSQMSE

SEQ ID NO: 59711 - protein, 1008 aa, Zea mays
  Coding DNA Sequence Number=SeqID_17932
  Gene Ontology: Mol. function=protein serine/threonine kinase activity; Cellular component=integral to membrane; Biological process=protein amino acid phosphorylation
  Homolog annotation: Hit_ID=Q6Z8Y3; Match level="QueryCoverage=94%, HitCoverage=97%, E-value=0.0, Identity=54%"; Hit description =Putative CLAVATA1 receptor kinase
  Pfam annotation: Domain name=LRRNT_2; Domain location=56-97; Score =57.2; E_value=5.4e-14; Accession=PF08263.3; Description=Leucine rich repeat N-terminal domain
  Pfam annotation: Domain name=LRR_1; Domain location=101-123; Score =4.4; E_value=44; Accession=PF00560.23; Description=Leucine Rich Repeat
  Pfam annotation: Domain name=LRR_1; Domain location=125-144; Score =1.4; E_value=1.5e+02; Accession=PF00560.23; Description=Leucine Rich Repeat
  Pfam annotation: Domain name=LRR_1; Domain location=162-184; Score =11.2; E_value=2.3; Accession=PF00560.23; Description=Leucine Rich Repeat
  Pfam annotation: Domain name=LRR_1; Domain location=186-209; Score =4.5; E_value=42; Accession=PF00560.23; Description=Leucine Rich Repeat
  Pfam annotation: Domain name=LRR_1; Domain location=211-234; Score =9.3; E_value=5.2; Accession=PF00560.23; Description=Leucine Rich Repeat
  Pfam annotation: Domain name=LRR_1; Domain location=236-258; Score =6.4; E_value=19; Accession=PF00560.23; Description=Leucine Rich Repeat
  Pfam annotation: Domain name=LRR_1; Domain location=260-282; Score =16.6; E_value=0.091; Accession=PF00560.23; Description=Leucine Rich Repeat
  Pfam annotation: Domain name=LRR_1; Domain location=284-306; Score =11.0; E_value=2.5; Accession=PF00560.23; Description=Leucine Rich Repeat
  Pfam annotation: Domain name=LRR_1; Domain location=308-330; Score =15.5; E_value=0.2; Accession=PF00560.23; Description=Leucine Rich Repeat
  Pfam annotation: Domain name=LRR_1; Domain location=332-354; Score =6.8; E_value=15; Accession=PF00560.23; Description=Leucine Rich Repeat
  Pfam annotation: Domain name=LRR_1; Domain location=356-378; Score =12.8; E_value=1.2; Accession=PF00560.23; Description=Leucine Rich Repeat
  Pfam annotation: Domain name=LRR_1; Domain location=380-402; Score =7.2; E_value=13; Accession=PF00560.23; Description=Leucine Rich Repeat
  Pfam annotation: Domain name=LRR_1; Domain location=404-426; Score =14.0; E_value=0.55; Accession=PF00560.23; Description=Leucine Rich Repeat
  Pfam annotation: Domain name=LRR_1; Domain location=428-450; Score =10.8; E_value=2.8; Accession=PF00560.23; Description=Leucine Rich Repeat
  Pfam annotation: Domain name=LRR_1; Domain location=452-474; Score =2.8; E_value=86; Accession=PF00560.23; Description=Leucine Rich Repeat
  Pfam annotation: Domain name=LRR_1; Domain location=476-498; Score =15.5; E_value=0.2; Accession=PF00560.23; Description=Leucine Rich Repeat
  Pfam annotation: Domain name=LRR_1; Domain location=500-522; Score =11.9; E_value=1.7; Accession=PF00560.23; Description=Leucine Rich Repeat
  Pfam annotation: Domain name=LRR_1; Domain location=524-546; Score =15.7; E_value=0.17; Accession=PF00560.23; Description=Leucine Rich Repeat
  Pfam annotation: Domain name=LRR_1; Domain location=548-571; Score =9.6; E_value=4.5; Accession=PF00560.23; Description=Leucine Rich Repeat
  Pfam annotation: Domain name=Pkinase; Domain location=682-973; Score =121.2; E_value=2.9e-33; Accession=PF00069.15; Description=Protein kinase domain
  Pfam annotation: Domain name=Pkinase_Tyr; Domain location=682-973; Score=90.9; E_value=3.8e-24; Accession=PF07714.7; Description =Protein tyrosine kinase
  Pfam module annotation: Pfam domain module=LRRNT_2::LRR_1::LRR_1::LRR_ 1::LRR_1::LRR_1::LRR_1::LRR_1::LRR_1::LRR_1::LRR_1::LRR_1::LRR_1: LRR_
  Pfam module annotation: Pfam domain module=location=56-97::101 -123::125-144::162-184::186-209::211-234::236-258::260-282::284 -306::308-330::332-354::356-378::380-402::404-426::428-450::452 -474::476-498::500-522::524-546:...
  Pfam module annotation: =:548-571::682-973::682-973
EEGGGKGAKEKGRAEEPSMASATPMLGSTARLLFPLSFSLALLLLCCSAVCNAAGNDDESTALLAIKASLVDPLGKLAGWNPASASSHCTWDGVRCNARGAVAGLNLAGMNLSGTIPDAILGLTGLTSVVLQSNAFGHELPLALVGGYFSGTIPKSYGKLRKLRFLGLSGNNLGGALPAELFEMSALEQLIIGYNEFVGAIPGPQLATSPNLQYLDLAIAKLEGPIPPELGRGLSYLNTVFLYKNNIGGPIPKEIGNLTSLVMLDLSDNALTGTIPLELGQLANLQLLNLMCNRLKGGIPAAIGDLPKLEVLELWNNSLTGALPPSLGGAQPLQWLDVSTNALSGPVPAGLCDSGNLTKLILFNNVFTGPIPAGLTTCATLVRVRAHNNRLNGTVPAGLGRLPRLQRLELAGNELSGEIPDDLALSTSLSFIDLSHNQLRSALPSSILSIRTLQTFAAADNELTGGVPDEIGDCPSLSALDLSRNRLSGAIPASLASCQRLVSLNLRSNRFTGQIPGAIAMMSTLSVLDLSSNSFTGVIPSNFGGSPALEMLNLAYNNLTGPVPTTGLLRTINPDDLAGNPGLCGGVLPPCGASALRASSSESYGLRRSHVKHIAAGWAIGISVSIVACVVVFLGKQVYQRWYVNGRCCDEAVGEDGSGAWPWRLTAFQRLSFTSAEVLACIKEDNIVGMGGTGVVYRADMPRHHAVVAVKKLWRAAGCPDPEEAATADGRQDVEPGGEFAAEVKLLGRLRHRNVVRMLGYVSNNLDTMVLYEYMVNGSLWEALHGRGKGKMLVDWVSRYNVAVGVAAGLAYLHHDCRPPVIHRDIKSSNVLLDINMDAKIADFGLARVMARAEEPVPVSMVAGSYGYIAPECGCRLKVDQKSDIYSFGVVLMELLTGRRPVEPEYGESQDIVGWIRERLRSNSGVEELLDSGVGGRVDHVREEMLLVLRIAVLCTAKSPKDRPTMRDVVIMLGEAKPRRKSSSATVAATVVNKDRPVFTTSPDSSYL

SEQ ID NO: 59712 - protein, 116 aa, Zea mays
  Coding DNA Sequence Number=SeqID_17933
MSDLNEVIFGQEHLSRDDLSFIFSLKAEERCRRPHTDLDKVEVINASEQRRSVWVADCAGGRRADEPADRSRRWQVVATCTGRWARGGHVDKAITGRQVVTTDVPTLTSIHKDERR

SEQ ID NO: 59713 - protein, 70 aa, Zea mays
  Coding DNA Sequence Number=SeqID_17934
MHGQVVWAKDGRADAVQAGTGRGGSRSGVRRSDGSELEGVALPCAWRLCDRVSAAGSTSQRRKKRRKAKK

SEQ ID NO: 59714 - protein, 104 aa, Zea mays
  Coding DNA Sequence Number=SeqID_17935
MKKKVSRRISRSSRTSTSSRIRLATSPSQLPVEDKAILMNMLIRVGEQSETLLKLEETLIKRDESLEKGPRDWLAIYFTAARAAEAMKDVMTAYCPIMLGQDVP

SEQ ID NO: 59715 - protein, 106 aa, Zea mays
  Coding DNA Sequence Number=SeqID_17936
  Gene Ontology: Mol. function=metal ion binding
  Homolog annotation: Hit_ID=Q2QXW8; Match level="QueryCoverage=57%, HitCoverage=28%, E-value=4e-09, Identity=42%"; Hit description=Zinc finger, C3HC4 type family protein, expressed
  Pfam annotation: Domain name=zf-C3HC4; Domain location=14-67; Score =45.1; E_value=2.3e-10; Accession=PF00097.15; Description=Zinc finger, C3HC4 type (RING finger)
GSRRWCQPLSTTDCAICLDPLADIAGPDHKKDDAAATSMLRAMPCSHIFHQHCIFQWLHRNAVCPLCRYQLPTTFEDEDTEVEEDAEEMDNSNSRFRGCLVAPAKV

SEQ ID NO: 59716 - protein, 174 aa, Zea mays
  Coding DNA Sequence Number=SeqID_17937
MRGTMLPCGWQSHGIDFFPQPLVMHRSCRRASYLFMDMSFSLVDEVVGSFVGSGVYVGVIDDELITEVEGGSGTVAMVTTLVDLVITIASESLEILGRHDPHEHESTWDAALWALTQCHQPTKWPLRVMMMTSPNWSLAGAVFPLSTYSGCRGAGAGAGAVYETVAPNVFRGDY

SEQ ID NO: 59717 - protein, 256 aa, Zea mays
  Coding DNA Sequence Number=SeqID_17938
  Homolog annotation: Hit_ID=Q2QY25; Match level="QueryCoverage=36%, HitCoverage=42%, E-value=1e-10, Identity=36%"; Hit description=Zinc finger, C3HC4 type family protein
  Pfam annotation: Domain name=zf-C3HC4; Domain location=165-218; Score= 43.8; E_value=5.9e-10; Accession=PF00097.15; Description=Zinc finger, C3HC4 type (RING finger)
GIVISRPPRLYMRVVEIETPSAGLLLLLIETSLLNIPSSSSAICRRPAATTAPPTSELLDNWPEMDPVWLEWFHRDGAELANRGRRPDHLDDEDDLYVALALAPYVDRHRPRTRPRSPSPSPPSHEDAGDDTAARNNKRPCIPAYSEAILGLKEVVPTAKHDDDCAICLNPLADIAGPDHKKDDAAATSMLRAMPCSHIFHQHCIFQWLHRNAVCPLCRYQLPTTFEDEDTEVEEDEEEIDNIISRLNQIRRRLQI

SEQ ID NO: 59718 - protein, 133 aa, Zea mays
  Coding DNA Sequence Number=SeqID_17939
MAPVTLLQVLPCHGGFVVRDNIVFHSPVDDELLMEVEGWFWHRSHGDHISRLGDHDSFKNLGDLGSKKTVTNSEALHALNRGVPRHRWSWMSKSDALRVVRGILSCEPSREGELLLCLPSASDWSESRLESGK

SEQ ID NO: 59719 - protein, 72 aa, Zea mays
  Coding DNA Sequence Number=SeqID_17940
MACQRSTPRSSIDHVELPGAKCNWNMGGTQVVPHTSNDEATEADHGESGRNARGAEEVVGGVLHIRGGARFS

SEQ ID NO: 59720 - protein, 84 aa, Zea mays
  Coding DNA Sequence Number=SeqID_17941
MQSNDDAACERRRWPARAPHREAPSTTSNYPVQNVIGIWAEHRRYPIPAMMKLRRPTTVGDGLRTPEIRGSKSTPFARWGFRLR

SEQ ID NO: 59721 - protein, 271 aa, Zea mays
  Coding DNA Sequence Number=SeqID_17942
  Gene Ontology: Mol. function=RNA-directed DNA polymerase activity; Cellular component=mitochondrion; Biological process=RNA-dependent DNA replication
  Homolog annotation: Hit_ID=UPI00004C1731; Match level="QueryCoverage =97%, HitCoverage=20%, E-value=1e-106, Identity=86%"; Hit description= UPI00004C1731 related cluster
  Pfam annotation: Domain name=rve; Domain location=57-217; Score=92.9; E_value=9.8e-25; Accession=PF00665.16; Description=Integrase core domain
  Subcellular localization annotation: CTP_CleavageSite=24; ConfidenceScore=5.41e-01
MGRSSTTAAPRASSSDAFPSPKVRSSYKRYTWGLVAIKQHLKPLLETPSDKVSTGRRRWPTPLELSAPAKGVSSTRHPGGYAHLLVAIDKFSKWIEVRPLNSIRFEQAVAFFTNIIHRFGVPNSIITDNGTQFTGRKFLDFCEDHHIRVDWAAVAHPMTNGQVERANDMILQGLKPRIYNDLNKFGKRWMKELPSVIWSLRTTPSRATGFTPFFLVYGAEAILPTDLEYGSPRTRAYADQSNQANREDSLDQLEEARDVALLHSARYQQSL

SEQ ID NO: 59722 - protein, 104 aa, Zea mays
  Coding DNA Sequence Number=SeqID_17943
MGKTTRENRDAKEEKYDALKSRKRMCRIVPNKLTSDTVQCAFDDVNIDDPDFLYIQSIVRCFVPFCFVNPDSGYSPDTESKCLHFGSASLPRCVSIHAHRANGW

SEQ ID NO: 59723 - protein, 338 aa, Zea mays
  Coding DNA Sequence Number=SeqID_17944
  Gene Ontology: Mol. function=riboflavin kinase activity; Cellular component=mitochondrion; Biological process=riboflavin biosynthetic process
  Homolog annotation: Hit_ID=Q109K4; Match level="QueryCoverage=98%, HitCoverage=93%, E-value=4e-58, Identity=35%"; Hit description=HAD -superfamily hydrolase, subfamily IA, variant 3 containing protein, expressed
  Pfam annotation: Domain name=Hydrolase; Domain location=8-193; Score =127.9; E_value=2.8e-35; Accession=PF00702.16; Description=haloacid dehalogenase-like hydrolase
MAAAAHQVSAVIFDLDGTLLDTERATRDVLTEFLAAYGKVPDAGEEEKRLGQMYLESTTGIIRDYGLPLTVDEYSKAMYPLYLKRWQKAKPLPGVKRLVKHLHKNGVPLALASNSIRRNVDHKLPKLEDWGKCFSVILGGDQVPNGKPSPDIFLEAAKRLGANPSSCLVIEDSVVGVKGAKASGAKAVAVPSLQNQRNHYYIADVILYSLLDFQPEMWGLPPFEDHDCAYEYIPDQISGIFLGWAKSKVHGFSKVIVATGWDFSQQTVERVMHVHFLDCSGTVETEPVKLLIIGYIRKLQSADDILQALSVTDEDRRIARDALDLPTFSEYANDLHLA

SEQ ID NO: 59724 - protein, 150 aa, Zea mays
  Coding DNA Sequence Number=SeqID_17945
  Gene Ontology: Mol. function=phosphoenolpyruvate carboxylase activity; Biological process=carbon utilization by fixation of carbon dioxide
  Homolog annotation: Hit_ID=P29193; Match level="QueryCoverage=72%, HitCoverage=11%, E-value=5e-58, Identity=98%"; Hit description =Phosphoenolpyruvate carboxylase, housekeeping isozyme
IQAAFRSDEIRRAPPTPQDEMRAGMSYFHETIWKGVPKFLRRVDTALKNIGINERLPYNAPIIQFSSWMGGDRDGNPRVTPEVTRDVCLLARMMAANLYNAQIEDLMFEKLHSFSGKEGRAIFAYDLYGVPHHNHKKCGSQFVSSFSGYN

SEQ ID NO: 59725 - protein, 199 aa, Zea mays
  Coding DNA Sequence Number=SeqID_17946
  Gene Ontology: Mol. function=phosphoenolpyruvate carboxylase activity; Biological process=carbon utilization by fixation of carbon dioxide
  Homolog annotation: Hit_ID=P29193; Match level="QueryCoverage=99%, HitCoverage=22%, E-value=1e-103, Identity=90%"; Hit description =Phosphoenolpyruvate carboxylase, housekeeping isozyme
MARNAVDKATSIDAQLRLLAPQKLSDDDKLVEYDALLLDRFLDILQDLHGEDIRETVQECYELAAEYENKLDPKMLDEIGNVLTSLDPGDSIVITKRIKLKKGDFVDENSATTESDIEETLKRLMHQLKKSPLEVFDALKNQTVDLVLTAHPTQSVRRSLLQKHGRIRNCLTQLYAKDITPDEKQELDEALQREIQAGF

SEQ ID NO: 59726 - protein, 154 aa, Zea mays
  Coding DNA Sequence Number=SeqID_17947
MPWSMRSRGNWRIELSTRKGQVDWRSYVPSPFMGVEGSIIEAHQSFQAAAKEHAATVTKIKVAPFDLSSVFLNSNFGSVSIATSFVCEQSLASYRAPRRHRTCKSRCMPHRCGVDMKKGLGSMTVGPMCDCLENIVSSMGQLGDAEEMRDARMA

SEQ ID NO: 59727 - protein, 93 aa, Zea mays
  Coding DNA Sequence Number=SeqID_17948
  Gene Ontology: Mol. function=hydrolase activity; Biological process =pyrimidine base catabolic process
  Homolog annotation: Hit_ID=Q94J90; Match level="QueryCoverage=90%, HitCoverage=15%, E-value=2e-30, Identity=77%"; Hit description =Putative dihydropyrimidine amidohydrolase
MEFMGTVTIDDFFDFFGGHAMALAGGTTMHIDFIIHVNSNLTAWSESDKHKAAKASMDYGFHMAITKWDDEVAREMEVMVKEHGIRQKRIKLN

SEQ ID NO: 59728 - protein, 170 aa, Zea mays
  Coding DNA Sequence Number=SeqID_17949
  Homolog annotation: Hit_ID=Q94J90; Match level="QueryCoverage=39%, HitCoverage=12%, E-value=1e-12, Identity=55%"; Hit description =Putative dihydropyrimidine amidohydrolase
MGMGAEERKPSPCRFSLLLLVGSGGGQGGRNKSLRAPWALVGDGLAWPGPVGLCPDLTTRFSLEAQVLDRTERAGPKTTACSCVARAQPDTVHGDGGAATVGFAASLRPRIKDQTVVNAHLAEEADVYIEDDIVIAVRPNILVDVDNVRVIDVAGKYVMPGEFIQVDVTP

SEQ ID NO: 59729 - protein, 199 aa, Zea mays
  Coding DNA Sequence Number=SeqID_17950
MVPVLLWAADWLCGEQAHSWAASTFFMLLATERHQHQEFRFSEFSNLKAEASQENCWPYIVRPTGLGAAGPTLGAAAVIRGGPTDGFGEAVDGIGATAAGGTGAMGANLGAAAHNVPPAHMEFPGARGSDVRGFFAKDNVGATVHATTTRQGTYYGWARTRAKSRKTANSAPPNPGLGLGLSPGRRRTPLRPTQGSDSG

SEQ ID NO: 59730 - protein, 109 aa, Zea mays
  Coding DNA Sequence Number=SeqID_17951
  Homolog annotation: Hit_ID=Q94FY6; Match level="QueryCoverage=34%, HitCoverage=16%, E-value=2e-08, Identity=76%"; Hit description =Diphosphonucleotide phosphatase 2
MPRFPLTRVVLLLLPLLHIVTLLHVPKICACGGLRVLPITFLTRLRKDKRCAIKHTLMYLARVPDVGDATLHAHWKVFGTVIFREQEDGRHASSKITIFAFDGPLKELV

SEQ ID NO: 59731 - protein, 298 aa, Zea mays
  Coding DNA Sequence Number=SeqID_17952
  Gene Ontology: Mol. function=sequence-specific DNA binding; Cellular component=nucleus; Biological process=regulation of transcription, DNA-dependent
  Homolog annotation: Hit_ID=Q9ZR64; Match level="QueryCoverage=60%, HitCoverage=78%, E-value=2e-94, Identity=96%"; Hit description =Putative MADS-domain transcription factor
  Pfam annotation: Domain name=K-box; Domain location=26-123; Score =132.9; E_value=8.6e-37; Accession=PF01486.8; Description=K-box region
MMRPRDWDSQSGSMYKTLERYRSSNYSTQEVKAPLESEINYQDYLKLRTRVDFLQTTQRNILGEDLGPLSMKELEQLENQIEVSLKHIRSRKNQMLLDQLFDLKSKEQELQDLNKDLRKKCCQLQETSPQNVIHDVSWEEGGHSGSSVLGPFQGLLQHHGNDPSLQTRYHQQAYMDQLNEDMADPDEHGRLRSLGLYPAACITVRIARGPRHHPHTADGHTTNCRRQSSPLALANRFGCWGRLMSWRRPLGMSMAQEGVSEPASPIPIHRPTMDFSWNTACVRKFCPVRAARLYETSH

SEQ ID NO: 59732 - protein, 888 aa, Zea mays
  Coding DNA Sequence Number=SeqID_17953
  Gene Ontology: Mol. function=methionine-tRNA ligase activity; Cellular component=cytosol; Biological process=tRNA aminoacylation for protein translation
  Homolog annotation: Hit_ID=Q9ZTS1; Match level="QueryCoverage=87%, HitCoverage=95%, E-value=0.0, Identity=90%"; Hit description =Probable methionyl-tRNA synthetase
  Pfam annotation: Domain name=tRNA-synt_1g; Domain location=20-413; Score=681.6; E_value=6e-202; Accession=PF09334.1; Description=tRNA synthetases class I (M)
  Pfam annotation: Domain name=tRNA_bind; Domain location=667-760; Score=163.8; E_value=4.6e-46; Accession=PF01588.10; Description =Putative tRNA binding domain
  Pfam module annotation: Pfam domain module=tRNA-synt_1g::tRNA_bind; Domain location=20-413::667-760
MASSSSPPPPKLPIPGRRNILITSALPYVNNVPHLGNIIGCVLSADVFARYCRLRGYNAIYICGTDEYGTATETKAMEEKCTPKEICDKYHAIHNEVYKWFNIKFDKFGRTSSPEQTEVCHAIFHKLMENNWLTENTMQQLYCDTCQKFLADRLVEGTCPNKVCNASARGDQCETCSTLLNPTELIDPKCKVCKNTPRIRDTDHLFLELPLLRDKLVNYINETSVAGLWSQNAIQATNAWLKEGLKPRCITRDLKWGVPVPHEKYKDKVFYVWFDAPIGYVSITASYTPEWEKWWKNPDNVELFQFMGKDNVPFHTIMFPSTLLGTGEKWTMMKTISVTEYLNYEAGKFSKSKGIGVFGNDAKDTNIPPEVWRYYLLMNRPEASDTLFTWADLQAKLNSELLNNLGNFINRAGYGSVVPDAPNAGAHTLTKTLAEKTSKWVEQYLDAMEKVKLKQGLKSAMGISSDGNAYLQESQFWKLYKEDPAACAIVMKTSVGLVYLLACLLEPFMPSFSDEGVKLREAQKQQLMLKPTKLLTSSRAQNYLDDDTEDGYMLPVPLPRAPAPAPVEKRTQFQCVASKVFCSYQTLGSHHASNVHGGRGCCFVPPVCSHSSPAAPAATPLSPINSPCMIDPHFNPDGGTKKEPKKQSGGSKSKTAEADITVAKLDIRVGLIRKAEKHPDADSLYVEEIDVGEDAPRTVVSGLVKFIPLEEMQSRKVCVLCNLKPVAMRGIKSHAMVLAASNEDHTKLVEPPESAAVGERVTFAGYAGEPEASLSGKSKTWEKLAAELHSNGPAPAPAAPPPPRTTAPPPVLLPAPDYCGLDVRQGEVEETRGGARWYGRTGGTSIGYHASIRALCPVPSPSRARPSPSPPPCTSQKATAPGAAPVGE

SEQ ID NO: 59733 - protein, 102 aa, Zea mays
  Coding DNA Sequence Number=SeqID_17954
MELARGLGWMGQGIAAGFMLQEGRVREEGGNTITRGFRLVATNSVENDIGEGDFQAEDSVAGGARRCNRFPKKRRRIWVLEARFQGLQGSQRSLGYSFGTVV

SEQ ID NO: 59734 - protein, 150 aa, Zea mays
  Coding DNA Sequence Number=SeqID_17955
MGDRLVRSPAFVVDLHGRSSAAFVREVEAEAVKIVGKYVPRTETLRSWDIRGSNVRLNRVFELNSLPYAGYPKDDDADVADRRGKKGGGSVDEDPSRGAVSAAAVKKRKIGTTVEGLGLPIVLLWIYWKLVRLPGRRCLRPSSGNLPREC

SEQ ID NO: 59735 - protein, 181 aa, Zea mays
  Coding DNA Sequence Number=SeqID_17956
  Subcellular localization annotation: CTP_CleavageSite=41; ConfidenceScore=5.44e-01
MKEAKTKQPSAGSSSYGMGNTDFTSSLRHGLGRTSLIGPPTCGLGGAGLIMPSFDTSAFTSMYAGLPFPSRCLDFEEEDGLGPGLDLSELHGPEAILQFLFACDKVLSYGSDDYSSDEEGYDPTRECFHAGHEEHDTKKGDPILFGKLSKSNTQLIIIKKAHYRGPNPTWASQGGDDVGDP

SEQ ID NO: 59736 - protein, 139 aa, Zea mays
  Coding DNA Sequence Number=SeqID_17957
MGFELSRARRRAAALGLDWKKSARLAGDESECVQAGRERHAGRSRRWERERGMSREGGDKAASGENGGGIFTGGERRPKNITQSGTVAGERMRTTETQENLAPAERIGTSGWEIFLKQSARWELQLAGEQNTEEDTVRR

SEQ ID NO: 59737 - protein, 200 aa, Zea mays
  Coding DNA Sequence Number=SeqID_17958
  Homolog annotation: Hit_ID=Q3LRV2; Match level="QueryCoverage=44%, HitCoverage=38%, E-value=7e-38, Identity=83%"; Hit description=Gag
MNVCELTLAVSHPPQVKNRYHRMRHMKDAMITPGDYVRARVFVPRNPGVTYKEGSSSSIKSHWKGDKKKKMKKVVYYETDSSSPSTSGSESSTTSKRHERKKYMSDKMRHHLTSLHESIWDIVEFGAQVPKAGDKDYDSDEAAQIQHFNSQATSILLASLCREEYNKMQGLKSAKEIWDFLKTAHEGDEVTKITNDVHPL

SEQ ID NO: 59738 - protein, 126 aa, Zea mays
  Coding DNA Sequence Number=SeqID_17959
  Subcellular localization annotation: CTP_CleavageSite=60; ConfidenceScore=5.34e-01
MVCTCLTRATCDSSFGNSSPYFQKPAALLLHVARSRSCQSRGEKFPIQFAGVPFSCIALRIDARRSGSRFRNGGDGLRRVPVQALSRDAGLGRVPQAIGSRPTARITLCTPVGQDGFVAIDRWMEG

SEQ ID NO: 59739 - protein, 356 aa, Zea mays
  Coding DNA Sequence Number=SeqID_17960
  Gene Ontology: Mol. function=ribonuclease H activity
  Homolog annotation: Hit_ID=Q94LT0; Match level="QueryCoverage=74%, HitCoverage=89%, E-value=2e-47, Identity=41%"; Hit description =Putative RNase
  Pfam annotation: Domain name=RnaseH; Domain location=145-280; Score= -16.2; E_value=0.0019; Accession=PF00075.14; Description=RNase H
MDSSSVGEPFYVVRKGDVIGIYKTLSECQAQVSNSVRDPSVTVFKGYSLRKDTEEYLAARGLRNALYAIDATDARDELFDDLVPCPFQVTRTMLSARKFQLLQQPDGAASSTLKRSQEIEIGPSKKHPKVDEQVPLPDSHLSCILEFDGASKGNPGKAGAGAIIRQIAQLREGLGIATNNAAEYRALILGLTYAAKKGFKYIRAQGDSKLVCNQFLAILFLILGLESVKGTQPNSVKVQDIWRVKNDNMASFCKKVKELKGTFHLFQIRHVLRLVKFKSSRTSHASSCVVVKCGLCIAKVLGLKLCHICSVLIDTKGRDETTVVLEVVVGLIYLRSIEQTDAILSRFLGNLIVSNF

SEQ ID NO: 59740 - protein, 145 aa, Zea mays
  Coding DNA Sequence Number=SeqID_17961
MGERWQWRPCAPALGGGVASDRARLLTVATWPERMLAYSRRWCGPILRRGQTHARLLAPVARPTAEAVARQAYVFLDRGVGARGLSGIYGCDRVEQPTKLRAILIIEWTTGRKAIFSSLPIPIPIVGHLLSNDVNQEQDNTIVKD

SEQ ID NO: 59741 - protein, 148 aa, Zea mays
  Coding DNA Sequence Number=SeqID_17962
MGKSNKRKREPTPPSEDFGYSEYSEEEFSSESEGSPAPASPPASSDDSDDSQGLPRKSGLISGPSSAPGSRARMSRSTPRTRRTLRTRPRRAVVAMARMTTTTEATVTTATTAAVAAARAATATAAGAATSAAAARSATRPVARCHWL

SEQ ID NO: 59742 - protein, 78 aa, Zea mays
  Coding DNA Sequence Number=SeqID_17963
MTGWDAPGKKQETFILLLSKGGRGKEIQGTALADGEYAHVTRSYVAQYLLHLRELQQRPHLWSRGRCTKGGGKDAWEE

SEQ ID NO: 59743 - protein, 116 aa, Zea mays
  Coding DNA Sequence Number=SeqID_17964
MPRCGGTAADVRAHDTLVCYFLPNPVLRNAEVLAIYIEVTYDVAAAPRVVLVERLQPTSLSRFQRGANGDLSVAAWLPRRGTQDAWWTDATVRMLHFISRGEDVHHGGWGCSHPSR

SEQ ID NO: 59744 - protein, 172 aa, Zea mays
  Coding DNA Sequence Number=SeqID_17965
  Gene Ontology: Mol. function=structural constituent of ribosome; Cellular component=ribonucleoprotein complex; Biological process =translation
  Homolog annotation: Hit_ID=Q2R4A1; Match level="QueryCoverage=99%, HitCoverage=100%, E-value=6e-78, Identity=76%"; Hit description=40S ribosomal protein S5, putative, expressed
  Pfam annotation: Domain name=Ribosomal_S7; Domain location=46-172; Score=153.2; E_value=6.7e-43; Accession=PF00177.11; Description =Ribosomal protein S7pS5e
MAEVEQQQDTPKLFNRWTFDDVQVNDISLNDYLAVNATKHAMYLPHTAGRYSKKRFRKAQCPIVERLTNSLMMHGRNNGKKVMAVRIIKHTLEIIHLLTDANPIQVVVDAIINSGPREDATRIGSAGRVLFRNIKTIAECLADELINAAKGSSNSYAIKKKDEIERVAKANR

SEQ ID NO: 59745 - protein, 179 aa, Zea mays
  Coding DNA Sequence Number=SeqID_17966
  Homolog annotation: Hit_ID=Q6EPQ3; Match level="QueryCoverage=49%, HitCoverage=12%, E-value=4e-24, Identity=69%"; Hit description=SPX (SYG1/Pho81/XPR1) domain-containing protein-like
MSFCLTPHYSVPQYVMSSLITLVFAEVLEGVNLFLLSLVMSSRLSRETYNGRLLSTEAETLARVAADMTITAAEYVGQSCLLNTTLLPSLRPRVFQRLPASVSLTSSRSLASASSPHIPASASIFVLPCALASSRPSVFQHLRPSRLPASISSPRGFSSQRLPAALASQRPSISLTRDL

SEQ ID NO: 59746 - protein, 71 aa, Zea mays
  Coding DNA Sequence Number=SeqID_17967
MGTILCMCRPCSALIDTSLLVGDESVTSPVNHHLRPHESSTTFESRGLVDPHCGVLTALVFWPNVHPQHTC

SEQ ID NO: 59747 - protein, 106 aa, Zea mays
  Coding DNA Sequence Number=SeqID_17968
MQCCAEARGADDKRVKLSLGVFAEPRTRGVELDQRPWPEVGMTGRGASSWSRQGKEELRSGLLGPGARRSFVLQPMGRGRASSWVRGREAGEGSTEGTTSRWWVEA

SEQ ID NO: 59748 - protein, 88 aa, Zea mays
  Coding DNA Sequence Number=SeqID_17969
MAHRTVRCATGAPTVHHRCANGHFQRLVLTGSRWTHGAPDSEQSTVRCTPDSPVRCPGRHCRGPAWPHLAEGAPDSPVHTGQSGAPKH

SEQ ID NO: 59749 - protein, 91 aa, Zea mays
  Coding DNA Sequence Number=SeqID_17970
  Homolog annotation: Hit_ID=Q75T24; Match level="QueryCoverage=39%, HitCoverage=14%, E-value=5e-09, Identity=91%"; Hit description=MinE
  Subcellular localization annotation: CTP_CleavageSite=65; ConfidenceScore=5.17e-01
MQPFQLPSKFQRESSLPASNTEDKAKRKRGKGAGAQNPSTVASIMAMSIFGGCVGGDSGALIAPSASSLRPPFRLVAGPKVRTPARLLPVP

SEQ ID NO: 59750 - protein, 159 aa, Zea mays
  Coding DNA Sequence Number=SeqID_17971
  Gene Ontology: Mol. function=zinc ion binding; Cellular component =integral to membrane; Biological process=ubiquitin cycle
  Homolog annotation: Hit_ID=Q2HV66; Match level="QueryCoverage=61%, HitCoverage=56%, E-value=3e-31, Identity=63%"; Hit description=Zinc finger, RING-type; RINGv
  Pfam annotation: Domain name=PHD; Domain location=87-132; Score=4.5; E_value=0.02; Accession=PF00628.19; Description=PHD-finger
  Pfam annotation: Domain name=zf-C3HC4; Domain location=88-129; Score =41.1; E_value=3.7e-09; Accession=PF00097.15; Description=Zinc finger, C3HC4 type (RING finger)
  Pfam module annotation: Pfam domain module=PHD::zf-C3HC4; Domain location=87-132::88-129
MERPTVRSGRPSVSSTTARPQLSNLGLGYSIAIALGFLILGSESPEDDAYPSSSAAAACSPVGLDAAAIASYPKVAFSSRAAEANAMCSICLSEYRDGETLRVMPECRHGFHVACLDAWLSRSASCPVCRSSPVPTPNATPLSELVPLSQYAADRRRRR

SEQ ID NO: 59751 - protein, 106 aa, Zea mays
  Coding DNA Sequence Number=SeqID_17972
  Gene Ontology: Mol. function=heat shock protein binding; Cellular component=integral to membrane; Biological process=protein folding
  Homolog annotation: Hit_ID=Q2QQD1; Match level="QueryCoverage=98%, HitCoverage=50%, E-value=2e-23, Identity=52%"; Hit description=DnaJ domain containing protein, expressed
MGGLGVTRLASTDELIETKNPEPEIQRLDKNHFTILSTEEERRLYDWSLSRSGQPERYVWPFEVDPLELAPDPPKEPEDEFPTKLVGYFLLAWFILSVGLSVALNK

SEQ ID NO: 59752 - protein, 182 aa, Zea mays
  Coding DNA Sequence Number=SeqID_17973
MALHKLCDDGGSQLSYGSKATHDITPARCQDLSGCHIGMAFLEKVGRVGPRTRQALSWGRSLPSPAWTLVTPLLQAHPTWARDEHEGRGTSTSLTPVSGHLASPPFALAHALDPSGLGHAAHSLVGLGTPLSRNADTTHQEAYRNVWIGRVPRHLIFIAREGKYPETGNVRNIGRLFKCLIF

SEQ ID NO: 59753 - protein, 122 aa, Zea mays
  Coding DNA Sequence Number=SeqID_17974
AVLIGVEGRAWLVADDDNLGFASGGGEEAERVELDDAPMGGDLCLVGFLDNELVGQSALESWSVELGSFRSIARDALGRVENALLVWGWPRVRQRVRLPPEVSVSHPAMASGEPCLESLVPW

SEQ ID NO: 59754 - protein, 83 aa, Zea mays
  Coding DNA Sequence Number=SeqID_17975
  Subcellular localization annotation: CTP_CleavageSite=30; ConfidenceScore=5.57e-01
MDSSTRSMHSVLTLKSGVTKVMVITKKTARKSTGGRIRINTRVFPPPSPPEARPSRITMDDILKGFDEEIEYPEFENEENPWR

SEQ ID NO: 59755 - protein, 554 aa, Zea mays
  Coding DNA Sequence Number=SeqID_17976
  Gene Ontology: Mol. function=DNA binding; Biological process =regulation of transcription
  Homolog annotation: Hit_ID=Q6Z869; Match level="QueryCoverage=71%, HitCoverage=78%, E-value=4e-71, Identity=50%"; Hit description=Myb family transcription factor-like
MEMDPPPPPPLHADRRLRFRDYLLALEEERRKIQVFQRELPLCLDLVTQTIEGMRSHMDSVVVGSEETVSDHGGPVLEEFMPLKPTTLSSSSSQPQSQDDHDSAHYLEHRRAAAATANDVVDADKDDEALGDPETAAASSSRPLPHPETKKAMPDWLQSVQLWSNQQQPSVSPPQHQDELLLPCRPVALNACRKSGGAFQPFEKEKKKEDKEEKQRAELELPLPAAASSAVVGDSCDRAGATDTDTDTAENNKASSTKGGKDKEAQLSSQAPSRKARRCWAPELHRRFLQALQQLGGSHDANVCAYIHAVATPKQIRELMNVDGLTNDEVKSHLQVISHQSSVASVLTSPFILNILGGPSEVSSPHSASELGGGGGPERRHQRRCAAGRTAVRRGGGHLGATAGVRCGSRSAAAAGARAPSRRRVGNDDNSRRQGVRAGGDDVDARTATATASGSGEAVEQLLRRAAQWGRLLWLAGRVIVVVADRLCLMKRRRSVPSLASNFSCLRPEYYHNVITLSNYLCCLIFVGTGDPMGDPYPHGYGYGGKSIPASVYG

SEQ ID NO: 59756 - protein, 413 aa, Zea mays
  Coding DNA Sequence Number=SeqID_17977
  Homolog annotation: Hit_ID=Q94GG7; Match level="QueryCoverage=19%, HitCoverage=28%, E-value=2e-11, Identity=44%"; Hit description =Putative transcription elongation factor
  Pfam annotation: Domain name=TFIIS; Domain location=18-104; Score =85.5; E_value=1.6e-22; Accession=PF08711.1; Description =Transcription factor S-II (TFIIS)
MAGGNASCSVRPDHGGNGDVVATVERISRRLARKQADNQAVVDLIRELEALPMTYEALEATMIGRTVNGLRKTAPSALARLLADTLYRQWKALAHEWHASSKTQPQTAPPEADNGIKKRPSLSSPPPKVDDDKDTRKRSSSPPPPQPVDAQQSAAPEADREMGAPPSTTRAASVIRKPNILRFRMVTVTEPEKPHQRRVRLIPLATPDPAPSSNDAMQNDADNKQQATCCPATAASHQSTSADNEHVGTTDATPLTTVVKPSTALPNSVSSSEACKRKEEAPTDFEEERLAKARARLLEGYEEASAAREKRKTKLIDVIDVPEKARQRPATHRTWKKQPPVVLPNRPKKFKHKLNPCCEIFDQSGYCGRQTRRRTATPTRRSAWTTSACRMHAGWKGCRPDVVDDFEGVHPRT

SEQ ID NO: 59757 - protein, 209 aa, Zea mays
  Coding DNA Sequence Number=SeqID_17978
MATSLALKCSGSKQLLNDLEKALRKLELEADDSLSKIRDNDAHVVYVDPAAIGGVNSTISFRVPEVVKGGKTSNTEENMPAQKISTNMLVNYSSIMPSFMQGGYTDLLLGLDQEASTARKIGPVLHANLVHIWCVLLEPCSLWWSTSTRSLEMTPCQTSKQTPELVDLSAEFGRLVRPLHDAGAADGEVHAGRVDLARPACSDPFLARI

SEQ ID NO: 59758 - protein, 273 aa, Zea mays
  Coding DNA Sequence Number=SeqID_17979
  Homolog annotation: Hit_ID=Q10L59; Match level="QueryCoverage=75%, HitCoverage=14%, E-value=1e-37, Identity=47%"; Hit description=PWWP domain containing protein, expressed
MQIYGAKNVTLKAICFQQLKNCCGRCNRRGSSSKIIKYILEYLYMVIEGLSRTLNGSLLTTSSLSNKSADAVVTVSNRPVIVQSPEPSLDTQFVHNPSGKCTSESILQNNSIPDSASVPSKENDHIVLKGDICEETLMGTKTANDSWDCSELNNDSCGKTSALCMKLNRPALNVTQATSVPDRYSSSLEKASENVAASGVKETKTFGSAVCDVDRSSEPIDRSNNNVTSNTMRHSETIVVDSVNNVGDTASNSSLATKSSSIQSDADTWTSEL

SEQ ID NO: 59759 - protein, 144 aa, Zea mays
  Coding DNA Sequence Number=SeqID_17980
MAAKAAAAVTTIAHVVVDEDELFELDIALLDGRDHDHRRGGGGRRSSPAAGADADADAGHALLANCLLPLRSLQLQEALHATQQQEVPFPWTVRWEFFGEALLLEQGLRSHGELLPELWPLNVNGCVFEEMSMVTEEQSNHTAK

SEQ ID NO: 59760 - protein, 199 aa, Zea mays
  Coding DNA Sequence Number=SeqID_17981
MARICHKPCHTTHQNIPINHHCPKNQDRCVETFLIDIALNSLREADYGRWDTSGVNVSLRTFGRNGGTPQTWCCRAEQPRGGKRSRESSRRLSRCGGDGTSESKLVGYLSLVEPNIIIYRTQVDIGKRKQLLRDSTDSTCTYLLPDLGITDQYRVNFSSTVSTKNKFRTRSEDEYKSSRSHRTKRGGVHASAVAREKQK

SEQ ID NO: 59761 - protein, 303 aa, Zea mays
  Coding DNA Sequence Number=SeqID_17982
  Homolog annotation: Hit_ID=Q94GG7; Match level="QueryCoverage=21%, HitCoverage=22%, E-value=6e-09, Identity=44%"; Hit description =Putative transcription elongation factor
  Pfam annotation: Domain name=TFIIS; Domain location=5-94; Score=73.9; E_value=5e-19; Accession=PF08711.1; Description=Transcription factor S-II (TFIIS)
MAGADTSGSDVLATVARIDRRLAREKDNDVVVELIRELQAVDMTYEVLEATKIGHTVNALRKSAPTALARLLADTLYRQWKVLANEWITISTTQQQQPSPPPNTDTDSNKRSSSSPPPKAVDDKATNKPSSSPRPASPVDAEQSARPEPDHEKSAPTTISAAPVRKNILRFRMVTVKEPGKLDRCRLMIIPSEAPDPAPASNYATQNGGDNRQQAYCTATTSHQATNADNKGVYPSDNVPLTRTVKSPTALPNPVASTGTCNKRKGEPSTNFDEEKLAKARVRHHEGYKAASVAKEKRRTKVV

SEQ ID NO: 59762 - protein, 456 aa, Zea mays
  Coding DNA Sequence Number=SeqID_17983
  Gene Ontology: Mol. function=transferase activity, transferring hexosyl groups; Cellular component=integral to membrane; Biological process=electron transport
  Homolog annotation: Hit_ID=Q2QXP0; Match level="QueryCoverage=95%, HitCoverage=95%, E-value=1e-169, Identity=63%"; Hit description =Glycosyltransferase 3, putative, expressed
  Pfam annotation: Domain name=Glyco_transf_34; Domain location=152 -396; Score=361.1; E_value=1.8e-105; Accession=PF05637.3; Description= galactosyl transferase GMA12MNN10 family
MGVAAGGGVRLRASSAKKQRQRTLNNIKITLLCGFITVLVLRGTAGFNLLVSSGDLDGAAADAKVVEDVERILAEIRSDSEADDVVVVVEGGSSSSSSPRNATAASFGNFSASATLVKVREYSLGPPVRGWDAQRRDWMAQHPEFPRLHPRGRPRVLLVTGSPPGPCDNPAGDHYLLKATKNKIDYCRLHGIDVVHNMAHLDPELTGYWSKLPLVRRLMLAHPEVEWIWWVDSDAIFTDMAFELPLSRYDGSNLVIHGYPDLLFEKRSWISLNAGIFLLRNCQWSLDLLDAWVPMGPRGPSRVEAGKLLTASLTGRPPFDADDQSALIHLLLVQKERWMDKVHVETEFYLHGFWTGLVDRYEQMMEDNHPGLGDDRWPFITHFVGCKTCGRYEDYPLDRCIRGMERAFNFADNQVLRLYGFRHRSLTTAKVRRVTDPATNPLEAKEAALNMDAKFT

SEQ ID NO: 59763 - protein, 567 aa, Zea mays
  Coding DNA Sequence Number=SeqID_17984
  Gene Ontology: Mol. function=transferase activity, transferring hexosyl groups; Cellular component=integral to membrane; Biological process=electron transport
  Homolog annotation: Hit_ID=Q2QXP0; Match level="QueryCoverage=70%, HitCoverage=85%, E-value=1e-133, Identity=58%"; Hit description =Glycosyltransferase 3, putative, expressed
  Pfam annotation: Domain name=Glyco_transf_34; Domain location=217 -465; Score=264.8; E_value=1.7e-76; Accession=PF05637.3; Description =galactosyl transferase GMA12MNN10 family
MAVKPPTASANPVASPGACKKHKSEAPTDFDEERLAKAMARPALHNVARGFVYTQWDSRTNEPGRQSVGLVNEPGRQCRISQRAEQITDHPLLCAFVTLLVLRGTVGVNRRLVYIAGSPDNRADPATATGSARPVEDVERILREIRADSDDDPDAGPNNDEAPTSTSSSAATGDHYDRGAAWTTTTYRLQPRVTRWNAKRRRWLHQNPGFPSRDARGGPRVLLVTASPQGPCGSPDGDRFLLRATKNRLDYCRLHGVEMVHTTARLEDPELRSPGDGWAKLALLRRLMLSHPEVEWLWWLDAGALVTDMGFELPLARYEGAHLVVRGDSYQLFQRRAWDAASTASFLLRNCQWALDLLDAWAVMAPRGRARHDAGALLTATLAGRPAGEADDQSALVHLLITEKERWMDRVYLENQYYLHGVWTALVGKYEKAMEKHHPGYGDDRWPFVTNFAGCNPCDDGKNRSDEYPLDRCASGMERAFNFADNQVLRLYGFRHESLASTEVRRVANRSTDPLEAKEEALAFLKKPNEPDLWSNDVRKNRKRKGKGDLDSVLARILRRLGWRSQC

SEQ ID NO: 59764 - protein, 102 aa, Zea mays
  Coding DNA Sequence Number=SeqID_17985
  Subcellular localization annotation: CTP_CleavageSite=49; ConfidenceScore=5.53e-01
MKLWKETSRSSKTTTSSRCGLAATPSRLPVKAVLSTFRFRTLIYSRERLANNKNEECIIRLIGAKEGDTQSTIGLVQPDPITSTSADFENEPGLIPNTGYWM

SEQ ID NO: 59765 - protein, 636 aa, Zea mays
  Coding DNA Sequence Number=SeqID_17986
  Gene Ontology: Mol. function=hydrolase activity; Cellular component =extracellular space; Biological process=biological_process
  Homolog annotation: Hit_ID=Q2QXM4; Match level="QueryCoverage=58%, HitCoverage=84%, E-value=1e-146, Identity=67%"; Hit description =Ser/Thr protein phosphatase family protein, expressed
  Pfam annotation: Domain name=Metallophos; Domain location=199-392; Score=35.1; E_value=2.4e-07; Accession=PF00149.18; Description =Calcineurin-like phosphoesterase
  Subcellular localization annotation: CTP_CleavageSite=58; ConfidenceScore=5.39e-01
MATAALALLVLALPASLAVTSTYVRPPPRATLSLLQDAGSDGQTPQQLQQSKQLQQCRLAACRTRPMVVMWHMQLGISLHVWLDWITVLGICRMGPHSVHDVSARVPVHISLVGPDKVRVSWITAADAPATVDYGTASGQYPFSATGNTTSYSYVLYHSGSIHDAVIGPLQPSTTYYYRCSGSASRDLSFRTPPAVLPFRFVVVGDLGQTGWTESTLKHVAAADYDALLLPGDLSYADFVQPRWDSYGRLVEPLASARPWMVTQGNHEVERLPLLEPRPFKAYNARWRMPYDYAADGTPPSDDNLFYSFDVAGGAVHVLMLGSYADYAAGSAQLRWLRADLAALRRRGTPPAFVLALQQGAPGGGRRHAGRHGGAAVPRRVDAVFAGHVHAYERFHRVYAGKEDPCGPVYVTIGDGGNREGLADKFIDPQPSISVFREASFGHGRLEVVNTTHALWTWHRNDDDQPVVADQKRSRTARLLGRGAVTGCLLLWSSGLRSSHLSSSGDRRSGSASVGGGSRQLGELAMWRGAEQSRCGRAGAAASGGAPGRRAVGSGHGAVGASCLGGGAEARCRRLWQLDQGNTSLCLENLLIMQENDRLRRKAQQLDQENKALLAELKQREQGTSASASTNLKQPK

SEQ ID NO: 59766 - protein, 59 aa, Zea mays
  Coding DNA Sequence Number=SeqID_17987
MARRWPGAAVADLHGCTGNGGPRSQSRLPPGGHCQLVLRYAGLQPRQIEPTSRGLGTKE

SEQ ID NO: 59767 - protein, 105 aa, Zea mays
  Coding DNA Sequence Number=SeqID_17988
MSSALLSLVAYGQIALDLKLRLCVASLAHTSSLPIAPGSLAGDFPAAGTRHLAVDRPSRVSTDQIDPASVIPYFCSCLTTILSEQNRVTGKEPLRNFTGDRFSPP

SEQ ID NO: 59768 - protein, 87 aa, Zea mays
  Coding DNA Sequence Number=SeqID_17989
  Subcellular localization annotation: CTP_CleavageSite=54; ConfidenceScore=5.05e-01
MAPLEPIGRRAGKDSATVHPIMVEAAARATPRFSIPSLVAKGKVTTRKRSSRAYAPHKSVKDTTLVARGEPLSPQAFVSPSLVEQPL

SEQ ID NO: 59769 - protein, 49 aa, Zea mays
  Coding DNA Sequence Number=SeqID_17990
MMKDFTMTVELSPYEDMLRMMKQFLLALLDLLMDEFEVADLLMKLLFVG

SEQ ID NO: 59770 - protein, 159 aa, Zea mays
  Coding DNA Sequence Number=SeqID_17991
MPKIFEKDASDAKPRLVRLRYKYKYEDKFGEPSDGWLDYIEAKCNEILDSKKRKKKVTTRQRKVPKVQVKSTQASKEILSIRVRGLLRLKRPKRQLKMIHRLEKDLSIKTWVVEDNMETEVCRYMTDNIGFPKLEAMLSTMSSEEFSECLLTRILRVCF

SEQ ID NO: 59771 - protein, 65 aa, Zea mays
  Coding DNA Sequence Number=SeqID_17992
MTVGGGYLSYGAPDSPVYTGHVRCASHVTNAVGIRPLELLSSGPAWMSGAHRTCTVQCPVAVGAK

SEQ ID NO: 59772 - protein, 101 aa, Zea mays
  Coding DNA Sequence Number=SeqID_17993
MTRRIPRRRKKESMEEDEDNDDEGNATDTIGSDDDKDVDGGKGKGGDDDSSSRGNNSGGGKEGDYDKGKCSNGGGDDSNNEGSNDGGGNSDSNVGGEAPPA

SEQ ID NO: 59773 - protein, 99 aa, Zea mays
  Coding DNA Sequence Number=SeqID_17994
MVEAHRRRRSSPEPNTNLSIEDEPSVGSTKRRHQDEALDKMNAAVVIAIHRGLLEEHKQTHISIKLLADDSEIGAVLGMLARESSESEDLESGVAAFGQ

SEQ ID NO: 59774 - protein, 103 aa, Zea mays
  Coding DNA Sequence Number=SeqID_17995
MKFKIAWLDEIIKRKEITVIQEGSYTFCQPNNEDVVTYLYDILHYESHTFENMWHKTKVQIVELNPLASQVQVHKSQIRKESSGKRKSLPLQILMGIKDSLLE

SEQ ID NO: 59775 - protein, 106 aa, Zea mays
  Coding DNA Sequence Number=SeqID_17996
MEETLFRRCTMDLVYGDACPPRLCWLRRARSCRATAATETLVSAIVEGQIERLFLYDGNGINRKGSKLEKWLEGLGEGGIETRNKSGLSQRENYMLPFKLDFSVLY

SEQ ID NO: 59776 - protein, 178 aa, Zea mays
  Coding DNA Sequence Number=SeqID_17997
  Homolog annotation: Hit_ID=Q67UT5; Match level="QueryCoverage=32%, HitCoverage=13%, E-value=3e-12, Identity=59%"; Hit description=F-box protein-like protein
MYRGGLDRFKKAQALEPFSVNSKPGTKKAPAAAGTTKALALLTLPQNSNFVLDGEVFDRINLEKQEHAVVIRHRNGRTSTTIHKRNFEKEDTTVYRNNKHFFFSDYSICWSDVDETFEVDWEFLNAQWSDGMCANLQIVQTIGIAWLPNEFSFMKLILSKARLLRTLYVDRNQDDFDN

SEQ ID NO: 59777 - protein, 67 aa, Zea mays
  Coding DNA Sequence Number=SeqID_17998
MVVVCANCSGLDLDDRCWESETMMPISIEMEKGIGVSVLKDPKNCRGLGKGISKYRVNLSYLTCDGL

SEQ ID NO: 59778 - protein, 38 aa, Zea mays
  Coding DNA Sequence Number=SeqID_17999
MAKVHFLMGCADPMPSISETKKILRQHNQGILGLSQMS

SEQ ID NO: 59779 - protein, 170 aa, Zea mays
  Coding DNA Sequence Number=SeqID_18000
  Gene Ontology: Mol. function=protein serine/threonine kinase activity; Biological process=protein amino acid phosphorylation
  Homolog annotation: Hit_ID=Q75GE8; Match level="QueryCoverage=68%, HitCoverage=23%, E-value=6e-21, Identity=50%"; Hit description =Putative calmodulin-domain protein kinase
MKLLSLSRCSGGMVAAVVKSIDVAAELEVETSSPGVRSIPPQILLLLGGHDDHGQLLCHTLDGRSGKELPEAAEGEPLQRHVKPRGGGPGKPWPGGVAGPDAEGPRRTIRARRRAGTRRVRRHVHVFAMSARYPYKSVSKRCLWTLVDMEDLRWEVDILRHMPVHPNIVS

SEQ ID NO: 59780 - protein, 858 aa, Zea mays
  Coding DNA Sequence Number=SeqID_18001
  Gene Ontology: Mol. function=protein transporter activity; Cellular component=nuclear pore; Biological process=protein import into nucleus, docking
  Homolog annotation: Hit_ID=Q8GTC5; Match level="QueryCoverage=98%, HitCoverage=99%, E-value=0.0, Identity=79%"; Hit description =Importin beta-like protein
  Pfam annotation: Domain name=GAT; Domain location=103-191; Score= -21.7; E_value=0.1; Accession=PF03127.5; Description=GAT domain
  Pfam annotation: Domain name=HEAT; Domain location=164-201; Score =7.6; E_value=5.1; Accession=PF02985.12; Description=HEAT repeat
  Pfam annotation: Domain name=HEAT; Domain location=208-244; Score =19.3; E_value=0.014; Accession=PF02985.12; Description=HEAT repeat
  Pfam annotation: Domain name=HEAT; Domain location=355-391; Score =13.9; E_value=0.57; Accession=PF02985.12; Description=HEAT repeat
  Pfam annotation: Domain name=HEAT; Domain location=397-433; Score =18.0; E_value=0.034; Accession=PF02985.12; Description=HEAT repeat
  Pfam annotation: Domain name=HEAT; Domain location=636-673; Score =1.2; E_value=31; Accession=PF02985.12; Description=HEAT repeat
  Pfam annotation: Domain name=IBN_N; Domain location=27-95; Score =59.2; E_value=1.4e-14; Accession=PF03810.9; Description=Importin -beta N-terminal domain
  Pfam annotation: Domain name=Xpo1; Domain location=20-194; Score= -20.7; E_value=0.1; Accession=PF08389.2; Description=Exportin 1-like protein
  Pfam module annotation: Pfam domain module=GAT::HEAT::HEAT::HEAT::HEAT ::HEAT::IBN_N::Xpo1; Domain location=103-191::164-201::208-244::355 -391::397-433::636-673::27-95::20-194
MEKDTAMDITQVLIAAQSPDANLRTVAEGNLTQFQEQNFPNFLLSLSIELSNDEKPPESRRLAGIILKNSLDAKDSAKKELLTQQWELLLVTLGSSVHDARHTSSQVIAKVASIEIARREWQDLVAKLLGNMTSAGAPAPLKQATLEALGYVCEEISPQDLEQDQVNAVLTAVVQGMNQTELSPEVRLAAVKALYNALDFAESNFANEMERNYIMKVVCDTAVSKEVEIRQAAFECLVAIASTYYSHLEPFMETIFYLTANAVKGDEEPVALQAVEFWSAICDEEIALQDEYEGSEDGNSAIHFRFIEKALPLLVPLLLETLLKQEEDQDQDDNAWNISMSGGTCLGLISRTVGDAVVPLVMPFVETNITKPDWHCREAATFAFGSILEGPSVGKLAPLVQAGLDFLLNTMNDANSQVKDTTAWTLGRVFELLHSPAGINSIINGSNLPRIMSVLLESTKDAPNVAEKVCGAIYFLAQGYEDAESTSSVLTPYLSNTIAALLSAADRAETTHFRLRASAYEALNEIVRVSNIPETSGIIAQLLQEIMRRLNLTFDLHILSSGDKEKQSDLQALLCGVLQVIIQKLSSTDAKSIISQTTDQLMVLFLRVFACHNSTVHEEAMLAIGALAYATGPDFVKYMPNFFTYLEAGLQNYEEYQVCSISVGVVGDICRALEDKSLPFCDRIMTVLLKDLSSSMLNRSVKPLIFSCFGDIALAIGENFEKYLPYAVPMLQGAAGLLGTLDLSDDDMGIKGPKAQLMIPYATHLLQFTEAVSKDRSSYNIYPCSVVICAIRDDSVTKAAVAVLGDLADTLGQSSKDLFKTHLFHVEFLRECQAQELDDEVRETAQWAQGMINQAVVS

SEQ ID NO: 59781 - protein, 160 aa, Zea mays
  Coding DNA Sequence Number=SeqID_18002
  Gene Ontology: Cellular component=proteasome regulatory particle (sensu Eukaryota); Biological process=proteolysis
  Homolog annotation: Hit_ID=Q8W423; Match level="QueryCoverage=98%, HitCoverage=35%, E-value=5e-27, Identity=46%"; Hit description=26S proteasome regulatory particle non-ATPase subunit12
MDPKMTEVTQMFARFKTAYACNDLNTCVTLLSQLKVRYPASLDLYCPPFTSRCPSFSRKFHGWGGVCFVGVVRAGAVCTLKRVHLTQFPSHPALFQQTPNIVEELKLAITIPSTEQVLNSAQNISGDIYEHAVVLSMKFEDQDAFERNFCQLKPYYVDTW

SEQ ID NO: 59782 - protein, 219 aa, Zea mays
  Coding DNA Sequence Number=SeqID_18003
  Gene Ontology: Mol. function=DNA binding; Cellular component =membrane; Biological process=DNA integration
  Homolog annotation: Hit_ID=Q8W0X5; Match level="QueryCoverage=93%, HitCoverage=65%, E-value=2e-99, Identity=84%"; Hit description =Putative pol protein
  Pfam annotation: Domain name=RVT_2; Domain location=1-58; Score= -170.2; E_value=0.0011; Accession=PF07727.4; Description=Reverse transcriptase (RNA-dependent
MTQKFEMSMMGELNYFLGFQVKQLKDGTFISQTKYTQDLIKRFGMKDAKPTKTPMGTDGHVDLNKGDSDYAGCKVDRKSTSGTCQFLGRSLVSCSSKKQTYVALSTAEAEYVVAGQCCAQLLWMRQTLRDFGYNLSKVPLLCDNESAIRMADNPIEHSRTKHIDIRHHFLRDHQQKGDIEVFYVSTENQLADIFTKPLDESTFCRLRSELNVLDLRNLD

SEQ ID NO: 59783 - protein, 74 aa, Zea mays
  Coding DNA Sequence Number=SeqID_18004
MTNDVELYNLDAIDLQVLSLPAETDGHVDDDDARSDSSLQVVGTYFTHAVPLQFSLKGSRIGYQMVEWMVPVTN

SEQ ID NO: 59784 - protein, 568 aa, Zea mays
  Coding DNA Sequence Number=SeqID_18005
MATCCSISLPSSPWLLLLAVLIIGDAAAVMAVPTRPLLRIAEPPTAPGTAAGPAGASRPGGGRGGRLPDRSVAGAEVIPRRVRCRGDGLSDLYNLGAIKSDTVGILFFLFFFSESQPIRDLGFDFSNNSVLERDVFFMAFNLLDKVHACNFGLRTPERATKPSQRNARKEAPVSSQQQGSSYATARRRPTSHLPVPPARHRTRSRPDMGPGTGNGAGAALQYLAAAASAATGNNVSTVPHSRTLFYSIEYRCLNDVFYVHSKLLQATDYSPTMPEGSRGAAQDDKTDSRKGSHTQSQPCAKAYPRLPRAASTRYDTTLPDPDLDPSSNKPGTGVERCGVTSRRSRVQRRSSTPSPRFSCASQAHARPRSDSDAPTPAFLSHVHLTPVRATVPRLTCPHIYQIPVTTTTTTTSSLHPPRISHPTFWSKLRETSRATDQLRLASSAVAVQMASRRGSFLSLPRQLLLMAAVLGTVVLLGEGATARPLLGIAEPPASPGAAAAAPGPGVAAQAAEAGGGRAPDRSEAGVEVILAGFAAAVAVVIVCYIRVTRESKNGSGSVGEKRGSLGGF

SEQ ID NO: 59785 - protein, 231 aa, Zea mays
  Coding DNA Sequence Number=SeqID_18006
  Gene Ontology: Mol. function=hydrolase activity, acting on ester bonds; Biological process=lipid metabolic process
  Homolog annotation: Hit_ID=Q6K449; Match level="QueryCoverage=84%, HitCoverage=75%, E-value=1e-55, Identity=49%"; Hit description=GDSL -motif lipase/hydrolase-like
  Pfam annotation: Domain name=Lipase_GDSL; Domain location=30-209; Score=28.1; E_value=8.9e-06; Accession=PF00657.12; Description=GDSL -like LipaseAcylhydrolase
MSSCKRYLPCLILLLLHGGRGAVAGKVSAIVVFGDSSVDTGNNNFIPTIARSNFWPYGRDYDDGLPTGRFSNGRLATDFISEAFGLPPSIPAYLDNNCTIDQLATGVSFASAATGLDNATAGVLYTVGEYEAYLLGLAEAAIRRVHTLGGRKMDFTGLTPMGCLPAERIGNRDNPGGVQRAELVLKLNKELLGLQLVFADTYQLLANVVNRPADYGLCTAPRDRAAAPVPS

SEQ ID NO: 59786 - protein, 151 aa, Zea mays
  Coding DNA Sequence Number=SeqID_18007
MQAACDRTKGAHPFDFDASSMEAQAHTSCNQFAGCYVQETAPPLAPLPCLLDCGTSTATRGNPAHDPTVPTKHIGHGDRERGYPERDPSPRRKRAPSPPTDQRFEGWPLGGVQQPPQSARAPRPLLVRGSKAGPSEGFNGHLRPLGLHAHY

SEQ ID NO: 59787 - protein, 220 aa, Zea mays
  Coding DNA Sequence Number=SeqID_18008
  Gene Ontology: Mol. function=nucleoside-triphosphatase activity; Cellular component=integral to membrane; Biological process=transport
  Homolog annotation: Hit_ID=Q9SIT6; Match level="QueryCoverage=73%, HitCoverage=25%, E-value=5e-41, Identity=54%"; Hit description=White- brown complex homolog protein 5
  Pfam annotation: Domain name=ABC2_membrane; Domain location=11-215; Score=91.0; E_value=3.7e-24; Accession=PF01061.14; Description=ABC-2 type transporter
MASRYANSRAREVAVLSQRFFKNVARTRQLFACRTVCMLVAGLALGSIFYDLGQDKVVERVGLFAFLLTFLLSSTTEALPIFLQERDILARETASGAYHVSSYAVANAVVFLPFQLALAVMFAAPVYWLAGLRRTATAFGYFLLVIWLILYTAYSVVVCFAAATPDFVVGGDVGGNNFRGRNVGGNNFRGEKANPLVYASKTSKPHVRISHNSKFSRERE

SEQ ID NO: 59788 - protein, 137 aa, Zea mays
  Coding DNA Sequence Number=SeqID_18009
  Homolog annotation: Hit_ID=Q656J6; Match level="QueryCoverage=31%, HitCoverage=9%, E-value=4e-07, Identity=63%"; Hit description =Putative ABCG4
MVTATGASRHLLAVQLEQTLQRAPTLSVSGGRRLQAATGVAAERVHGDVRGQVEARVPEQGAELVDARCVRAPRAMARSAPTMWSAEALSRPEVGSSRMSTGGSRTAAMPMESKWPIPCFSISANPSPTPSKRRSRT

SEQ ID NO: 59789 - protein, 42 aa, Zea mays
  Coding DNA Sequence Number=SeqID_18010
MKGAQVVNAGGGGGAAGGRRGDMQMRLWVRMKTVRKSVVNIM

SEQ ID NO: 59790 - protein, 33 aa, Zea mays
  Coding DNA Sequence Number=SeqID_18011
MAAAGGVSTDDVPILQAENLTSNVKSVYYRPRD

SEQ ID NO: 59791 - protein, 159 aa, Zea mays
  Coding DNA Sequence Number=SeqID_18012
  Gene Ontology: Mol. function=hydrolase activity; Cellular component =membrane; Biological process=proton transport
  Homolog annotation: Hit_ID=Q8RWZ7; Match level="QueryCoverage=76%, HitCoverage=14%, E-value=9e-48, Identity=71%"; Hit description =Putative vacuolar proton-ATPase subunit
MKMSILMGVAQMNLGIVLSYFDARYHGNALDIRYQFIPQMIFLNSLFGYLALLILIKWCTGSQADLYHVMIYMFLDPAGDLGENQLFWGQKELQILLLLLALIAVPWMLFPKPFILKKLHKEVMIWKMFLKNISGSGMTEESYKQRKVQEVFEKYIPGS

SEQ ID NO: 59792 - protein, 390 aa, Zea mays
  Coding DNA Sequence Number=SeqID_18013
  Homolog annotation: Hit_ID=O22672; Match level="QueryCoverage=77%, HitCoverage=86%, E-value=2e-07, Identity=27%"; Hit description =Histone H1
  Pfam annotation: Domain name=Linker_histone; Domain location=33-103; Score=8.6; E_value=0.00095; Accession=PF00538.9; Description=linker histone H1 and H5 family
MVDAGQAAKRGKATDEKGQPSAAARTPRQHTPDHPPYCWMIGEAIDELAEDGGSEEDSISAFIRARHPGVPPAHDRFLRHYLGKHVAEGFFLRNAAGRFERNPEENAAEELPVEQTEAGSCNPASVGSLVVDAKHGRGRPPKDGYPSTPPEGRKDGGAGAQWMTPHAGSSSTLAAAAKGSVLMSPVAAADKDESRAPSLKPKRRRRLRRQGMATTADSSGEALVAGKKDSREEHEPPRELALVILDDSSNTPTMDKACTKVPPTTRPVDGGQPLDLSATPKGRRRQRKSVAVATGGRSALTPGKKLGCKVSSASPKFAPVVAAGCRTPASVADQGGRKASATLKRHGRPRKLYPVSADEISDDPEIALLALPSPDTSGVIPVAPKLGYLT

SEQ ID NO: 59793 - protein, 425 aa, Zea mays
  Coding DNA Sequence Number=SeqID_18014
  Gene Ontology: Mol. function=translation initiation factor activity
  Homolog annotation: Hit_ID=Q9AUJ7; Match level="QueryCoverage=99%, HitCoverage=72%, E-value=1e-113, Identity=52%"; Hit description =Eukaryotic translation initiation factor 4B
  Pfam annotation: Domain name=eIF-4B; Domain location=1-425; Score =369.7; E_value=4.5e-108; Accession=PF06273.2; Description=Plant specific eukaryotic initiation
MPSRADEADDWGATKKFTPAPTDSGRRDRFGGPSPLGRADDIDDWSRGKKPLPARYPSLGSGGGFRDSPAFRDSPAASDSDRWVRGATPLPHNGEGAGERPRIVLNPPKRDPLVASTPPAEVARNRPSPFGAARPREDVLAEKGVDWRKFENEIEHKTSRPTSSHSSRPNSAHSSRPGSPGSQVSAVGSEGAPRARPKVNPFGEAKPREVVLQEKGKDWRKIDIELEHRAINRYDVRGITIEFLLLVVESYKLIQNLDFVMEALANGTPFICCVIQVLFAKTDLYPWPESDEERNLKEEINLLKVDLKEIERNMSNGSDQTSVDAKGLSEKISQLESQLEQLSRELDDKIRFGQRPRSGAGRVTALAPTSLGEEPHATVVDRPRSRGGMEPPPRQEERWGFQGSRERGSFGASRNSDRPMARQRW

SEQ ID NO: 59794 - protein, 155 aa, Zea mays
  Coding DNA Sequence Number=SeqID_18015
  Homolog annotation: Hit_ID=Q84PD5; Match level="QueryCoverage=31%, HitCoverage=7%, E-value=3e-09, Identity=63%"; Hit description =Scarecrow transcriptional regulator-like protein
  Subcellular localization annotation: CTP_CleavageSite=64; ConfidenceScore=5.19e-01
MAGSPTPAPWPGPRTLRQPRAVAPVLSQGLAGETLSSGTWESAKARLTVTGSPGSQHSLDACTRGARARRFRIGNGGGDHDGACTSGARARRFQIRNGGGDHGGACNSLGMGWRGPAASLEPEKKANSCWCLTEGRGRWSRDGGTGVGAGWVGAS

SEQ ID NO: 59795 - protein, 402 aa, Zea mays
  Coding DNA Sequence Number=SeqID_18016
  Gene Ontology: Mol. function=hydrolase activity, hydrolyzing O -glycosyl compounds; Biological process=carbohydrate metabolic process
  Homolog annotation: Hit_ID=Q9LTN0; Match level="QueryCoverage=93%, HitCoverage=67%, E-value=1e-103, Identity=49%"; Hit description =Arabidopsis thaliana genomic DNA, chromosome 3, P1 clone: MTC11
  Pfam annotation: Domain name=Ricin_B_lectin; Domain location=248-355; Score=-2.3; E_value=0.042; Accession=PF00652.12; Description=QXW lectin repeat
MTTPGWCCSRTDGNGFFGDVYFDPNEWLKGLSAMATMFNNTKYVVGMSLRNELRGPKQNVSLWYRYMQLGAEAVHAANPNVLVILSGLDFDNTLSFLFKEKVRLSFSGKLVYEQHWYGFSDGGNWETQNQNDVCGMVVDFIWAKGLFLLQHGWPLFFSEFGFDMSGTHIGDNRYLTCFLSVAAEMDLDWAIWALQGSYYIREGILAYDESYGLLTWDWCTARNPSFIKRINSLQSAFQGPGLPNTQQPYYIIFHPQSGLCVLARSSKLLELGPCDESNAWNYTSAYELVVKSTGQCLQAQSVGKNAKLGTDCSKPSSKWHLISDSKMHVSAELAKNGTRVCLEASPDGAIRTNQCKCLSVDPTCDPESQWFKVILSSRDIPGGDSILQLPSLGPWPPTSLSS

SEQ ID NO: 59796 - protein, 694 aa, Zea mays
  Coding DNA Sequence Number=SeqID_18017
  Gene Ontology: Mol. function=binding; Cellular component =intracellular; Biological process=metabolic process
  Homolog annotation: Hit_ID=Q1RWK6; Match level="QueryCoverage=95%, HitCoverage=96%, E-value=1e-153, Identity=37%"; Hit description =Pancreatic ribonuclease; Tetratricopeptide-like helical
  Pfam annotation: Domain name=PPR; Domain location=187-221; Score =37.4; E_value=4.8e-08; Accession=PF01535.11; Description=PPR repeat
  Pfam annotation: Domain name=PPR; Domain location=222-256; Score=1.1; E_value=5.6; Accession=PF01535.11; Description=PPR repeat
  Pfam annotation: Domain name=PPR; Domain location=288-322; Score =42.7; E_value=1.2e-09; Accession=PF01535.11; Description=PPR repeat
  Pfam annotation: Domain name=PPR; Domain location=323-357; Score=4.0; E_value=2.5; Accession=PF01535.11; Description=PPR repeat
  Pfam annotation: Domain name=PPR; Domain location=389-423; Score =44.3; E_value=4.1e-10; Accession=PF01535.11; Description=PPR repeat
  Pfam annotation: Domain name=PPR; Domain location=424-458; Score=0.5; E_value=6.5; Accession=PF01535.11; Description=PPR repeat
  Pfam annotation: Domain name=PPR; Domain location=460-494; Score =10.9; E_value=0.38; Accession=PF01535.11; Description=PPR repeat
  Pfam annotation: Domain name=PPR; Domain location=526-560; Score =14.0; E_value=0.16; Accession=PF01535.11; Description=PPR repeat
  Pfam annotation: Domain name=PPR; Domain location=84-118; Score=17.1; E_value=0.064; Accession=PF01535.11; Description=PPR repeat
  Pfam module annotation: Pfam domain module=PPR::PPR::PPR::PPR::PPR::PP R::PPR::PPR::PPR; Domain location=187-221::222-256::288-322::323 -357::389-423::424-458::460-494::526-560::84-118
  Subcellular localization annotation: CTP_CleavageSite=22; ConfidenceScore=5.04e-01
MATAVPTAALPTPGRAGPAPPRAPLRADPSYLPQLHAALIKSGELTGSAKSFHSLLEAAAASPTLLPYAVSLFRLGPRPPLSTPCYNVLMRAFLHAGHPEDALHLFIEMLHAASACPADQHTAACALKSCSRMCALDVGRGVQAYAVKRGLVADRFVLSSLIHMYASCGDVAAARLVFDAAEESGVVMWNAIVAAYLKNGDWMEVVEMFKGMLEVGVAFDEVTLVSVVTACGRIGDAKLGKWVAGHVDEEGLARNPKLVTALMDMYAKCGEIGKARRLFDGMQSRDVVAWSAMISGYTQADQCREALGLFSEMQLARVEPNDVTMVSVLSACAVLGALETGKWVHSYVRRKRLSLTTILGTALVDFYAKCGCIDDAVEAFESMPVKNSWTWTALIKGMATNGRGREALELFSSMREAGIEPTDVTFIGVLMACSHSCLVEEGRRHFDSMARDYGIKPRVEHYGCMVDLLGRAGLVDEAYQFIRTMPIEPNAVIWRALLSSCAVHRNVGIGEEALKQIISLNPSHSGDYVLLSNIYASAGQWKDAAMVRKEMKDRGIEKTPGCSLIELDGVVFEFFAEDSDHPELREIYQKVEEMIGRIKVAGYVPNTADVRLEVEEREKEVSVSHHSEKLAIAFGLMKLDPGATIRLSKNLRVCADCHSATKLISKVYDREIVVRDRNIFHHFKDGTCSCNDYW

SEQ ID NO: 59797 - protein, 148 aa, Zea mays
  Coding DNA Sequence Number=SeqID_18018
  Homolog annotation: Hit_ID=Q6QP51; Match level="QueryCoverage=40%, HitCoverage=31%, E-value=5e-13, Identity=60%"; Hit description =Putative growth-regulating factor 1
  Subcellular localization annotation: CTP_CleavageSite=45; ConfidenceScore=5.47e-01
MQAACNCAKWAHFSDFQHAQHGGPGPRVMQPARRMLRASDCTATRATATPPRLRNQYRDLRQPYARPSSASLARRGSERRFAFAIMTASKKAPSLPTDQRFEGWPLGGVQQPPQSAWAPHPLLVRGSKAGPSEGFNDRLRPLGLRAHY

SEQ ID NO: 59798 - protein, 49 aa, Zea mays
  Coding DNA Sequence Number=SeqID_18019
MEKGHMMDKVRITIKTKTLLKSGCTGQCPVRQAGSGGKTALGNSSAVYG

SEQ ID NO: 59799 - protein, 68 aa, Zea mays
  Coding DNA Sequence Number=SeqID_18020
MGVLLLLVLLLDAGVVLPAVLLAAEAPAAEEKRQDAGVVLLVMLLLGGALCSYWCSTAGACCLVVLGG

SEQ ID NO: 59800 - protein, 364 aa, Zea mays
  Coding DNA Sequence Number=SeqID_18021
  Gene Ontology: Mol. function=1,3-beta-glucan synthase activity; Cellular component=1,3-beta-glucan synthase complex; Biological process=1,3-beta-glucan biosynthetic process
  Homolog annotation: Hit_ID=Q6WGM8; Match level="QueryCoverage=65%, HitCoverage=12%, E-value=1e-102, Identity=75%"; Hit description=Beta 1,3 glucan synthase
MTGHGNGVTRLASGHGRRVAWLWWCHWWETQLEGDICSEKINSTHRHCGYNIQWLGLEFDTRFHPKVFISVLLEVVHTSIFTSFIVSIQKIDEGAVHAVFSKALDNYIKWCNYLPLRPVWDNNDSLTKEKKLLYVCLYYLMWGEAANVRFIPEGLCYIFHHLARELGVILQKQTAEPAESCNSGGGVSFLDNVIYPFYEIIAAEAANNKNGRAPHSEWRNYDDFNEFFWSHKCFHLRWPWNLSDPFFSKPSRKYKGLLSRNHHYGKTSFVEHRTFLHLYHSFHRLWMFLIMMFQGLTIIAFNDGSFDRKTILQLLSLGPTYVVMKFIESEHISFSYCNMIIRVNYPDGYFLCYLIVTVKVYWIF

SEQ ID NO: 59801 - protein, 128 aa, Zea mays
  Coding DNA Sequence Number=SeqID_18022
  Gene Ontology: Mol. function=protein serine/threonine kinase activity; Biological process=protein amino acid phosphorylation
  Homolog annotation: Hit_ID=Q9LSE1; Match level="QueryCoverage=50%, HitCoverage=15%, E-value=4e-07, Identity=44%"; Hit description =Similarity to receptor kinase
MPCQVHTRVECTQDRHDQESSSCMQPLVSFLVIAVFLFINTQLYLLVFNGPLTVDYPKSSESSPLKAERVVHMDGAQLIGRHDEATIFTLRQLAEATNNFRQDSLLGRGGFGCVYKATLSNGQPERKA

SEQ ID NO: 59802 - protein, 132 aa, Zea mays
  Coding DNA Sequence Number=SeqID_18023
MSKNKKGGSSLHHSGDKHKREPTPPSEDFGDSEYSEEEFSSESEEVWTYIRAVERAGLESSDESEYSSDEENSSDSSEEGNSGDGGDGDIDGGDGDGGGGDGKSGDGGGKGGSGDGGGGSKGNSRGSNKASG

SEQ ID NO: 59803 - protein, 66 aa, Zea mays
  Coding DNA Sequence Number=SeqID_18024
MAKSRLDTGLAVSVAILSPARSGSSETEISPEAEARLAHEYDVMPRVVGIAVRVVSCGIHGRVGGI

SEQ ID NO: 59804 - protein, 150 aa, Zea mays
  Coding DNA Sequence Number=SeqID_18025
MTAVLKPPTEARRRQQGPGSPDSCASTGLKRSSNGHDTAPIHRVRVAFVGPNGDRCYRDGGHRRLGTGHTEGIGAVFVTTWICGTASTVVTLGMASISGRVATGTIDGFDTIGMPGMATRAMGGRSVSKMSHGVARSAVVADEHDERHRH

SEQ ID NO: 59805 - protein, 52 aa, Zea mays
  Coding DNA Sequence Number=SeqID_18026
MAPVEDLVLVPPINEVVSPPPKTEATDTPPHAQRFLWKPLYAGEGNRSMLQI

SEQ ID NO: 59806 - protein, 33 aa, Zea mays
  Coding DNA Sequence Number=SeqID_18027
MGRCSFPGRGRRRVVGFLSPQIPHREKAQLPQR

SEQ ID NO: 59807 - protein, 368 aa, Zea mays
  Coding DNA Sequence Number=SeqID_18028
  Gene Ontology: Mol. function=sugar porter activity; Cellular component=integral to membrane; Biological process=carbohydrate transport
  Homolog annotation: Hit_ID=Q6ZFM6; Match level="QueryCoverage=94%, HitCoverage=87%, E-value=1e-107, Identity=53%"; Hit description =Putative sorbitol transporter
  Pfam annotation: Domain name=MFS_1; Domain location=2-328; Score=7.7; E_value=0.00014; Accession=PF07690.6; Description=Major Facilitator Superfamily
  Pfam annotation: Domain name=Sugar_tr; Domain location=1-341; Score =84.4; E_value=3.6e-22; Accession=PF00083.14; Description=Sugar (and other) transporter
  Pfam module annotation: Pfam domain module=MFS_1::Sugar_tr; Domain location=2-328::1-341
MYIKKDLNITDVQLEILIGILSLYSLFGSFAGARTSDRIGRRLTVVFAAVIFFVGSLLMGFAVNYGMLMAGRFVAGVGVGYGGMIAPVYTAEISPAASRGFLTTFPEVFINIGILLGYLSNFAFARLPLHLGWRVMLAIGAVPSGLLALLVVEAAHPVPDPGGPTHPCSRAVGLHFFQQGSGSDSVVQYSARLFKSAGITDDNKLLGVTCAVGVTKTFFILVATFLLDRAGRRASAADQHGRDDRLAHLPRVGAHRRGASPGHQGRVGRRPVRALGFAVGVASNRVTSAVISMTFLSLSKAITIGGSFFLYSGIAAVAWVFFFTCLPETRGRTLEEMGKLFGMPDTGMAEEAEDAAAKEKVVELPSSK

SEQ ID NO: 59808 - protein, 503 aa, Zea mays
  Coding DNA Sequence Number=SeqID_18029
  Gene Ontology: Mol. function=sugar porter activity; Cellular component=integral to membrane; Biological process=transport
  Homolog annotation: Hit_ID=Q6ZFM2; Match level="QueryCoverage=75%, HitCoverage=86%, E-value=8e-78, Identity=46%"; Hit description =Putative sugar transport protein
  Pfam annotation: Domain name=MFS_1; Domain location=116-501; Score= -50.0; E_value=0.061; Accession=PF07690.6; Description=Major Facilitator Superfamily
  Pfam annotation: Domain name=Sugar_tr; Domain location=99-503; Score=- 135.4; E_value=0.012; Accession=PF00083.14; Description=Sugar (and other) transporter
  Pfam module annotation: Pfam domain module=MFS_1::Sugar_tr; Domain location=116-501::99-503
  Subcellular localization annotation: CTP_CleavageSite=34; ConfidenceScore=5.19e-01
MTSVVLNSLRNQRNVSRTPGRTVSYASIGLKNFSDGHVSTYTGLRHFSVGHQPRTQRVTLIPTPFRKWRADRCGDCRDRFTAKSQNARQKELQRQAFSRCGEAHEASSQQGYNEVGWKLRKFRYDDLAVVYNTVVRAQADLKLLACTVALSSSLGAVAAVGAQRLIGGRQAALLSGAVLCAGAIARGLATGSAAAFTAGVFVNGVGMGLALVAVPAYAAELGPSSARRALAAHPDGLVYLGCILGSVVYSMRLVRVPAHHACWLTVATGIAVPALLSAVVLFMPDAPRWRVSRDRESKARRMLSRTSATLEEAELRLVEIKVECGGLLQDGSDEPLAVSKRALWWREEIETLRELLVCPTEPLRRAVLTALVAKVFQQVSSIGSILQYVQRAFRDSSRGALVVFVFVMSYPMSLVLVELGWLLVTALARSCRLGRRVPTGGVTRRQEQLKWVRGLSATMLLSLMALVWIALGPAPWAGASSRGCLRWLRATVAVVKKSVISAI

SEQ ID NO: 59809 - protein, 126 aa, Zea mays
  Coding DNA Sequence Number=SeqID_18030
  Gene Ontology: Cellular component=mitochondrion
MVRIAQLVEQRTENPRVTSSNLVPGTEKRIYRIGVVVWYRYVQCDNPFIIPQEIAHPLANLNAFKNPEAVINGYKRVTFLINKDIVNTVLSTFMNDPTFTEVFNVNQAENMDNNVAMKRVSALPSW

SEQ ID NO: 59810 - protein, 210 aa, Zea mays
  Coding DNA Sequence Number=SeqID_18031
MKLHPEKRGLDSESVTRWKVAARVPPAVENVADGRAERMEKPSDPPIAPPVDDGKSVVPDENLKKRKNTETNGYLQNNLDMRPTKLPRPALPSNCVENAYDEALEVRRLQDKAADFSGGSVALFMGQGKLESICTRKPPHPDCKYLSQIYNIPEAPQMMELPGQEGEDCLFDKGGTQPRKPASSAPESDGVSQVWAQALKIDHADGGGGG

SEQ ID NO: 59811 - protein, 133 aa, Zea mays
  Coding DNA Sequence Number=SeqID_18032
MKAKASGILLPGTPSGRIADGVADEGLQDTVYRHLPLRPRGESQTNIVPGGVGEDRLNTLVGVMAGLNSDLDSATLDLSKIHEELEDAHARIAALEAQLEGRDPPEAKVPITAVSPPRKRIRYGAPGSITRLL

SEQ ID NO: 59812 - protein, 107 aa, Zea mays
  Coding DNA Sequence Number=SeqID_18033
MGRTGTPIYTVQASKDPSNGIRTPLYKVRVDYSGVLEFQGRIYSSPSQGPDRGPEPTRVQTQSGRIQTLSLLFPTQVGIRCCHVAYCAWRCVPNTRYLGCAVTHTLP

SEQ ID NO: 59813 - protein, 338 aa, Zea mays
  Coding DNA Sequence Number=SeqID_18034
MEDMTSTASRGMEALALTGGPSHYGDAEASSNVLAQRDEPTLDPTALAASSGHCVEVTPQPPAPLAPLGHLEGREPRTIPLCAFGGCSEEGDHLSALLTRLFTRSAARAEALLVAQLEAERLHAEATRGEEEECKLAELRSEIDWLQGEATHLRSECDDAQRDADRLWEEGSRLQGALHETSLRAEEAELSLKEANVRLGKADLELSKERNAAGVCAHLSPLASIEVPLIDRLRALPGYVERVVVECVYHGSNMALGQMVYHFDEIDDAVIIEGFAAGRSDKELDNIGEQVRPHARSIASWVDVKFLLIGPWSLEPSAGSNPCYRSSRSTRVMAIEAF

SEQ ID NO: 59814 - protein, 80 aa, Zea mays
  Coding DNA Sequence Number=SeqID_18035
MSASQSSACAEDGRNRWTIRFMFGGYASANSLRMVNRWDSRAYTRYGVPSRPFLYTGNCRDSGAEVPTIGVDWPRKSVGT

SEQ ID NO: 59815 - protein, 232 aa, Zea mays
  Coding DNA Sequence Number=SeqID_18036
MMATTKEAKLMSGLLRNRCRENNGPFSRSVFIRKWTFAAMFRICEECSPVEESTGGYTATKLILDGSDDKNPCDKELVNKDNLLQRNKINQKYQGLFKGKTTKCRHPVQKQEPGDGGFDETTLLLNKEKEQGKTHTRVSGKADGNEAKSAELVSLGNEKEQRRNHTKVSGKLDNTAKSARVSATCVAYFVSYDGFAWLNFYEMLVLMIVVRQQTCQPFARHGIECKMKWLSG

SEQ ID NO: 59816 - protein, 117 aa, Zea mays
  Coding DNA Sequence Number=SeqID_18037
MAAGRAGAPCCCAKKKTGGRPWRSQGARPWEGGQRHGRSTCWQPWEPGRRKRWHWLLMAGEKEEDDRAREEGADARQEEEQRSGRGERAKLHACCREAGRKKRTERFRASANGRLSD

SEQ ID NO: 59817 - protein, 119 aa, Zea mays
  Coding DNA Sequence Number=SeqID_18038
MEVAGARTWEGGQRHGRSTCWQPWKRGRRKRWRWLLMAGEKEEDGRAREEGAAARQEEEQRSGHGERAKLHGCCREAGRKKRYFGTGDNEIDGFGYDYGIGEDEAVEGDFQEFQDYDEF

SEQ ID NO: 59818 - protein, 56 aa, Zea mays
  Coding DNA Sequence Number=SeqID_18039
MSRPEHTPPTSPTAYTRGQPYSDHHRRRSTPRRDRQDLLDLTRPFTGPPSPSVYLN

SEQ ID NO: 59819 - protein, 69 aa, Zea mays
  Coding DNA Sequence Number=SeqID_18040
MASVYGTLQRLTSFESNVSGTCDYFIWKIGGRSRCLLVLWWCVGLTCGLRIEGLRVIAPIGHDWLERIL

SEQ ID NO: 59820 - protein, 48 aa, Zea mays
  Coding DNA Sequence Number=SeqID_18041
MGRSKLRSPLTAEGHIDVTTRSLPNLASNSSELYVAETHRNSALGASW

SEQ ID NO: 59821 - protein, 134 aa, Zea mays
  Coding DNA Sequence Number=SeqID_18042
MGVCTEKKLCDGAQPHEREPRREQGLYTLPGPAELPPKHANSRFFYKTVIRRGIGLPRLLDLGSTVEIRNGGQTRGHAGRWWLTRRAHRPAAWAGQGTSDGTPRRGTTDRWGHDRVGPTSQRLGASVGAGASAR

SEQ ID NO: 59822 - protein, 124 aa, Zea mays
  Coding DNA Sequence Number=SeqID_18043
MAYWIAWSTCGGGRPKSGEYDLGPPVKFCRVRGLGKLHRLMVKLTEWLAWPRSDQGRLATVAEARKAWRAVVRHARGEFRAVHGRSWTGERSWACTGERGSANGREPGVSAMVEHVEPLLLPKF

SEQ ID NO: 59823 - protein, 121 aa, Zea mays
  Coding DNA Sequence Number=SeqID_18044
MAAPVPAAGKLARDKGRGGSAGLRATGMGWEIGEGTGNLLAGLNRNRGTGGWRPTARWLDGSANRLRQEIKRSREQGREKERAGEVPYLKAHPRDLSVVVKARRRLGSTVADNGGCVEDDG

SEQ ID NO: 59824 - protein, 52 aa, Zea mays
  Coding DNA Sequence Number=SeqID_18045
MERPGAIRITAATNPLGKHTMAAPRVLIPRMGGVRGGVTDHERESRTYSVLP

SEQ ID NO: 59825 - protein, 336 aa, Zea mays
  Coding DNA Sequence Number=SeqID_18046
  Gene Ontology: Mol. function=protein serine/threonine kinase activity; Biological process=protein amino acid phosphorylation
  Homolog annotation: Hit_ID=Q1RY80; Match level="QueryCoverage=51%, HitCoverage=35%, E-value=4e-51, Identity=61%"; Hit description =Protein kinase
  Subcellular localization annotation: CTP_CleavageSite=15; ConfidenceScore=5.13e-01
MRAPSSPWPPPTCPPAATLVKKYPTLLHPFGAKPHAQRLIFRCRATSSEGADDGWASFVDELKRSLQVDPSDAVISNAGAGLTSNNDLVTALPLEPSAGPAAGDATTAAAGAVSELLGVDASGAVATPDRLLSSLLHLDASNPVASVAGGALSRLDALTSGTVGRAAVGAVRVPGRDVAVPDRAARGAERRRGHMSDFVVGERIGEGSFGVVYAGAVVPKNGAVVEERSGKAKTSLQNDDRYKEKVILKKIKVMTVGAKECGDYEEWFNYRVSRAAPESCADFLGSFVADKNKAEFVKGGKWLVWKFEGDRTLAKLPERARFPSNLERLMFRRRAA

SEQ ID NO: 59826 - protein, 175 aa, Zea mays
  Coding DNA Sequence Number=SeqID_18047
  Gene Ontology: Mol. function=N-acetyltransferase activity; Cellular component=chloroplast; Biological process=metabolic process
  Homolog annotation: Hit_ID=Q7X9V3; Match level="QueryCoverage=51%, HitCoverage=34%, E-value=5e-38, Identity=78%"; Hit description =Nuclear shuttle interacting protein
  Pfam annotation: Domain name=Acetyltransf_1; Domain location=84-160; Score=66.7; E_value=7.3e-17; Accession=PF00583.14; Description =Acetyltransferase (GNAT) family
MAEVESVSRIKQEGAPGLQQGAKLLVECSLSCNLCSDVAFASQLCAVSKRKARFPRPDLCVIGWQPEMLMYMISKPYAIRSYLTEGEEKKQLIGMARATSDHAFNATIWDVLVDPSYQGQGLGKALMEKVIRTLLQRDINNITLFADNKVIDFYKNLGFEVDPQGIKGMFWYPRF

SEQ ID NO: 59827 - protein, 130 aa, Zea mays
  Coding DNA Sequence Number=SeqID_18048
  Gene Ontology: Mol. function=protein binding; Cellular component =anchored to membrane
MADLLGDPAWPQLHPRPCTDTPWPGLQCELAPDDTCVLRATRLHLGPDVATPPCRPGARLNPASLRGLPHLRTLSIFVCFGAAQAPVELSPALFTLSSSLEQIVLKSNPSLTSPIPATLVIIVFEEKMAY

SEQ ID NO: 59828 - protein, 446 aa, Zea mays
  Coding DNA Sequence Number=SeqID_18049
  Gene Ontology: Mol. function=protein serine/threonine kinase activity; Cellular component=integral to membrane; Biological process=protein amino acid phosphorylation
  Homolog annotation: Hit_ID=Q5KQI5; Match level="QueryCoverage=81%, HitCoverage=38%, E-value=1e-153, Identity=76%"; Hit description =Unkown protein
  Pfam annotation: Domain name=Pkinase; Domain location=116-385; Score =150.9; E_value=3.3e-42; Accession=PF00069.15; Description=Protein kinase domain
  Pfam annotation: Domain name=Pkinase_Tyr; Domain location=116-385; Score=139.1; E_value=1.2e-38; Accession=PF07714.7; Description =Protein tyrosine kinase
  Pfam module annotation: Pfam domain module=Pkinase::Pkinase_Tyr; Domain location=116-385::116-385
MAASSGAGASPPGIAGDGDRSWEGEEGAMGSGAEGEDVGEFPNAVSTGLSKAALGSIFASTIAGAILLSVVATTLIVRRRSRHRTVSKRSLSRFSVKVDGVRCFTFEEMAIATNNFDLSAQVGQGGYGKVYKGILGDGALVAIKRAHEDSLQGSREFCTEIELLSRLHHRNLVSLVGYCDEEDEQMLVYEFMSNGTLRDHLSAKSKRPLSFGLRLKIALGAAKGILYLHTEADPPIFHRDVKASNILLDSKFVAKVADFGLSRLAPVPDVEGTLPAHVSTVVKGTPGYLDPEYFLTHKLTDKSDVYSLGVVFLEMLTGMKPIEHGKNIVREVNSACQSGAVSGIIDGRMGLYPPECIKRFLSLATKCCQDETDDRPSMWEIVRELELILRMMPEEDLILLETSETDSTDVSKSLSSSATRTLFVSSQASGSLDASSGMISGRVTPR

SEQ ID NO: 59829 - protein, 487 aa, Zea mays
  Coding DNA Sequence Number=SeqID_18050
  Gene Ontology: Mol. function=protein serine/threonine kinase activity; Cellular component=integral to membrane; Biological process=protein amino acid phosphorylation
  Homolog annotation: Hit_ID=Q65X96; Match level="QueryCoverage=91%, HitCoverage=53%, E-value=1e-160, Identity=60%"; Hit description =Putative receptor like protein kinase
  Pfam annotation: Domain name=Pkinase; Domain location=170-434; Score =151.5; E_value=2.3e-42; Accession=PF00069.15; Description=Protein kinase domain
  Pfam annotation: Domain name=Pkinase_Tyr; Domain location=171-434; Score=139.7; E_value=8e-39; Accession=PF07714.7; Description=Protein tyrosine kinase
  Pfam module annotation: Pfam domain module=Pkinase::Pkinase_Tyr; Domain location=170-434::171-434
MKAIKAKYQVKKNWMGDPCVAGTFRWDGLTCSYAISDPPKITALNMSFSGLTGDISSAFANLKAVQSFYADNPDLCTNAGDSCQTAPQGKSKLVIYYVAVPMALIVVALAVLLCCLLRRRKTRGLADVSVKPRDKTPTSLASMAADEHRLSSLRLENRRFTYEDLEMITDSFKRVIGRGGFGYVYEGFLEDGTQVAVKMRSQSSNQGAKEFLTEAQILTRIHHKNLVSMVGYCKDGVYMALVYEYMSEGSLQEHIAGKRLTWGQRLRIALESAQGLEYLHRGCNPPLIHRDVKTSNILLNAKLEAKVADFGMSKALDRDTYASTNTLVGTPGYVDPEYLETMQPSTKSDVYSFGVVLLELVTGRPPILHSPQPTSVIQWARQHLARGDIEVVVDASMGGNHDVNSVWKAAEVALQCTEQASAQRPTMGDVVAQLLECLDLEKGRSANESFCDGDDSGSATASLSHSSAFVTGRIFGTVPMVETGPAT

SEQ ID NO: 59830 - protein, 254 aa, Zea mays
  Coding DNA Sequence Number=SeqID_18051
  Homolog annotation: Hit_ID=Q6QP51; Match level="QueryCoverage=27%, HitCoverage=37%, E-value=3e-09, Identity=63%"; Hit description =Putative growth-regulating factor 1
MARSVRAQGRARRRLLPRPRLRSGEVVTIPEAEAEAEARGRARRRPSSEAEAEAWGRARRSSLLRPRLNSGGAVTYCSHRPSVQPTVRPNHRGRLQPRARAASSTALNSGGLPSLSSTPPSDSTSSPTAPSDSTSPMAASSPLPSSNSSPIGCLHPTLIFMHGTTVPNPTTPRSADSPSTHDLHTRMLPLHDLYFACVMRGCQMNINLEHARTLESEEFPGERGQSTQFPSRSVLYVRARARVDAIAGRVPLKP

SEQ ID NO: 59831 - protein, 245 aa, Zea mays
  Coding DNA Sequence Number=SeqID_18052
  Gene Ontology: Mol. function=hydrogen ion transporting ATP synthase activity, rotational mechanism; Cellular component=proton -transporting two-sector ATPase complex; Biological process=ATP synthesis coupled proton transport
  Homolog annotation: Hit_ID=Q5KQI7; Match level="QueryCoverage=84%, HitCoverage=94%, E-value=2e-75, Identity=72%"; Hit description =Putative YLP
  Pfam annotation: Domain name=vATP-synt_E; Domain location=52-245; Score=196.0; E_value=8.7e-56; Accession=PF01991.8; Description=ATP synthase (E31 kDa) subunit
SLPHPSVPRVALAQTRTPRIIIGPSRRIGGTHGTAKMNDADVGKQVQQMVRFILQEADEKASEISVAAEEEFSIEKLQLVESEKRRVRQEYERKEKQVDVRRKIEYSTELNAARIKLLRAQDDVVTGMKESAGDALLRVTKDANAYKRVLKGLIVQSLLRLREPALVLRCREADRSLVEAVLEVAKKEYAEKAQGQPPQDHHRRQGLPAAAEDQPRRAWAVLDGKIVCDNTLDARLSVSFRQKLP

SEQ ID NO: 59832 - protein, 603 aa, Zea mays
  Coding DNA Sequence Number=SeqID_18053
  Gene Ontology: Mol. function=monooxygenase activity; Cellular component=membrane; Biological process=electron transport
  Homolog annotation: Hit_ID=Q2MIZ8; Match level="QueryCoverage=98%, HitCoverage=96%, E-value=1e-163, Identity=51%"; Hit description =Cytochrome P450 monooxygenase CYP711A12
  Pfam annotation: Domain name=p450; Domain location=31-595; Score =154.0; E_value=4e-43; Accession=PF00067.12; Description=Cytochrome P450
MEECTFTSAAMAVGFLLVVYLYEPYWKVRHVPGPVPLPFVGHLHLLARHGPDVFLVLAKKYGPIFRLVGDTIRSSCSCFTSTSSSILLQQVVVQLCLHVVFSRVKSNGFDDSICRPARSRFHMGRQPLVIVANAELCKEVGIKKFKSMPNRSLPSAIANSPIHLKGLFSTRDSRWSALRNIIVSIYQPSHLAGLIPSMQSHIERAATNLDDGGEAEVAFSKLALSLATDVIGQAAFGADFGLTTKPAAPPPHHGPPRQHGEEDGDGSHSTRSSEFIKMHIHSTTSLKMDLSGSLSTIVGTLLPVLQWPLRQLLLRVPGAADREIQRVNGALCRMMDGIVADRVAARERAPQAQRQKDFLSVVLAARDSDAAARKLLTPDYLSALTYEHLLAGSATTAFTLSSVLYLVAQHPRVEEKLLREVDAFGPPDRVPTAEDLQSRFPYTDQASTTARMHAIYFFLDVLKESMRFFMVSPLVARETSEQVDIAGYVLPKSTWVWMAPGVLAKDPVNFPEPELFRPERFDPAGDEQKRRHPYAFIPFGIGPRICIGQRFSIQEIKLALIHLYRQYVFRHSPSMESPLEFQFGVVLNFKHGVKLQSIKRHKC

SEQ ID NO: 59833 - protein, 512 aa, Zea mays
  Coding DNA Sequence Number=SeqID_18054
  Gene Ontology: Mol. function=monooxygenase activity; Cellular component=integral to membrane; Biological process=electron transport
  Homolog annotation: Hit_ID=Q6YSZ6; Match level="QueryCoverage=73%, HitCoverage=99%, E-value=1e-139, Identity=64%"; Hit description =Putative P450 monooxygenase
  Pfam annotation: Domain name=p450; Domain location=33-500; Score =388.7; E_value=9e-114; Accession=PF00067.12; Description=Cytochrome P450
  Subcellular localization annotation: CTP_CleavageSite=56; ConfidenceScore=5.29e-01
MEATAPANLFYAAFLFLSVLYLAVTRRRTSRLPPGPTGLPLVGSLPFLDRNLHACFAGLAAKYGPVFAIRLGSKVEIVVTSPELAHEVLRDKDPVFSNRVIPDAGRAVAFDGVENIVGVPVGPKWRLLRRLCAQEMLSPAGLDSLYGLRRREFRSTLRYLYSQSQAGEPVDLGALMFVNMMNVVTSTLWGGTIGSESERAAIGKEFRALVAKLTELLGTPNLSDFFPVLAPFDLQGVRKKMERIRVRFDQIFDKIIQQRVNAQQDGSKMATDFLECMLKMEREGGDGKATFTMTDVKSLLLDMVVAGTETMSNTVEWAIAEMLQKPEVLRKVQEELDKVVSRDAIVEESQLPELRYLRMVIKETLRLHPALPLMVPHSPSEESTIGGFHVPAGCRVFVNVWAIHRNPLVWSEPLEFNPERFSGDDDGRRWDFTGRQFDYLPFGSGRRICAGIAMADKMTTYSLAMLLQAFDWKLPQGTELDLSEKFGVVMKKATPLMVIPKSRFPKPDLYCS

SEQ ID NO: 59834 - protein, 213 aa, Zea mays
  Coding DNA Sequence Number=SeqID_18055
  Gene Ontology: Mol. function=nucleic acid binding; Biological process= regulation of transcription
  Homolog annotation: Hit_ID=Q9FU27; Match level="QueryCoverage=49%, HitCoverage=26%, E-value=2e-46, Identity=83%"; Hit description=CCCH -type zinc finger protein-like
  Pfam annotation: Domain name=DUF679; Domain location=22-144; Score= -100.5; E_value=0.034; Accession=PF05078.3; Description=Protein of unknown function (DUF679)
  Pfam annotation: Domain name=zf-CCCH; Domain location=109-134; Score =20.9; E_value=0.0023; Accession=PF00642.15; Description=Zinc finger C-x8-C-x5-C-x3-H type (and similar)
  Pfam module annotation: Pfam domain module=DUF679::zf-CCCH; Domain location=22-144::109-134
  Subcellular localization annotation: CTP_CleavageSite=14; ConfidenceScore=5.24e-01
MCYHGSSQTKAPSSQTTKAPELALSSTTNLANLLPTGVLLAFNLLALKSPYDGCVYYVVTSCTGLRLLNYLPDASPLPEGVTRRSPPQGTGTRHRIPIVANTVAKRYHYSDTACPDFRKGGCKRGDACELAHEVFECWLHPSRYRTQPCKDGTGCRHRVCFFAHTPDQLRVPQAQQFSPRGASAASPLAEPSYDGSPLHRQAFESYLTKSHKD

SEQ ID NO: 59835 - protein, 244 aa, Zea mays
  Coding DNA Sequence Number=SeqID_18056
  Gene Ontology: Mol. function=nucleic acid binding; Cellular component= intracellular; Biological process=DNA integration
  Homolog annotation: Hit_ID=Q8H6I0; Match level="QueryCoverage=80%, HitCoverage=11%, E-value=2e-77, Identity=73%"; Hit description =Putative gag-pol polyprotein
MRDIGTGDKSASSGRTHSRESAHKHKEESSSSIKSQRKGDKKKKMKKVVYYETDSSSPSTSDSESGSTTSKRHERKKYSKMPLRYPRISKRTPLLPVPLGKPPMFKGEDYSMWSDKMRHHLTSLHKSIWYIVEYGAQVPKKGDKDYDSEEVEQIQHFNSQATTILLASLNREEYNKVQGLKSAKEIWDMLKTVHEGDEVTKITKRETIEGELGRFMLHQGEEPQAMYNRLKTLVNQVRNLESTK

SEQ ID NO: 59836 - protein, 107 aa, Zea mays
  Coding DNA Sequence Number=SeqID_18057
MGYRIPPFSAIITVSGLRIKLVVAANLEGRYRTVGMVDDGGRLMAVCSRDQVVRVDARRMSSLETHVELFHVDLQEETLSRIEDLGERAVFAGLRGAVIEKGYDHNT

SEQ ID NO: 59837 - protein, 239 aa, Zea mays
  Coding DNA Sequence Number=SeqID_18058
  Gene Ontology: Mol. function=transcription factor binding; Cellular component=intracellular; Biological process=regulation of transcription, DNA-dependent
  Homolog annotation: Hit_ID=Q7XDQ3; Match level="QueryCoverage=58%, HitCoverage=63%, E-value=6e-62, Identity=84%"; Hit description=Ras -related protein Rab-18, putative, expressed
  Pfam annotation: Domain name=Ras; Domain location=14-152; Score =102.7; E_value=1.1e-27; Accession=PF00071.12; Description=Ras family
MEIRSDDGILAGGRYGGGRRDLRVASCTSLSLARDPVAAGAAAAGQERFRTITSSYYRGAQGIILVYDVTKRESFSNLADVWTKEIEANSTNKDCIKMLVGNKVDKDDERMVTEEEGLAFAEESGCLFLESSAKTRENVEKCFEELALKILEVPSLLEEGSSSVVKRKHPETEAGKSCKERQWMLSIDVLIHATRSFEAMMKLALSDSFLLNGVFTKAKLGSFGSLIRAYNSNETREKT

SEQ ID NO: 59838 - protein, 290 aa, Zea mays
  Coding DNA Sequence Number=SeqID_18059
  Gene Ontology: Mol. function=metal ion binding; Cellular component =cytoplasm; Biological process=ubiquitin cycle
  Homolog annotation: Hit_ID=Q337P2; Match level="QueryCoverage=97%, HitCoverage=95%, E-value=1e-122, Identity=67%"; Hit description=CHY zinc finger family protein, expressed
  Pfam annotation: Domain name=Prot_inhib_II; Domain location=77-135; Score=6.7; E_value=0.011; Accession=PF02428.6; Description=Potato type II proteinase inhibitor family
  Pfam annotation: Domain name=zf-C3HC4; Domain location=176-218; Score= 25.6; E_value=0.00018; Accession=PF00097.15; Description=Zinc finger, C3HC4 type (RING finger)
  Pfam annotation: Domain name=zf-CHY; Domain location=23-123; Score =51.3; E_value=3.3e-12; Accession=PF05495.3; Description=CHY zinc finger
  Pfam module annotation: Pfam domain module=Prot_inhib_II::zf -C3HC4::zf-CHY; Domain location=77-135::176-218::23-123
  Subcellular localization annotation: CTP_CleavageSite=78; ConfidenceScore=5.07e-01
MDSEAVQHGLLPLSACPPTANSCAHYSRGCSVVAPCCGQAFGCRHCHNDAKVRWFPSFRFRFGSGSADVLKQPCPVPRQNSLEVDPRDRHEIPRHEIKKVQQNCSSCGACMGKYFCKVCKFFDDDVSKGQYHCDGCGICRTGGVENFFHCDKCGCCYSNVLKDSHHCVERAMHHNCPVCFEYLFDSTKDISVLQCGHTIHLECMNEMRAHHHFSCPVCSRSACDMSATWRKLDEEVAATPMPDIYQKHMVWILCNDCSATSSVRFHVLGHKCPACSSYNTRETRAACPRI

SEQ ID NO: 59839 - protein, 110 aa, Zea mays
  Coding DNA Sequence Number=SeqID_18060
MSIVHAKNKKVPLGPKPEDKVSSGEIKISGDKHEHKEHSGESTSSTKSHKKKGGKKNRMKKVVYYETNSSVPSISDTESTSSKRNKCKRVTKFLSVTLTFQNTRNYFRSH

SEQ ID NO: 59840 - protein, 81 aa, Zea mays
  Coding DNA Sequence Number=SeqID_18061
MDKIKQTRPNAVAYTDSRKVLHRKIVSKCANNDHQYSLAWTLETGRVVAECRCHAQDHVLEGTDLSPTALAPFGITTRIGT

SEQ ID NO: 59841 - protein, 270 aa, Zea mays
  Coding DNA Sequence Number=SeqID_18062
MSPGFAKPLDTSECISIPKTTYSTSKYYPESSVVNKFSGSGLEYQKTQGVSGKTSTDSAHHTGGPRVVYSKDQGLLCKSTWPKRHHPIRDMIGTVDPLINRPRPVVLLRPIPPKCPTAARITTGDAILRFGGTKHKLTSATRCGYESGFGRGFLTGNCWHKRAVYGEQRAEMEARRRRAIAGVVVPFYSTDDHPHVRDGQPNALKPHTETNWWRRRDSPVGRAWPISTERRAAWVLALGAFDGGGIHGRVVVKRGKGTPELIGSTERTNL

SEQ ID NO: 59842 - protein, 249 aa, Zea mays
  Coding DNA Sequence Number=SeqID_18063
  Subcellular localization annotation: CTP_CleavageSite=47; ConfidenceScore=5.51e-01
MWACNVSAQTRVRSPGQPGLTAAGASSSAPQRTAASLASLTHRTHLPASSSQQPREGRGKDVAHDPFRRAYKLRSSFPPLDYNTPVNSSPIESSQRQNPSSAALGRNRPCATDGGIAPAPPIGLGVWLQGVRLAIADVRVVIGGVEGHHNSGNCSSSPRFHLRPLLTVDSSLVPTIPGRSWPLDLDRRVHNAYRFVKGVNLILGRTILNPTAHITRYLFGQIHYVNWNMENHSGETVLLRGFEWDALAD

SEQ ID NO: 59843 - protein, 100 aa, Zea mays
  Coding DNA Sequence Number=SeqID_18064
  Subcellular localization annotation: CTP_CleavageSite=88; ConfidenceScore=5.43e-01
MVLFNGRNKARQRQQQQQQQRASRFQGHWKVQGPKASSRSASRDAPPPPDTMSAGRSGSQQQTSAGSVVGGPPAATATSTASPTSTPSAMAKEVPAAPAL

SEQ ID NO: 59844 - protein, 180 aa, Zea mays
  Coding DNA Sequence Number=SeqID_18065
MRGGHRPVSRKDGHNSWKGLLTGTGFDPLPLPRDGTVSICFYGDPFKVAKSDEEDTYGQRLSGVFLLGGGLLRSDRRKNDSVDYNGNDGWPFGTNTMGQPRHGTKKHGSGTTRPAGLNHGWTHEIFEVYYLNDELDDLKAMVGKWSKGSIRFPRRRRSPNPDSERASSASAPAQAGTSWE

SEQ ID NO: 59845 - protein, 133 aa, Zea mays
  Coding DNA Sequence Number=SeqID_18066
GSEPRGQGELNRRNKCPGTTELPGFVRSAIPVFGLLPEFQPLVFGGTEFAFFRVLSRVRALGSGGAEFAVFRVLARVRALGSGGAEFAFFRVLARVRALGSGGAEFAVFRVLARVRALGVGRSGVRRGAFGKA

SEQ ID NO: 59846 - protein, 343 aa, Zea mays
  Coding DNA Sequence Number=SeqID_18067
  Gene Ontology: Cellular component=cytosol
  Homolog annotation: Hit_ID=Q9CXP9; Match level="QueryCoverage=78%, HitCoverage=72%, E-value=4e-29, Identity=29%"; Hit description=13 days embryo head cDNA, RIKEN full-length enriched library, clone:3110037I16 product:...
  Homolog annotation: Hit description=hypothetical protein, full insert sequence
  Subcellular localization annotation: CTP_CleavageSite=20; ConfidenceScore=5.18e-01
MALIDAALAAAAAGARPLLSAAARRAAVPLSRAACSATDGLAAGDIEDAPPRSRLARFRERRALAVTDITATEWCEKQMEFVLERGKPEKTAAMRVGSDRHAQLEQEVVERVDVAIRSAEELWAVKFMNFIVGTNQLLFEGITREIPVIGVVEGSWISGIIDEIQMATVGVSLQPMLVDTKTRSTRTVPSEAQKRNGRLQLMCYKYLWDNLIAEKFPADNFFSHFNLDPNYLLSDDVKGYISSLGFDAKTFEDVLKYFKVTCHTLPRSQEQLLLRYELQEDHSLLEEYRFTYDARWFRDQIQDVLSFWTGSHEPKLVAEEEMWKCRFCKFVSSCPMNASMPRC

SEQ ID NO: 59847 - protein, 64 aa, Zea mays
  Coding DNA Sequence Number=SeqID_18068
MAMVGALQRGVGGGSAHGGEARMQGAQTGPLPGFKDKLLDILLGKGSGQSEEKLHCPMHAEYWA

SEQ ID NO: 59848 - protein, 267 aa, Zea mays
  Coding DNA Sequence Number=SeqID_18069
MAKPTTPQVYPINQLRASHSTLMVVLFSPVVIQRTGPYGEGPGRKKQDCRFYFQETEGLFNKKTTRRGTGCSRPSDHISTDKIISERERARGRGRALISGPGRSAARGEGGLTGWAQRQGAQATDGWDPGVVVHALSGIWRSTPLDWEQTVRIGRQGGNDTVTGAVPIHGGGSRRRRGRRGLRGSGVTGNWAGPVRGPGELNGGIPAVRTGLGEREWRRKCSERVGVTPVTYSRLKALEDVEKDKAQVARAHNKKVKSKSFQVRDLV

SEQ ID NO: 59849 - protein, 410 aa, Zea mays
  Coding DNA Sequence Number=SeqID_18070
  Gene Ontology: Mol. function=kinase activity; Cellular component =cytoplasm; Biological process=phosphatidylethanolamine biosynthetic process
  Homolog annotation: Hit_ID=Q1KL28; Match level="QueryCoverage=98%, HitCoverage=100%, E-value=2e-83, Identity=47%"; Hit description =Choline kinase
  Pfam annotation: Domain name=APH; Domain location=50-334; Score=31.6; E_value=2.8e-06; Accession=PF01636.13; Description=Phosphotransferase enzyme family
  Pfam annotation: Domain name=Choline_kin_N; Domain location=1-52; Score=18.5; E_value=0.024; Accession=PF04428.5; Description=Choline kinase N terminus
  Pfam annotation: Domain name=Choline_kinase; Domain location=81-330; Score=85.2; E_value=2e-22; Accession=PF01633.10; Description =Cholineethanolamine kinase
  Pfam module annotation: Pfam domain module=APH::Choline_kin _N::Choline_kinase; Domain location=50-334::1-52::81-330
MAPKESQQQQSPAEVAAPAARSIPDEARRLLHELAAAWEDVAGCGSREPEVVPLKGAMTNEVYRARWATGSGDSSAPGQSDARTVLVRVYGEGVDLFFRQGGREVSLACLYLRVDCTTVVAEVDLALQVKRFLEVDASIPFRHFSAPDLRDPGNFSHHSLQTEGISQPRHAWFKIRAHLGKIKVLLVFFPAYTVALVQHVVKQNLSSKRSADCHSCIVSARNWLRTAKSLYSSSDETEEFCLDSMEEEIAALENEFSGECERVGFCHNDLQYGNIMIDEETRLLTIIDYEYAGFNPVAYDIANHFCEMAADYHSEKPHILDYSKYPDTDERKQFVRTYLSSSGEESEEEVENLIKSIEKYTLASHLVWGLWGIISDHVNDIDFDYKDYARQRFEQYWLKKPTILASQTAE

SEQ ID NO: 59850 - protein, 352 aa, Zea mays
  Coding DNA Sequence Number=SeqID_18071
  Gene Ontology: Mol. function=hydrolase activity, hydrolyzing O -glycosyl compounds; Cellular component=anchored to membrane; Biological process=carbohydrate metabolic process
  Homolog annotation: Hit_ID=Q6L5J3; Match level="QueryCoverage=93%, HitCoverage=67%, E-value=1e-171, Identity=84%"; Hit description ='putative beta-1,3-glucanase'
  Pfam annotation: Domain name=Glyco_hydro_17; Domain location=1-234; Score=71.0; E_value=3.9e-18; Accession=PF00332.9; Description =Glycosyl hydrolases family 17
  Pfam annotation: Domain name=X8; Domain location=254-348; Score =114.4; E_value=3.2e-31; Accession=PF07983.3; Description=X8 domain
  Pfam module annotation: Pfam domain module=Glyco_hydro_17::X8; Domain location=1-234::254-348
LIRSVGNEPFLKSYNGSFINITFPALKNMQRAIDEAGFGQHIKVVVPLNADIYSSPENKPVPSAGTFRKDINTLMVDIVNYLHANDAPFVVNIYPFLSLYQNPNFPLNFSFFDGATKPVYDQGMVYTNVFDANFDTLVWSLRKAGVPDMRIIVGEVGWPSDGDKNANTKYAQRFYNGFLKKMTKNVGTPLRPGRMEVYLFALIDENQKSVLPGRFERHWGLFTYDGKPKFSMDLSGNGKGSVAEVKGVQYLPPQWCVFNKDTKDKYKDLPASVNYACSNADCTPLGYGSSCNGLSHDGNISYAFNIYFQTMDQDVRACSFGGLAKITTTNASQGGFALVWMYEPRCRLVPKM

SEQ ID NO: 59851 - protein, 519 aa, Zea mays
  Coding DNA Sequence Number=SeqID_18072
  Gene Ontology: Mol. function=nucleotidyltransferase activity; Cellular component=mitochondrion; Biological process=tRNA processing
  Homolog annotation: Hit_ID=Q6L5J0; Match level="QueryCoverage=98%, HitCoverage=99%, E-value=0.0, Identity=65%"; Hit description =Putative tRNA His guanylyltransferase
  Pfam annotation: Domain name=Thg1; Domain location=1-246; Score =298.1; E_value=1.7e-86; Accession=PF04446.3; Description=tRNAHis guanylyltransferase
  Pfam annotation: Domain name=Thg1; Domain location=252-512; Score =192.0; E_value=1.4e-54; Accession=PF04446.3; Description=tRNAHis guanylyltransferase
  Pfam module annotation: Pfam domain module=Thg1::Thg1; Domain location=1-246::252-512
MANSEYEYVKREFEFDRCLPPSNWIVVRIDGCHFHRFSKVHAFEKPNDENALRLMNACATAVLEKFPDIAFAYGVSDEYRYDIRHYSHFHFQRGNRVLSPARKWKDFFPNKELKEPPYFDARAVCYPNLKTIRDYLAWRQVDCHINNQYNTCFWMLVKSGKSEQEAQLALKGTFAKDKNELLAKQFQINYDDELAMFRKGSSVYREKVETTVKIDDYGEPIKRPRLKVTVAHVDTIGTAFWENHPHILREGKFMHGFVKKFGINHIFSPCNWIIVRIIACQFDQFSTIHSFDKPNDETALRLMNESASLMMEQYPDIVFGYGFSNEYSFVFHEKSELYPETGKVVIIIMQNVFLILSSCSSYFTSLYMTKWKEFFPYTELMQTPHFEADALCYPKLKIICEYLSWRQAECHAGNQYNTCFWMLVKSGKSEKEAHEILKGTLSKDKNELLFQQFQMNYNNEPAMFRKGSCVYRRKVEELAGAEDGGNGTSRERWHVKVDHVDLGPGFWRKHPWLMTNCTQ

SEQ ID NO: 59852 - protein, 285 aa, Zea mays
  Coding DNA Sequence Number=SeqID_18073
  Gene Ontology: Mol. function=inositol or phosphatidylinositol phosphatase activity; Cellular component=intracellular; Biological process=abscisic acid mediated signaling
  Homolog annotation: Hit_ID=Q6L5I9; Match level="QueryCoverage=98%, HitCoverage=81%, E-value=4e-58, Identity=68%"; Hit description ='putative inositol-1,4,5-trisphosphate phosphatase'
  Pfam annotation: Domain name=Exo_endo_phos; Domain location=28-277; Score=12.4; E_value=0.002; Accession=PF03372.13; Description =EndonucleaseExonucleasephosphatase family
MSDLPYCLRMHRSEISRAQYVDVRELRIYVGTWNVGGRFPPSDLDIEEWLATEEPAEIYVIGFQEIVPLNAGNIFGAEDNRPVAVWEHIIRETLNKNCSDKSGFKCHSDPLSPSRFNPSDVVLSMEHGLLSESDKDSDGELHPLIERDHNCGLQAKTNENLEAFPEDNLACDAIIDNRTKRKRPEFVRIISKQMVGIFLSIWVRRSLRKHIKNLRVSTVGVGAIGYIENYVSDESESGRRTPAWCDRILSYGKGIRLLSYKRGELTLSDHRPVAAVYVAEIEVFH

SEQ ID NO: 59853 - protein, 236 aa, Zea mays
  Coding DNA Sequence Number=SeqID_18074
  Gene Ontology: Mol. function=nucleic acid binding; Cellular component= intracellular; Biological process=regulation of transcription, DNA -dependent
  Homolog annotation: Hit_ID=O24591; Match level="QueryCoverage=78%, HitCoverage=61%, E-value=2e-41, Identity=55%"; Hit description =Histone deacetylase 2a
  Pfam annotation: Domain name=zf-C2H2; Domain location=174-197; Score =17.6; E_value=0.046; Accession=PF00096.16; Description=Zinc finger, C2H2 type
MDLDSEDEDEELNVPVVKENGKADEKKQKSQEKAVAAPSKSSPDSKKSKDDDDSDEDETDDSDEDETDDSDEGLSPEEGDDDSSDEDDTSDDEEEDTPTPKKPEVGKKRAAESSVLKTPLSDKKAKVATPSSQKTGGKKGAAVHVATPHPAKGKTIVNNDKSVKSPKSAPKSGVPCKSCSKSFISETALQAHSKAKHGGKVCAGTWNVGGICPPNDLDIEEWLDIDDEPADIYVLG

SEQ ID NO: 59854 - protein, 482 aa, Zea mays
  Coding DNA Sequence Number=SeqID_18075
  Gene Ontology: Mol. function=transferase activity, transferring hexosyl groups; Cellular component=integral to membrane; Biological process=metabolic process
  Homolog annotation: Hit_ID=Q59J80; Match level="QueryCoverage=96%, HitCoverage=95%, E-value=3e-79, Identity=38%"; Hit description=Cyclo- DOPA 5-O-glucosyltransferase
  Pfam annotation: Domain name=UDPGT; Domain location=8-479; Score= -58.9; E_value=1.2e-07; Accession=PF00201.9; Description=UDP -glucoronosyl and UDP-glucosyl transferase
  Subcellular localization annotation: CTP_CleavageSite=72; ConfidenceScore=5.38e-01
MAAAAAAKHVVLFPFPGQGHLSAFMSLAGLLHSALPDAAITFVSTPRNVASLQTSAWSNAPFLGFHALPFTPADHGLPPDCESSDAVQPGAIAFLLVAFESLEAAFDDYLNTAISAAAGGGHDVCVVSDPFTAWTVTAARRRGCAHAFFASCGAYGSAVVHSLWSHLPVRPDPATGRVHLPEYPEVVIHRSQLSKNASAPPAVSNCAAGFYGRQIPLGYETGAVLVNTVEEFEPTGLDMLRRTLKIPVWPIGPLVRAANLPVSPEAEAAVASFLDCHPPSSVLYISFGSQNSIRAEHMAELALALESTGRPFVWAVRPPDGHDVKGEFRADQWLPDGFEERARTSNRGLLVRGWAPQVRILAHASTGAFLSHCGWNSVLESVTHGVPIIGWPLAGEQFYNAKMLKEEWGVCVEVARGNMEDTMVNRAAVADVVETVMGQTAKAAEMRRRVWEIKEVVEGSWNDGGGSSRKAMEDFLRAMNLR

SEQ ID NO: 59855 - protein, 99 aa, Zea mays
  Coding DNA Sequence Number=SeqID_18076
  Subcellular localization annotation: CTP_CleavageSite=43; ConfidenceScore=5.31e-01
MGGGGGTSWAQFTPTGGGPCPAGGGAGSPRRQGRNCGGGGAVPWDRRWKGRGRLSWGYGLRERRWEECAGIGEAGEERGRQAVGVERFLRGVVYSCSRV

SEQ ID NO: 59856 - protein, 284 aa, Zea mays
  Coding DNA Sequence Number=SeqID_18077
  Gene Ontology: Mol. function=nucleic acid binding; Cellular component= intracellular; Biological process=chromatin modification
  Homolog annotation: Hit_ID=Q5N712; Match level="QueryCoverage=61%, HitCoverage=15%, E-value=8e-40, Identity=48%"; Hit description =Putative floral activator, relative of early flowering 6
  Pfam annotation: Domain name=JmjN; Domain location=21-65; Score=35.8; E_value=1.5e-07; Accession=PF02375.7; Description=jmjN domain
MGCDERSRVHPYLIESLPLAPEFRPTVAEFADPIAYLLKIEPTAAPFGICKIVPPLPPPPKRTTLAPAAGHLPAPPPPRAQAHVALSPPLHAPKFEAKAGASRKALLARLNVPASKQLSSLDVEALFWRSSADYPVVVEYASDMPGSGFAPCAARLTHLPPTNVGETTWNMRGVARSLASLLRFVNARARVLGGGSCLNAGFCTRASSGYVRTAGWTTVKFESIDESLPVRRQQGGWLSSLLRAATPSLRAAMLSHGAVVSSPPPPPALQIGFGVHQTRINAGQ

SEQ ID NO: 59857 - protein, 53 aa, Zea mays
  Coding DNA Sequence Number=SeqID_18078
MSISLRDRIRKRREEEDDDMMIFIFPALYLMGSTRGGGQKKKRHTSDETGEVK

SEQ ID NO: 59858 - protein, 108 aa, Zea mays
  Coding DNA Sequence Number=SeqID_18079
MAAMSLRSTWTTGGRSIVDDEHERRSLLDPMADGRSSVGGGKRGEDVRSQAGTKLDPRGRKLSKSRQNGVKKFGQTCTSLGSNGLSDSPVHPQTGGNQDLKNEDEATP

SEQ ID NO: 59859 - protein, 139 aa, Zea mays
  Coding DNA Sequence Number=SeqID_18080
  Subcellular localization annotation: CTP_CleavageSite=53; ConfidenceScore=5.07e-01
MGPAGHLLHRSTVTDSTELAEGVGLGVVRRASSWYLTSSGRSFLRRRLVSIPVASREREGRVERNRAESARLPPEQIQGYTVNPTPISGQKASLIGSDGGRGLGALRRSLEALQFLAVVHLPPKIHPWRGQKLLRHPIL

SEQ ID NO: 59860 - protein, 135 aa, Zea mays
  Coding DNA Sequence Number=SeqID_18081
  Homolog annotation: Hit_ID=Q9XGD8; Match level="QueryCoverage=77%, HitCoverage=97%, E-value=3e-52, Identity=92%"; Hit description=BETL4 protein precursor
MRGENNIVLLLLLLFAVISPNQVIGSACTPEQKAAILNQCEEYIKPGYPLILPSYASVCCDKVRDVPNRDMNCIVDLLTPPEKAKHGVDKIKRLKDLCDNSPHHQTAAVIANGVRRQDIWSIEHHHSDAPLHISE

SEQ ID NO: 59861 - protein, 291 aa, Zea mays
  Coding DNA Sequence Number=SeqID_18082
  Gene Ontology: Mol. function=nucleic acid binding; Cellular component= membrane; Biological process=DNA integration
  Homolog annotation: Hit_ID=Q8W0X5; Match level="QueryCoverage=92%, HitCoverage=86%, E-value=1e-136, Identity=90%"; Hit description =Putative pol protein
  Pfam annotation: Domain name=RVT_2; Domain location=6-166; Score =102.6; E_value=1.1e-27; Accession=PF07727.4; Description=Reverse transcriptase (RNA-dependent
MASGRAPRGEGGKCRGGVRGTTPCFEDDRYPDHVFKLSKALYGLKQAPRAWYECLRDFLIANAFKVGKADPTLFTKTCDGDLFVCQIYVDDIIFGSTNQKSCEEFSRVMTQKFEMSMMGELNYFLGFQVKQLKDDTFISQMKYTQDLLKRFGMKDAKPAKTPMGTDGHVDLNKGVSDYARCKIDIKSTSGTCQFLGRSLVSWSSKKQTSVALSTAEAEYVAAGQCCAQLLWMRQTLRDFGYNLSKVPLLCDNESAIRMADNPVEHSRTKHRHPASLSEGPPAKGRYRGVPY

SEQ ID NO: 59862 - protein, 222 aa, Zea mays
  Coding DNA Sequence Number=SeqID_18083
MGYPRQGPQTSTKSPLGGKETTLSHDSPKANLGWKTKSRLTRGYRRAGDIVMARLWPTLDEERITDSPEGISRDAPEGARLRRPTLRGGPTDQLSDSPECVSSDAPEGDQLRQPTLRADKATNSLSSNPTRQRAEYGASDPLAAARAHRWSTPAASSARSSKYRAKPSWSVVPSPTPCLLFGPMCPTSLIRAYTSLGALDHPSPRLGLLAGVTPTRPERPLY

SEQ ID NO: 59863 - protein, 219 aa, Zea mays
  Coding DNA Sequence Number=SeqID_18084
  Gene Ontology: Mol. function=kinase activity
  Homolog annotation: Hit_ID=Q69JE2; Match level="QueryCoverage=84%, HitCoverage=34%, E-value=7e-87, Identity=83%"; Hit description =Putative CLB1 protein
  Pfam annotation: Domain name=C2; Domain location=80-163; Score=61.5; E_value=2.8e-15; Accession=PF00168.20; Description=C2 domain
MGMNMITLRELPPEETKVTTLNLLKTMDPNDVQNEKSRGELTLELIYKPFKEEDIEKEDTESADVIEKAPDGTPAGGGLLYVIVHEAQDLEGKHHTNPYAKIIFKGEEKKTKVIKKNRDPRWEDEFEFVCEEPPVNDKLHVDVLSKASKKGLIHGKETLGYIDISLADVISNKRINEKYHLIDSKNDLLLVAQISDKHYTIQEHSGIGVEFASNQKTSK

SEQ ID NO: 59864 - protein, 181 aa, Zea mays
  Coding DNA Sequence Number=SeqID_18085
  Homolog annotation: Hit_ID=Q69JE2; Match level="QueryCoverage=60%, HitCoverage=20%, E-value=3e-48, Identity=84%"; Hit description =Putative CLB1 protein
MAPLFSSSASPLSAHTSKKIVVREVTEARDFERRYDSGQVSWMKVYITEEQELIMEPSLKWAANPNITVVVKAYGLKATIQIVDLQVFASPRITLKPLVPTFPCFAKILVSLMEKPHVDFGLKLLGADVMAIPGLYIFVQEPTTLGLSFIWPVRERALLRFWVDSPWERISSCVKRIKLNS

SEQ ID NO: 59865 - protein, 85 aa, Zea mays
  Coding DNA Sequence Number=SeqID_18086
MRKASPWNSRGSVLRAAAEKFDSAGRGEESNWFGPSAVGTSLLTHTAAAIQGGVNNNPWGANAIIKVTKLARVHEGGSSPQCYIG

SEQ ID NO: 59866 - protein, 76 aa, Zea mays
  Coding DNA Sequence Number=SeqID_18087
MEHNLQPFLWLEVFLVEYKTAKEKSKEIDKLAREQKAEERQKQRGKEYDVEAGIEIPEERGCGDFSEEICDRFVKL

SEQ ID NO: 59867 - protein, 295 aa, Zea mays
  Coding DNA Sequence Number=SeqID_18088
  Gene Ontology: Mol. function=DNA binding; Cellular component=nucleus; Biological process=regulation of transcription, DNA-dependent
  Homolog annotation: Hit_ID=Q10MB4; Match level="QueryCoverage=45%, HitCoverage=41%, E-value=2e-65, Identity=84%"; Hit description=Myb -like DNA-binding domain containing protein, expressed
  Pfam annotation: Domain name=Myb_DNA-binding; Domain location=114 -159; Score=51.6; E_value=2.6e-12; Accession=PF00249.21; Description =Myb-like DNA-binding domain
  Pfam annotation: Domain name=Myb_DNA-binding; Domain location=61-108; Score=51.0; E_value=4.1e-12; Accession=PF00249.21; Description=Myb -like DNA-binding domain
  Pfam module annotation: Pfam domain module=Myb_DNA-binding::Myb_DNA -binding; Domain location=114-159::61-108
MAMMGFDEDLDQVLAAMGPADSSATSSAPNAAAPAPLAVVPAGSSDDEEAAAADSADDLRRGPWTVDEDILLVNYIAAHGEGRWNSLARSAGLKRTGKSCRLRWLNYLRPNVRRGNITAEEQLLILDLHSRWGNRWSKIAQQLPGRTDNEIKNYWRTRVQKHARHLRCDVNSAHFRHIVRHVWMPRLRERAQAGGVQAPATTTASAPPACYNYCGSQHLLTLTPRRHTATPTTNDQGYEQTTTDDDVFAGSTTSELLVTATGGPDDEYSSMIGLQLQDFGFEDFEYGLWSLDDLC

SEQ ID NO: 59868 - protein, 96 aa, Zea mays
  Coding DNA Sequence Number=SeqID_18089
MMHGLRRMFVAHNSKSWAHRDEQSTAIASTSTYELLVLDSLLSKANLENNRYKKTQRGAKSLIGCDLILRRQAAFLASPSATVVIDDKGSDDGSIL

SEQ ID NO: 59869 - protein, 207 aa, Zea mays
  Coding DNA Sequence Number=SeqID_18090
  Gene Ontology: Mol. function=structural constituent of ribosome; Cellular component=ribonucleoprotein complex; Biological process =translation
  Homolog annotation: Hit_ID=Q5R1X9; Match level="QueryCoverage=67%, HitCoverage=82%, E-value=9e-49, Identity=74%"; Hit description =Ribosomal L14 protein
  Pfam annotation: Domain name=Ribosomal_L14; Domain location=89-207; Score=132.6; E_value=1.1e-36; Accession=PF00238.10; Description =Ribosomal protein L14pL23e
MGSFLMRKLEQLDVAHNLLTGAVPPGICDLLRLKNFTLATNFFTCEPPSCARVVPQDGDRSNCLPNRSSQRTSQLAQSFYLSMQIRTFIQMRTNLKVVDNSGAKRVMSIQSLRGKKGARLGDMIIGSVKEAQPCGKVKKGDVVYGVVVRAAMKKGRSDGSEVQFDNNAVVLVNKKGELIGTRVFIPVPHELRKKKHLKIVALAEHIV

SEQ ID NO: 59870 - protein, 93 aa, Zea mays
  Coding DNA Sequence Number=SeqID_18091
MVEEPRGLGAEAAMARLEGPPQRAANRWSSGSVGAPNTVQCTPDSPVCPTDRWRDHVSREDCAADRWLTGQSGAPPDSPVNFSHVVFLHSRER

SEQ ID NO: 59871 - protein, 59 aa, Zea mays
  Coding DNA Sequence Number=SeqID_18092
MAAGSGPRRRQARRGSVASLGTYLFAPQRPDTVSPEQSVGRATERAVMPKSNGYRQRAY

SEQ ID NO: 59872 - protein, 780 aa, Zea mays
  Coding DNA Sequence Number=SeqID_18093
  Gene Ontology: Mol. function=translation initiation factor activity; Cellular component=cytoplasm; Biological process=stem cell maintenance
  Homolog annotation: Hit_ID=Q69VD5; Match level="QueryCoverage=87%, HitCoverage=70%, E-value=0.0, Identity=93%"; Hit description=ZLL/PNH homologous protein
  Pfam annotation: Domain name=DUF1785; Domain location=260-312; Score =103.7; E_value=5.3e-28; Accession=PF08699.1; Description=Domain of unknown function (DUF1785)
  Pfam annotation: Domain name=PAZ; Domain location=313-454; Score =166.3; E_value=7.6e-47; Accession=PF02170.12; Description=PAZ domain
  Pfam annotation: Domain name=Piwi; Domain location=590-780; Score =101.4; E_value=2.7e-27; Accession=PF02171.8; Description=Piwi domain
  Pfam module annotation: Pfam domain module=DUF1785::PAZ::Piwi; Domain location=260-312::313-454::590-780
  Subcellular localization annotation: CTP_CleavageSite=38; ConfidenceScore=5.14e-01
MTPPPPPPQARLHQGSSAKGGHAERRKQPLQSSVTQPKAEPAAAAAVLPVPEGGKRCRGGGRRRGRAKAPGEPRAALLAPAQAQTQAPPPRTVIGPPVPSKGLSFCRRPGFGTVGARCVVKANHFLAELPDKDLTQYDVKITPEVSSRTVNRAIMAELVRLYRASDLGMRLPAYDGRKNLYTAGTLPFDAREFVVRLADEDDGSGVPPREREYRVAIKFAARADLHHLRQFIAGRQADAPQEALQVLDIVLRELANQRYVSIGRSFYSPDIRKPQRLGDGLQSWRGFYQSIRPTQMGLSLNIDMSSTAFIEPLPVIEFVAQILGKDVISRPLSDANRIKIKKALRGVKVEVTHRGNVRRKYRISGLTTQPTHELIFPIDEQMNMKSVVEYFKEMYGFTIQHPHLPCLQVGNQKKANYLPMEVFYQACKIIEGQRYTKRLNEKQITSLLKTVHQNDYEQDPYAKEFGINISEKLTSVEARVLPAPWLKYHDTGKEKECLPQVGQWNMVNKKVINGCKVSHWACINFSRSVPETTARGFCQELAQMCQISGMEFNSEPVMPIYSARPDQVVKALKNVYNIALNKLKGKDLELLLAILPDNNGQLYGDIKRICETDLGLISQCCLTKHVFKISKQYLANVSLKINVKMGGRNTVLLDAISWRIPLVSDIPTIIFGADVTHPETGEDSSPSIAAVVASQDWPEVTKYAGLVCAQAHRQELIQDLYKTWHDPQRGTVTGGMIRELLISFRKATGQKPLRIIFYRDGVSEGQFYQVLLYELDAIRK

SEQ ID NO: 59873 - protein, 215 aa, Zea mays
  Coding DNA Sequence Number=SeqID_18094
  Gene Ontology: Mol. function=sugar binding; Biological process =carbohydrate metabolic process
  Homolog annotation: Hit_ID=Q9LTK1; Match level="QueryCoverage=70%, HitCoverage=69%, E-value=8e-33, Identity=51%"; Hit description =Arabidopsis thaliana genomic DNA, chromosome 5, BAC clone:F17P19
  Subcellular localization annotation: CTP_CleavageSite=45; ConfidenceScore=5.41e-01
MTGSDTAAASAQQADAAAICGQIASVFSAPSPRPPARSVLVSELEAAASRGGRVFVHGVGREGLMMRALCMRLAHLGLPAHCVGDVTAPPAGGGDLLVASAGPGAFSTVDAICGVARGAGARVLLLTARLEGDFPRRQADVVAHLPAQTMADDEEGAGETETETEAEGSPARAKLPMGSLYEGAMFVLFEMVVLELARVLGQSPAQMRARHTNLE

SEQ ID NO: 59874 - protein, 56 aa, Zea mays
  Coding DNA Sequence Number=SeqID_18095
MGNEPELRARARKSLGRKDGQGAPSTELQPEPEALKLDRDKKLSAFRDRGVPQADE

SEQ ID NO: 59875 - protein, 431 aa, Zea mays
  Coding DNA Sequence Number=SeqID_18096
  Gene Ontology: Mol. function=sequence-specific DNA binding; Cellular component=nucleus; Biological process=regulation of transcription, DNA-dependent
  Homolog annotation: Hit_ID=Q9SCW4; Match level="QueryCoverage=14%, HitCoverage=31%, E-value=1e-13, Identity=46%"; Hit description=Heat shock factor protein 6
  Pfam annotation: Domain name=HSF_DNA-bind; Domain location=9-172; Score=15.7; E_value=2.2e-11; Accession=PF00447.8; Description=HSF -type DNA-binding
MALPAAGTPPFLTKTYAMVEDSATDDTISWNDTGTAFVGFKKVVGDRWEFANDGFRRGEKHLLAGIQRRKGTGAVAAVPVPGIPAGIPLPLSSPPTSSGGEPAVSSSPPRGSTAGVSGAVAELEEENARLRRENARLARELARARRLCDGVRQLMARYDDDQGRGGDEDPADGDEGHGGSGEGPSGPEVKPMLFGVPIGAKRLRGARGDGDDVDDGEDNDEEQDEDDERQTVRKQGVKAARRNEASDLDVLTLSVRAAAAARTGGGSPSGATGSSASPDLGPQPQEEVSASPDPGLGPRLGLGRWSPPRPTPGLGLNLGLGRWSPPRPTPGLGLNLDLRRNRVLTRPRPRPQEESPPRPTLGSDRPRHGGYIITLPLASSGYGEQDRRPIWLAPGPPGVETPTVGAPGRGLLRVDEQLPVEFQMGSLQQPL

SEQ ID NO: 59876 - protein, 280 aa, Zea mays
  Coding DNA Sequence Number=SeqID_18097
  Gene Ontology: Mol. function=RNA-directed DNA polymerase activity; Cellular component=chromatin; Biological process=RNA-dependent DNA replication
  Homolog annotation: Hit_ID=UPI00004C1731; Match level="QueryCoverage =99%, HitCoverage=22%, E-value=1e-111, Identity=67%"; Hit description= UPI00004C1731 related cluster
  Pfam annotation: Domain name=RnaseH; Domain location=1-123; Score= -6.7; E_value=0.00025; Accession=PF00075.14; Description=RNase H
  Pfam annotation: Domain name=rve; Domain location=125-273; Score =42.6; E_value=1.4e-09; Accession=PF00665.16; Description=Integrase core domain
  Pfam module annotation: Pfam domain module=RnaseH::rve; Domain location=1-123::125-273
MYFDGSLMKTGAGAGLLFISPLGKHLCYVLCLHFPASNNVAEYEALVNGLRIAIELGVQRLDARGDSQLVIDQVMKNSHCRDRKMEAYCDEVRRLEDKFYGLELNHIARRYNETADELAKIASGRTAVPPDVFSRDIHQPSVKTDDTSEPEEASAQPEKAPRGFSHLLVAIDKFSKWIEVRPLTSIRSEQAVAFFTNIIHRFGVPNSIIADNGTQSTGKKFLDFCEDHHIRVDWATVAHSMTNGQVECANGMLLQGLKPRIYNDLNKFGKRWMKELPSVV

SEQ ID NO: 59877 - protein, 135 aa, Zea mays
  Coding DNA Sequence Number=SeqID_18098
MPQTWWYRAEQPRGNKKQRAIQTIKRIRHRRRDFRIQVLENILKRAREVGEVWLKRVKLEPVSNGTHMDYTPRAAIRFVSLDFIINQEGDMIGTVPAWPPPPENPNAVSEALGGLSLVPRAARGTNQPRLPMLTK

SEQ ID NO: 59878 - protein, 89 aa, Zea mays
  Coding DNA Sequence Number=SeqID_18099
MDVEQHTVRQVNVELHAGAEEQHADTAHRMTGTTRRSAGEAVRGDVLDCWSWQAGARWAVFRGLAPSGTRRSGMDSFLTGLNGSFFMFG

SEQ ID NO: 59879 - protein, 381 aa, Zea mays
  Coding DNA Sequence Number=SeqID_18100
  Gene Ontology: Mol. function=zinc ion binding; Cellular component =proton-transporting two-sector ATPase complex; Biological process =ATP synthesis coupled proton transport
  Homolog annotation: Hit_ID=Q6EPF2; Match level="QueryCoverage=93%, HitCoverage=86%, E-value=6e-51, Identity=55%"; Hit description=Ring zinc finger protein-like
  Pfam annotation: Domain name=zf-C3HC4; Domain location=325-365; Score= 40.5; E_value=6e-09; Accession=PF00097.15; Description=Zinc finger, C3HC4 type (RING finger)
MERFAGPPVRGAARLLRRGGRRAMREPSVLVREAAAEHLEERQADWAYSRPVVALDLLWNLAFITVAAVVLVLSRDEDSPMPLRTWVAGYALQCVVHMICVAIEYRMRHGQRGSAVAGAAPADVERGSDASSSSSDEDDRELDLHGRRTDYARRYSPKRWIVSYMISVSRCQVNDDSSPKCFICTPPPPRPEALFAAAAFGAALVLEKGRLGGVVRPVSLSHEVTAHRFKAAPPLLRGIAKHLESANTMFSFIWWIIGFYWISAGGEEEGASEDDIRQIPRYKFRRTDEPEKQDVDPMGPFGGIMIECGTNQPIEKVLAAEDAECCICLSAYDDSAELRELPCGHHFHCTCIDKWLHINATCPLCKYNIRKSSSSSGSEEV

SEQ ID NO: 59880 - protein, 140 aa, Zea mays
  Coding DNA Sequence Number=SeqID_18101
  Subcellular localization annotation: CTP_CleavageSite=10; ConfidenceScore=5.44e-01
RPLAAPNRPLAAPGAPPGRPAGRWPALAVPQPARPRLGPGRALDRRALGRPPGRAQPRAPGRVPLHRAGSAALAAQLSRPRSAAPSSAAPARPAQPPSPGRFNRPRAGGYEIDDSGYDYGAGEDEAVEGDFQEFQDYDEF

SEQ ID NO: 59881 - protein, 101 aa, Zea mays
  Coding DNA Sequence Number=SeqID_18102
  Subcellular localization annotation: CTP_CleavageSite=39; ConfidenceScore=5.05e-01
MPRKSTADACWLTVAARQLTGRVHGPQAGASRRLSGLCRCALLRQKLVMQCEIKTEAARKPMPMAPAGRARTAPSARGRVRGRPLHKVAVCHTTKGRAFLH

SEQ ID NO: 59882 - protein, 303 aa, Zea mays
  Coding DNA Sequence Number=SeqID_18103
  Gene Ontology: Mol. function=DNA binding; Cellular component=nucleus; Biological process=RNA-dependent DNA replication
  Homolog annotation: Hit_ID=Q9LGH0; Match level="QueryCoverage=94%, HitCoverage=98%, E-value=2e-47, Identity=35%"; Hit description=NAM -like protein-like
MAIGLVGHRGGGVMEGDESYYTKLLNGGFENFEELSETPTELPCIVPIKDSNTFSKSNQKQKGKNFSEEEDRALVAAWLNVSTDPTQGTNQTRGTFWKRIHMFYETNRGNRAERTESSLLHRWSAIQDAVEQAEKLFKDNDPHNKSFQLRHCWMLLRNQPKWQDKLQQLIAIKTNVDLSEADAPQRPMGKKKSKDALRRGGIDVCKEALDILWAKKFEADAEKERKREERYAKSYALDKERLDIEKEKIVLEREKASNEANTSYLKRIAEEERIMTIDMNSLNEMQQQFYMNLQAEIMARRNN

SEQ ID NO: 59883 - protein, 428 aa, Zea mays
  Coding DNA Sequence Number=SeqID_18104
MPVLRSPFAGGDLPAGDADPDYLYFLEHIRIDGDSYTLELPSHGDSPPSLIKYETPFASPSDGECVSDPSQGRLSGNRSAQDEREPVESASLETGPAWYDCLHDVDEDYRLFLQHTRVVDGQLVLEIGGVVVNYDNPVAVESPGEKDTQRGEEAVFASPGEGISVAAGSDQVASGAPATAVSEQNASDWRADPSPRREVNDGGDEGLSDASALKGAYWEASSSDGRRAPPTNSGGKVEKELGIIWPTHITRRPDSDFKRRLIKALTKPVARKEYYRLFDTVTIRTPLMKLRQVRNETKFYPTEEMGSSYLDHYPDLAEQIMNNGRRNGLALMRGFLFWLQDAANRMHSRLDKNFVRASRKVSFRKIPEDALGSLKEFYQTKLNRICQCLEKAIPLIRGQDTLRLRSVVPNQTGFGLDWGAIQVEIRPQ

SEQ ID NO: 59884 - protein, 125 aa, Zea mays
  Coding DNA Sequence Number=SeqID_18105
MALLPPGWELDTPKKFPLDAGGAKLAPLAHHLFDVMHSSCMSQIIAAASSFAGACPQQQSRRDTVTLGEAPCCPSRWIELCPSPQLAIVEYWACRRCRACHAQQEPQRHDLFQLDESSHIVVDPW

SEQ ID NO: 59885 - protein, 98 aa, Zea mays
  Coding DNA Sequence Number=SeqID_18106
MEGLGDEVWAMPPGARRWRTQQRACSSQTAGAWTFSPWEKTMDDASMQGGAWWLENGEGRVAAGKGMLLSEFLGAVGSFYRGFRPWTERGELQRGVHV

SEQ ID NO: 59886 - protein, 95 aa, Zea mays
  Coding DNA Sequence Number=SeqID_18107
MSCAFDDYYIKDYGVILAPEASMYGGAYLMTDNVRGNFYRQMWHVLFNDETMQIVAFIESVCIGEVVVAAAAHYCLLSIGREKKSCDHQIDEGVD

SEQ ID NO: 59887 - protein, 483 aa, Zea mays
  Coding DNA Sequence Number=SeqID_18108
  Gene Ontology: Mol. function=sugar porter activity; Cellular component=integral to membrane; Biological process=carbohydrate transport
  Homolog annotation: Hit_ID=Q945E5; Match level="QueryCoverage=94%, HitCoverage=84%, E-value=1e-160, Identity=62%"; Hit description =Putative sugar transporter
  Pfam annotation: Domain name=MFS_1; Domain location=21-417; Score =95.7; E_value=1.4e-25; Accession=PF07690.6; Description=Major Facilitator Superfamily
  Pfam annotation: Domain name=Sugar_tr; Domain location=24-458; Score =306.9; E_value=3.7e-89; Accession=PF00083.14; Description=Sugar (and other) transporter
  Pfam module annotation: Pfam domain module=MFS_1::Sugar_tr; Domain location=21-417::24-458
MASADLAEAMEPGKKSNVKYASVCAIMASMACVILGYAAIYIKKDLKITDVQLEILIGIISLYSLIGSFAGARTSDRIGRRLTVVFAAVIFFVGALLMGFSVNYGMLMVGRFVAGVGVGYGGMIAPVYTAEISPAASRGFLTSFPEVFINLGILLGYLSNYAFAGLPLHLGWRVMLGIGAAPSALLALLGGAREDLRPRQRRPQSGWLTSRLPAGIPKDLDGDVVTVPKERNSGEMQVWKDLILSPTPAIRRILLSAVGLHFFQQASGCDSVVLYSPSVFRSAGITGDNKLLGVTCAVGVTKTLFILVATFLLDRVGRRPLLLTSTGGMVISLISLGTALTVVGHHPDAKIPSVVALCIASTLAFVAFFSIGLGPITGVYNSEIFPLQLRALGFAVGVACNRVTSAVISMTFLSLSKAITIGGSFFLYSGIAAVGWVFFFTCLPETRGRTLEEMGKLFGMPDTDMAEADDTAAKEKVVEMSTK

SEQ ID NO: 59888 - protein, 96 aa, Zea mays
  Coding DNA Sequence Number=SeqID_18109
MAAMISSMQGRHGSVDNFDEFQTVLGKEKPPSRCRNDGDSVFAECRLELVKVCAKCREKALDKEGFADVLFVESFLPSVFQALSSASGTRQSGRFR

SEQ ID NO: 59889 - protein, 756 aa, Zea mays
  Coding DNA Sequence Number=SeqID_18110
  Gene Ontology: Mol. function=RNA-directed DNA polymerase activity; Cellular component=mitochondrion; Biological process=RNA-dependent DNA replication
  Homolog annotation: Hit_ID=UPI00004C1731; Match level="QueryCoverage =99%, HitCoverage=50%, E-value=0.0, Identity=82%"; Hit description =UPI00004C1731 related cluster
  Pfam annotation: Domain name=RnaseH; Domain location=295-422; Score =5.3; E_value=1.9e-05; Accession=PF00075.14; Description=RNase H
  Pfam annotation: Domain name=rve; Domain location=495-667; Score =106.4; E_value=8.5e-29; Accession=PF00665.16; Description=Integrase core domain
  Pfam module annotation: Pfam domain module=RnaseH::rve; Domain location=295-422::495-667
MCSGEHIGRTVEAYVDDIVVKTRKASDLLSDLEATFRCLKAKGVKLNPKKCVFGVPRGMLLGFIVSERGIEANPEKIAAITSMGPIKNLKGVQRVMGCLAALSRFISRLGERGLPLYRLLRKAECFAWTPEAEEALGNLKALLTKAPVLVPPADGEALLVYVAATTQVVSAAIVVERQEEGHALPVQRPVYFVSEVLSETKIRYPQVQKLMYAVILTRRKLRHYFESHPVTVVSSFPLGEIIQCREASGRITKWAVEIMGETISFAPRKAIKSQVLADFVAEWVDTQLPTAPIQPELWTMFFDGSLMKTGAGAGLLFISPLGKHLRYVLRLHFPASNNVAEYEALVNGLRIAIELGVRRLDARGDSQLVIDQVMKNSHCRDPKMEAYCDEVRRLEDKFYGLELNHIARRYNETADELAKITSGRTTVPPDVFSRDLHQPSVKINDAPEPGAPSAQLEAPSAQPEAFSAQPEAPSAQPEVPSAPEGEALDVEEEQSGATPDRDWQAPYLQYLRRGELPPDQAEARRKAPGGYTHLLVAIDKFSKWIEVRPLNSIRSEQAVAFFTNIIHRFGVPNSIITDNGTQFTGKKFLDFCEDHHIRVDWAAVAHPMSNGQVERANGMILRGLKPRIYNDLNKFGKRWMKELPSVVWSLRTTPSRATGFTPFFLVYGAEAILPTDLEYGSPRTRAYTDQSNQASREDSLDQLEEARDRALLHSARYQQSLRRYHARGVRPRDFQVGDLVLRLRQDARGRHKLTPP

SEQ ID NO: 59890 - protein, 100 aa, Zea mays
  Coding DNA Sequence Number=SeqID_18111
MDPSTKPLCHCALCSISQSRLEALERKGFLSPKVASDVLPVDPLPSSVHGYEGERFDVWNLEGSVPPFTGRVPVSKPKGNYGANKKFKPKIDYMLEAIAM

SEQ ID NO: 59891 - protein, 408 aa, Zea mays
  Coding DNA Sequence Number=SeqID_18112
  Gene Ontology: Mol. function=transferase activity; Biological process= flavonoid biosynthetic process
  Homolog annotation: Hit_ID=Q338X7; Match level="QueryCoverage=96%, HitCoverage=94%, E-value=1e-108, Identity=51%"; Hit description =Transferase family protein, expressed
  Pfam annotation: Domain name=Transferase; Domain location=1-407; Score=-9.6; E_value=1.7e-10; Accession=PF02458.6; Description =Transferase family
MVKPVYSTPHPLAGEKVPLTVFDRAAFDIFVPIVFAYPAPAPSNEALKEGLRRAVALYPHLAGRLAVDGPGPPVLPPKRRGRACGRSSRLGRPGRRARRRSTATSAAASVIGITSHHQVADGHSMSTFLTTWANAVRAGKDFSVPAAAKAPFLNRAATAVPRAAPAPAFDHRSIEFKGGDDDGARASKPYTVVPMDKIKNVTVHFTDEFIAGLKARVGVRCSTFQCLLAHVWKKITAARDLDLEELTQVRVAVNCRGRASPAVPTDFFGNMVLWAFPRLQVRDLLNSSYSRVVDAIRDAVARVDGEYIQSFVDFGAVADASGEELVATAAAPGTMLSPDMEVDSWLGFQFHQMDLGTGPPCAFLPPDLPIEGLMIFVPSRTAKGGVDLFMAVAECHVNAFEQICHSID

SEQ ID NO: 59892 - protein, 218 aa, Zea mays
  Coding DNA Sequence Number=SeqID_18113
MARRTLYDDDGSQPPYGSKRTSSSALGELLSHILELVVDGEEEFHVGSCFGRRSRPSRVADGVIAGKGVVQSLNAHRQLLHRQASHVAGDDEKKDLERKGEGNDGSSCSDGVGHEQVVGALGCSHRREPCVRVDGGGGRERDKVGGGGLEVGAAGQWHVDLEFLAPTADSELLAPAAVAQCIRVAVGESGHGRDRSQDAKASSASRRIAPLMMNDIGG

SEQ ID NO: 59893 - protein, 1112 aa, Zea mays
  Coding DNA Sequence Number=SeqID_18114
  Gene Ontology: Mol. function=neuropeptide hormone activity; Cellular component=extracellular region; Biological process=neuropeptide signaling pathway
  Homolog annotation: Hit_ID=Q10QR8; Match level="QueryCoverage=93%, HitCoverage=91%, E-value=0.0, Identity=60%"; Hit description =Expressed protein
  Subcellular localization annotation: CTP_CleavageSite=14; ConfidenceScore=5.09e-01
MSGGRRRSSPVAPSCSSVPGRSLVPLCCLILVLLSFSMSSSAVAAEDCVEDSDGADGDGCCLSFRDVCADRSSFCFSSSVAQMLLASEDAAEAPDLELPRGWEPSSLPLSFPMSGGGGMVTCSSVDSSLTRARDGLGRGDDARARYDVASCQAPLVPDNWMRASAGVPMEVEGPATDADPSGLQSPLSMNVEINPPVLDWGRSDLYAATKANLTVVNLNKNSALRLYEPFSTDPQFYVYGYEDLELQPGENATVTFVFLPKLLGSSSAHLVVQTNFGGFIIHAKGMAVSSPYQILPLTGIDVLIGGQLERNLSIYNPYDDTLYVEEVSVWMSSLESTRYSSHLVCQLGPFDGALELSSSRSNWYTASSEEFRWPVVNIRPSEQWEVLPSKRNTVIELKLQAVSEGKVFGAICLKLRNCTLSTTHAFVIPIELEPMVRKAVKADDRMLKQWKSHGTSDGISVLMDHEMMFPVVQIGSQFSKWIKVHNPSLERAAMQLIVNSEEIIDQCKTVTDVCELTFSSKSPEVNSTETRFGFSLGDAAITEAYVDPSETALLGPIVFRPSNHCMWSSMVLIRNNLSGVEMLPLRAYGGRQSIVLLEESEPAWKLEFSLGSNVHNKSTMTKQEIPSSLCSQQLTKEIHVKNSGDLPLQVTKVKVSGADCGVDGFTVDNCKGFSLAPSESIRMLISFQADFSSAMVQRDLELVMTTGIFPIPMTATIPVCMLNQCRKSYLRSAHWKLLVILFGALALLILVFVRYAPDSLTVGSQDYIKIDDKKSAIFEENKKSTINKTLFLNQSSKKSRTNKEHKRTEEAVAEKYPASVVDSSKRADDKNKPDEQLHTTSTVSVSRGNPVEDKASREAPQTSENLTIRIARDKGKRRKRKVGAGLAGKFEVSSSHSGNSTPSSPLSQSSTPKHGWSFSGAPSEPKHENKVESRFDVEATASPTRANHEKKKTWSQVAKEQPRSRSASPGITSPPPSPAVTAPVAWRSPSLAPTSSPTAPQSRAPGSNLVKDKAVKRDVGAAAAAAAPSPKKEFTYDIWGDHFPGNLLVVAREAAPRKMPDASEGASYSLFAREPQTLMMKPSSSAPPPMSRGRDMRAIMFLYKAGEVLDAC

SEQ ID NO: 59894 - protein, 133 aa, Zea mays
  Coding DNA Sequence Number=SeqID_18115
  Gene Ontology: Mol. function=sequence-specific DNA binding; Cellular component=nucleus; Biological process=regulation of transcription, DNA-dependent
  Homolog annotation: Hit_ID=Q84V77; Match level="QueryCoverage=81%, HitCoverage=54%, E-value=8e-39, Identity=78%"; Hit description =Putative MADS-domain transcription factor
QMRGEELQRLSVEQLQELEKTLESGLGSVLKTKVASVLTCVVKQRTQLIEENSRLKEQVTRMSRMETQLGADPEFVYEEGQSSESVTNTSYPRPSTDTDDCSDTSLRLGRNFDANVAIAYGAAMEAKTEDAPR

SEQ ID NO: 59895 - protein, 139 aa, Zea mays
  Coding DNA Sequence Number=SeqID_18116
  Gene Ontology: Mol. function=hydrolase activity; Biological process =metabolic process
  Homolog annotation: Hit_ID=Q10NU5; Match level="QueryCoverage=86%, HitCoverage=32%, E-value=6e-37, Identity=65%"; Hit description =Expressed protein
MGALHVVGEPRISFRQQPAAVVAKNGSHGAVIEEIHGLIRAYKDRNVERLPAIPVVPCMWGGTAPDASGGVVARDVVVDPATGVWARLYAPTATSAGDGARRPVMVYFHDGGFCVGSAAWTVGTFVEQTPGVQAPADPP

SEQ ID NO: 59896 - protein, 158 aa, Zea mays
  Coding DNA Sequence Number=SeqID_18117
  Homolog annotation: Hit_ID=Q6QP54; Match level="QueryCoverage=40%, HitCoverage=16%, E-value=7e-07, Identity=61%"; Hit description =Putative kinase
  Subcellular localization annotation: CTP_CleavageSite=97; ConfidenceScore=5.25e-01
MSRAGSQARTQAHGTLRSARPRARTRVSPGRLRNCDPPDPGLGLGLRPARGANSVPPDPGLGLGLSPGRRRTPLRPTQGSNLGSAPEDDEFCSARPRARTWAQPQKTTNSASPDPRTRTPPWPQPTASASPDLGARTRPQPRKTDSTSTSEEPPHRPT

SEQ ID NO: 59897 - protein, 271 aa, Zea mays
  Coding DNA Sequence Number=SeqID_18118
  Gene Ontology: Mol. function=uroporphyrinogen-III synthase activity; Biological process=tetrapyrrole biosynthetic process
  Homolog annotation: Hit_ID=Q10QR9; Match level="QueryCoverage=90%, HitCoverage=90%, E-value=2e-84, Identity=62%"; Hit description =Uroporphyrinogen-III synthase family protein, putative, expressed
  Pfam annotation: Domain name=HEM4; Domain location=50-253; Score =20.0; E_value=4.3e-07; Accession=PF02602.6; Description =Uroporphyrinogen-III synthase HemD
  Subcellular localization annotation: CTP_CleavageSite=26; ConfidenceScore=5.43e-01
MAFSSSLAPFFPPSGTFRAHPARRLRADAPGRFVASCLPPPDVVVTREQGKNARLISALEKHNVHPLELPLIKHVEGPDTDRLLDVLRNDKFDWIIVTSPEAAAVFLQGWKAAGSPKVRVAVVGEGTARVFHEVSESDDQSLELAFSPSKEDVLSERGFDVTRLNTYTTVVAFSSVPVEDVDPLTLNLAISAPVVALASPSALRAWLNLISKSDNWNNSVACIGETTASAAKKLGLKSIYYPTTPGLEGWVESILEALRVHRTASKEAPKR

SEQ ID NO: 59898 - protein, 311 aa, Zea mays
  Coding DNA Sequence Number=SeqID_18119
  Subcellular localization annotation: CTP_CleavageSite=65; ConfidenceScore=5.16e-01
MAEAATSPAYFPRLHRRPPIPKSNRAKQRLAHGRLNGAQSAFPHASATDSFPKGPRKAPVKPRVPATARGWIPRQRGVESRRGRGYLPPYWLRFRFVRKAEARTRRGVYSRGGSRLQAKCAPLTDPGSHTAVSAVKGEGVSSTAGHTIKYQWPRLEQRDYESPFPSQADGPDDPTERVWFRSNLHRPKKIERLTAVLNPRLAQVLRRHGRGGDFAGNPLAAAYGGPETPVSDWQALSQRFRTPAPQTVSPRVRARLQSSPGFRRRRGGGFRGGAEWSQGEVVAISLLTGLGSDSCARPKQGRGAAFIVAGV

SEQ ID NO: 59899 - protein, 54 aa, Zea mays
  Coding DNA Sequence Number=SeqID_18120
MARLGHAVANGEGTSAGALTNSHWIMLKIKSKVSSILLKFWISAWTSLTAKLEA

SEQ ID NO: 59900 - protein, 54 aa, Zea mays
  Coding DNA Sequence Number=SeqID_18121
MARLGHAVANGEGTSAGALTNSHWIMLKIKSKVSSVLLKFWISAWTSLTAKLEA

SEQ ID NO: 59901 - protein, 134 aa, Zea mays
  Coding DNA Sequence Number=SeqID_18122
MEATERAERVEQEGRGGREDGDPAVVDGIFSRWEVGEILGRWRGENSGGQRDFRGRGRLVGRGWWRPGHGARWGWKGRGRSMEGVGEAAQRTTFHRCDISGARRKCADARDRTVHHQGVDAYGSLLRNSRDSRF

SEQ ID NO: 59902 - protein, 125 aa, Zea mays
  Coding DNA Sequence Number=SeqID_18123
MPTTKKKVEMGGRAGSTEPQPWQKFATPRESVLSCGAHWLVVGAMRGKGMACTVAVGGERTCALARARRLSAAAGPGAREWVGRLRGMRVGHASTLGWGERAAEEGGVAQIDKERLGRRMARGGE

SEQ ID NO: 59903 - protein, 61 aa, Zea mays
  Coding DNA Sequence Number=SeqID_18124
MEAELAVVEAIAAFHEGVGEVECVGELGLKETSEAEAQLHHQHPRWAPMVAGLAQLKVSYS

SEQ ID NO: 59904 - protein, 119 aa, Zea mays
  Coding DNA Sequence Number=SeqID_18125
  Homolog annotation: Hit_ID=Q6YXT2; Match level="QueryCoverage=40%, HitCoverage=9%, E-value=2e-07, Identity=59%"; Hit description =Calmodulin-binding protein family-like
MEVVVIGSGWWSSDACPSAVVAPRTLLWLMSNDVRDTIHRSAHRRCPSTSISTDLGRGRGGSSSGGESGGGTGGADLGRGRGGISSMGERGGGSERARGCGWSGGRGHRGRRSRMGVWR

SEQ ID NO: 59905 - protein, 74 aa, Zea mays
  Coding DNA Sequence Number=SeqID_18126
MGELLMECADARKKADLGPGGSLDIWKFFRSLVKKATTSKPLGAIKGSPRRPLMVPSTTLRDSATTPFNDLREI

SEQ ID NO: 59906 - protein, 147 aa, Zea mays
  Coding DNA Sequence Number=SeqID_18127
MRYSCVDCLYGALLGILIVYSVSYASRFDSLHYAPHRQLDKPRKEARQTLRYRVHGRRSRRLRYLKPGVKKKTCKVKSLALEVIPGEANKSKKNKDKEKKMKNISSTLDQRTTARTPRRRSVKARTARTLGGGYLLLQQWHLSIKLK

SEQ ID NO: 59907 - protein, 263 aa, Zea mays
  Coding DNA Sequence Number=SeqID_18128
  Gene Ontology: Mol. function=nucleoside-triphosphatase activity; Cellular component=signal recognition particle, endoplasmic reticulum targeting; Biological process=SRP-dependent cotranslational protein targeting to membrane
  Homolog annotation: Hit_ID=Q6UCJ1; Match level="QueryCoverage=99%, HitCoverage=95%, E-value=1e-122, Identity=80%"; Hit description =Signal recognition particle receptor protein
  Pfam annotation: Domain name=SRP54; Domain location=91-263; Score =179.8; E_value=6.5e-51; Accession=PF00448.13; Description=SRP54-type protein, GTPase domain
ISGNNVLEKSDLQPALKALKDRLMAKNVAEEIAEKLCESVAASLEGKKLGSFTRISSTVQTAMEDALLRILTPRRSIDILRDVHAAKERGRPYVIVFVGVNGVGKSTNLAKHNLSVTLAACDTFRSGAVEQLRTHARRLQIPIFEKGYEKDPAVVAREAIQEATRNKSDVVLVDTAGRMQDNEPLMRALSKLINLNSPDLVLFVGEALVGNDAVDQLTKFNQVGAALSMVYISGAPVMFVGCGQSYTDLKKLNVKSIVKTLLK

SEQ ID NO: 59908 - protein, 364 aa, Zea mays
  Coding DNA Sequence Number=SeqID_18129
  Gene Ontology: Cellular component=integral to membrane
  Homolog annotation: Hit_ID=Q9M2D2; Match level="QueryCoverage=76%, HitCoverage=79%, E-value=8e-79, Identity=48%"; Hit description =UPF0187 protein At3g61320, chloroplast precursor
  Pfam annotation: Domain name=UPF0187; Domain location=74-340; Score =274.5; E_value=2.1e-79; Accession=PF05249.2; Description =Uncharacterised protein family (UPF0187)
  Subcellular localization annotation: CTP_CleavageSite=30; ConfidenceScore=5.29e-01
MAAPSPKPPTPRGRCHHPPNATRRLHVATRCFPDPPPPPASMPPIPSPNPVLSLLSAVPDWADAIQERRVRDRRPLYDHATWRHHRSSRRHLRHLLTSLSSRAILSLAPPVSAFTAFAAAIATYNTLLPAYALTASSLPYELTAPALALLLVFRTEASYARFDEGRKAWMRCHIICDSDVKGDLEGLLGEDDLSVVLASKHRPRCIIEFIAQSLQMLDLDEQKRSIMVSKLSCFLEGIGVCEQLMGIPIPLAYTRLTSRFLVLWHLTLPIILWEECKWIVVPATFISAASLFCIEEVGVLIEEPFPMLALDALCKQLHDGIKDVMEMQNSVHSRLVAKTATDHRGSRRENNGWPSSKREGAKID

SEQ ID NO: 59909 - protein, 136 aa, Zea mays
  Coding DNA Sequence Number=SeqID_18130
  Gene Ontology: Mol. function=heat shock protein binding; Cellular component=membrane; Biological process=protein folding
  Homolog annotation: Hit_ID=O65160; Match level="QueryCoverage=83%, HitCoverage=24%, E-value=3e-22, Identity=51%"; Hit description=DnaJ -related protein ZMDJ1
MESCELCLLSKLVRMDGDSSQELHEISCGHHFHCTCIDKYLYIIATCPRAIGIMQSVKKGWVKVTDYNSYQTGRFKAINDDGMSIMKGKLYIHFTVKFPDSLVLEQCKALESVLPPKLSSNLIDMEIDECEETTMH

SEQ ID NO: 59910 - protein, 157 aa, Zea mays
  Coding DNA Sequence Number=SeqID_18131
  Gene Ontology: Biological process=regulation of transcription
  Homolog annotation: Hit_ID=Q53MB4; Match level="QueryCoverage=60%, HitCoverage=20%, E-value=7e-15, Identity=42%"; Hit description =SCARECROW gene regulator, putative
MPFLFDTSFLARAVAASNRPSAVDLLGKIWGDTTQRLAHCFAEGLEARLAGMGTPAAHGGDEKLLVVGGRKKVHIVDYGDHYYGFQWPSLLGYWGSLEAGPPEVRSSLGHHLRAAHGHHRRAAHGHHPRAPPPPPGLLLAGRAAEGDGARARAGTGH

SEQ ID NO: 59911 - protein, 217 aa, Zea mays
  Coding DNA Sequence Number=SeqID_18132
  Gene Ontology: Mol. function=DNA binding; Cellular component =mitochondrion; Biological process=DNA integration
  Homolog annotation: Hit_ID=UPI00004C1731; Match level="QueryCoverage =89%, HitCoverage=13%, E-value=1e-102, Identity=93%"; Hit description= UPI00004C1731 related cluster
  Pfam annotation: Domain name=rve; Domain location=2-128; Score=19.7; E_value=0.00013; Accession=PF00665.16; Description=Integrase core domain
MRGIQLTKKLTTPAVALGCYTFFTNIIHRFGVPNSIITDNDTQFTGRKFLDFCEDHHIRVDWDVVAHPMTNGQVERANGMILQGLKPRIYNELNKFGKRWMKELPSVVWSLRTTPSRATGFTPFFLVYGVEAILPTDLEYGSPRTRAYADQSNQASREDSLDQLEEARDLALLHLARYQQSLRRYHARRVRSRDLQVGDLVLRLRQDTRGRHKLTPH

SEQ ID NO: 59912 - protein, 131 aa, Zea mays
  Coding DNA Sequence Number=SeqID_18133
MDDLGAAPPEPSLCTGRASSSRDLQAIGVVTGSYWVPAPGARGPGISVPVPGHHRAPPPWVLTLLGAGRADGHGHRRRRRLAKARQRPVRAGKRGMKNGPVRLFSDERLGSGNAYLFGWGICDRGSGNRGS

SEQ ID NO: 59913 - protein, 131 aa, Zea mays
  Coding DNA Sequence Number=SeqID_18134
MDDLGAAPPEPSLCTGRASSSRDLQVIGVVTGSYWVPAPGAPGPGISVPVPGHHRAPPPWVLTLLGAGRADGHGHRRRRRLAKARQRPVRAGKRGMKNGPVRLFSDERLGSGNAYLFGWGICDRGSGNRGS

SEQ ID NO: 59914 - protein, 86 aa, Zea mays
  Coding DNA Sequence Number=SeqID_18135
MARIGYGDRGFVARQTLRRAIRCSQDEDKPGRPLRRLQGIPEVNPDTQWRTGINICDKVTRVSWVITDRAVNLLGSNTSEEQSKIT

SEQ ID NO: 59915 - protein, 48 aa, Zea mays
  Coding DNA Sequence Number=SeqID_18136
MVISPPCTSQPDPFSAPLRGGDGWRLKKTSTESMMSGSKAMAPVLQMD

SEQ ID NO: 59916 - protein, 111 aa, Zea mays
  Coding DNA Sequence Number=SeqID_18137
MAQSLDPGWKFGFCPNPANKDMVQCMFLQEDCPYRNQKRSAQRTPEVVRKEMASHLKKNVRNAIVQLENEWEGEEEQVQQDDAQEANPTRSYRTKGKQARKKIVLLLLVPL

SEQ ID NO: 59917 - protein, 219 aa, Zea mays
  Coding DNA Sequence Number=SeqID_18138
  Gene Ontology: Mol. function=oxidoreductase activity; Cellular component=cytoplasm; Biological process=ethylene biosynthetic process
  Homolog annotation: Hit_ID=Q5QLC8; Match level="QueryCoverage=94%, HitCoverage=56%, E-value=4e-83, Identity=72%"; Hit description =Putative anthocyanidin synthase
  Pfam annotation: Domain name=2OG-FeII_Oxy; Domain location=62-163; Score=143.2; E_value=7.1e-40; Accession=PF03171.10; Description=2OG -Fe(II) oxygenase superfamily
MPREPQRNACSWSRIPKLWGEVSEEYGREVVRLCELLMRVMSVSLGLDEAHLQRAFGGAGCCGATLRANYYPRCPQPDLTLGLSAHSDPGVLTALLADEHVRGLQVRRSAGDWVDVRPVRDAFIVNVGDQVQIMSNSVYKSVEHRVVVNAEEERISLAIFYNPKGDVPISPAPELVTAAKLPPLYPTMTFDEYRLYVRSKGARGKAQIEALKGQASPEN

SEQ ID NO: 59918 - protein, 262 aa, Zea mays
  Coding DNA Sequence Number=SeqID_18139
  Homolog annotation: Hit_ID=Q5QLC2; Match level="QueryCoverage=74%, HitCoverage=86%, E-value=3e-62, Identity=64%"; Hit description =Homoserine dehydrogenase-like
  Subcellular localization annotation: CTP_CleavageSite=47; ConfidenceScore=5.57e-01
MQALGLGRGCSPLHASHCRCTASSYPPAPPRPRNRNITRLTCIAAVRASAAQSAQMERRQEAKVVKLRAVEATPESFASFGQVIGASPDGDEFGPHDAQLDLSPRHPKVNPLYPRTKSNSDRVILTSPDRDLSFALPSLRYRFYIMRLQNRPLKFSTITHHASVTQCLGSVGGQDWYLGVAKPSIVDGASEQSGPEGRKFLQSAAGHYYLPPDPAEVCVFRVSGPKFLKLNKGTWHAGPLFKADAVDFYNLELSNTNVSANC

SEQ ID NO: 59919 - protein, 1117 aa, Zea mays
  Coding DNA Sequence Number=SeqID_18140
  Gene Ontology: Mol. function=protein binding; Biological process =lipid metabolic process
  Homolog annotation: Hit_ID=Q69VY8; Match level="QueryCoverage=94%, HitCoverage=79%, E-value=0.0, Identity=70%"; Hit description =Putative calcium-independent phospholipase A2
  Pfam annotation: Domain name=LRR_1; Domain location=121-141; Score =0.8; E_value=2e+02; Accession=PF00560.23; Description=Leucine Rich Repeat
  Pfam annotation: Domain name=LRR_1; Domain location=29-50; Score =14.3; E_value=0.46; Accession=PF00560.23; Description=Leucine Rich Repeat
  Pfam annotation: Domain name=LRR_1; Domain location=52-74; Score=8.4; E_value=7.5; Accession=PF00560.23; Description=Leucine Rich Repeat
  Pfam annotation: Domain name=LRR_1; Domain location=76-97; Score=9.4; E_value=5; Accession=PF00560.23; Description=Leucine Rich Repeat
  Pfam annotation: Domain name=LRR_1; Domain location=99-119; Score =10.5; E_value=3; Accession=PF00560.23; Description=Leucine Rich Repeat
  Pfam annotation: Domain name=Patatin; Domain location=285-551; Score =154.2; E_value=3.4e-43; Accession=PF01734.12; Description=Patatin -like phospholipase
  Pfam module annotation: Pfam domain module=LRR_1::LRR_1::LRR_1::LRR _1::LRR_1::Patatin; Domain location=121-141::29-50::52-74::76-97::99 -119::285-551
MGRDINQANHELLHNFWQMLPVELTRLQFLEKLYLDNNKLSVLPPEVGALKNMKVLSFNNNMLVSVPAVELRQCVMLEELSLEHNKLVRPLLDFRSMPKLRILRLFGNPLEFLPEILPLHNLRHVTLANIRIEAVESLKSVTVQIEVEQACLAISSLASDISSAMQLIKCDIMKPIEAVLKSSDEEELVSVLQVVVTLTFVSDHVAQKVQRLSLFAIGNLAFCLETRRILMHSESMCDLLIRLTISQECRVSKAAARALAILGENENLRRAIRGRPVAKKGLRILSMDGGGMKGLATVQMLKQIEQGTGKRIHEMFDLICGTSTGGMLAMALGIKQMTLDQCEEIYTKLGDSLLPFEVSLPMPMLPTELLIFLGKLVFTEPIPKDEAATWKEKIDQLFKSSSQSFRVVVHGSKHSADQFERLLKEMCENEDGDLLIESAVKGIPKVFAVSTLVSVIPAQPYIFRNYQYPPGTLEVSPGMAESPSIGAIGTAVSGAPVGIKRGAFMGSCKHRVWEAIRASSAAPYYLDDFSVDANRWQDGAIVANNPTIFAIREAQLLWPDARIDCLVSIGCGSVPTKSRRGGWRYLDTGQVLIESACSVERVEETLDTLIPMLPEMQYFRFNPVDERCGMELDETDPTIWLKLEAATDEYIQKNFLSVKNLCELLVPRYQEEEKPSDIYKSLSFSRLTSLNQGFSESNPILGWRRVVLLVEASFSPDFGKKINHARSLESFCSQNGIRLALMNSTSGFGKPATALPTPITSPLFTGSFPSSPLLYSPEGTQRISRIDLVPPLSLDGHPTTKSSPPTSPLKSRQPSAHVRSLYDKLQNMPQVGVIHLALQNDSTGSVLSWQNDVFVVAEPGELADRFLQSVKTILSTLLRGCNRKGAYSLSKISCLSELVAEWPSFEIGGIHHRYIGRQTQVMEDNQEIGAYMFRRTVPAVHMAPEDVRWMVGAWRERIIICSGKYGLAHGLVKAFMDCGAKAVISSSIEPPDSKTIVYHGMDVNRSLENGKFVIRDEEADESEPEPVSPISDWEDSDVEKGGNHDVDDEEYLAQFMCLMYDKLFREGCDCGYGSAASTPLTSQVEVQLPLTQRFVVRDIIDKPYISIAKWTWITGNE

SEQ ID NO: 59920 - protein, 188 aa, Zea mays
  Coding DNA Sequence Number=SeqID_18141
  Gene Ontology: Mol. function=protein binding; Biological process =lipid metabolic process
  Homolog annotation: Hit_ID=Q69VY8; Match level="QueryCoverage=97%, HitCoverage=13%, E-value=2e-49, Identity=57%"; Hit description =Putative calcium-independent phospholipase A2
MSWGLAWKRSSEIFHLTLNYGDYDDNDDRQPSSPPPPASSSPPASASSTPVYSSSPIATRNGDLGFRIELDWSAGDDEDQVALRLQSQLMVALPPPHDAVSVDLTPRDHGEEEGVRIEMRVVRRREALRSVRVSRAPGSALGSGDGAGVLARLIRSNLAPAPAVDGPTAASGVPVLADHWRPITMGDV

SEQ ID NO: 59921 - protein, 887 aa, Zea mays
  Coding DNA Sequence Number=SeqID_18142
  Gene Ontology: Mol. function=GABA-B receptor activity; Cellular component=membrane; Biological process=ion transport
  Homolog annotation: Hit_ID=Q5QLP6; Match level="QueryCoverage=60%, HitCoverage=85%, E-value=0.0, Identity=77%"; Hit description =Putative ionotropic glutamate receptor homolog GLR4
  Pfam annotation: Domain name=ANF_receptor; Domain location=97-451; Score=329.7; E_value=4.9e-96; Accession=PF01094.18; Description =Receptor family ligand binding region
  Pfam annotation: Domain name=Lig_chan; Domain location=583-808; Score= 168.5; E_value=1.7e-47; Accession=PF00060.17; Description=Ligand -gated ion channel
  Pfam annotation: Domain name=SBP_bac_3; Domain location=515-767; Score=-27.0; E_value=2.8e-06; Accession=PF00497.10; Description =Bacterial extracellular solute-binding proteins, family 3
  Pfam module annotation: Pfam domain module=ANF_receptor::Lig _chan::SBP_bac_3; Domain location=97-451::583-808::515-767
  Subcellular localization annotation: CTP_CleavageSite=45; ConfidenceScore=5.17e-01
MSSSGFLYATSCPPFHALRTTYKLKNLFGHQIKVVGKTGTLFLVLGKMGSAHFAALLLCACLFVSGTVAADQNGNLTRPAEVRIGALFTFGSVIGMAVRPAIELAVADVNADPSLLWGTKLSVLMQDTNCSGFVGTIEALQLLAKDVVAVLGPQSSAVAHVISHAVNELHVPLISFAATDPTLSSLEYPYFVRATQSDYYQMGAIAAIISQYEWKQVIAIYVDDDYGRGGITALGDALAKRKCKISYKAKLPPGAAKTTIEDILMQVNDMESRVYVIHVNPDSGLNVFSAAKSLGMMSSGYVWIATDWLSAVIDSSVHGIPDVMELTQGVLVLRQHIADSDIQHAFLSKWNNLTRNGSSYFMHAYDSVWLVAHAVERFLREGNAMSFSADPKLQAKKGSSLQLDSLRIFNSGDKLLEKVWSANFSGVSGPVQFTLDRDLVHPAYDILNIGGTGLRTIGYWSNSSGLSAVAPENLSSSARDSSANNVQLRGVIWPGQTSEKPRGWVFSHHGMPMRIGVPLRTSYKEFVMQDDGPDGVKGFAVDVFKAAISLLPYPVSCKFVLFGDGLKNPSYSELVQKYFDAAVGDIAIVTNRTRLVDFTQPYIESGENTVSALGRFVLLIWLFAVLIINSSYTANLTSLLTVQELTSGIQGLDSLISSSSAIGYQVGSFSRNYLVDELSIAESRLVALNSPSDYARALELGSGNGGVAAIIDELPYVEIFLSKYCKFKTVGQAFPRDSPLAEDLSTAILALSENGKLQKMHDEWLSGTECSADNGAGPSNSLSLSSFWGLFLICGLACFLALVIFFLRIFCQYSRYSNQVEAQFAEPRVLNRPARLTTIKSLISFVDKKEEEVKNALKKRPNGTACPEAGSGLSLKFQPVRPPARPA

SEQ ID NO: 59922 - protein, 223 aa, Zea mays
  Coding DNA Sequence Number=SeqID_18143
MTLELGTQQSCAAIACNTLLFLRLQSHYLYLYVRKLTSRQPSHLAETDHALRRHRARPWRGRHGQGRHNGHHRLAHDKGAGLHQGGGAAGSRAAAGAPPLRRQGGPVSVPCGATTPRKLMLRKSSSDVSSSSSSNRTGRVGTEEACKPRRASRTNTFDSPMLRPDGGALVDRAPSAGRAKKKGTSVGVHGGGVQVVDVKCGNPMSMSSRLRKLGFSKLSQTFA

SEQ ID NO: 59923 - protein, 74 aa, Zea mays
  Coding DNA Sequence Number=SeqID_18144
MAFFYLGLVCTGSSTRERGMGAQGQGGRRGAAVTGWCGTARLGRGRLWRAGLDAVGGEIRVARWAVYKTDRFWQ

SEQ ID NO: 59924 - protein, 120 aa, Zea mays
  Coding DNA Sequence Number=SeqID_18145
  Subcellular localization annotation: CTP_CleavageSite=58; ConfidenceScore=5.08e-01
MSGVHRTVQCAIEATDTSAPTATCSTLNARQRAQKSETPMLAHRTLYSACPVRHRTSRRAQKTELQRSEPNGFGDVAGAPDTGPALRVCRVCDRSGPPRLVGPPFVQIMSKYIYVTENLL

SEQ ID NO: 59925 - protein, 89 aa, Zea mays
  Coding DNA Sequence Number=SeqID_18146
MAECTVAEEAREAARMRWPEEGGGTGMWRPDMNSNGRWEGMKMQGVNEEVPLYLHRLLLLCSARHGSEGERNVSQRLMYNVDSRSDDRT

SEQ ID NO: 59926 - protein, 194 aa, Zea mays
  Coding DNA Sequence Number=SeqID_18147
MAARRWILSHGDEFPRLRVVAPPLGCPRNLHRAPAKLPSTNRSPDGSVGVNFVLRRGWVKTLRSPLQQMGEEDARHSYLKAQGQGPRGASTGYPHDPARWFMAEFAARKSATPFARLRLTRGWESGAGPRDPTDNDQGHDRQRGPRQAVGARTGPPMPKSSASVARDSGFHGEESFWRGFGKEISLMHGVHTAE

SEQ ID NO: 59927 - protein, 37 aa, Zea mays
  Coding DNA Sequence Number=SeqID_18148
MGILRSVMSLQRCTYVYVTRSCIMGNWAVIEFSADLK

SEQ ID NO: 59928 - protein, 49 aa, Zea mays
  Coding DNA Sequence Number=SeqID_18149
MELTKYSELLDKAYECYRYLNYDSTTCITLWCIKHWCHMLAVRIHISKF

SEQ ID NO: 59929 - protein, 85 aa, Zea mays
  Coding DNA Sequence Number=SeqID_18150
  Subcellular localization annotation: CTP_CleavageSite=51; ConfidenceScore=5.07e-01
MAPSGGVKRCSRFQFMGRSDSTDPLLVNRVAQQPVPSLAAEKRNSGETQPVCAMAWIGNLTGRAHTANAHAPVFTVWAARTVRKG

SEQ ID NO: 59930 - protein, 194 aa, Zea mays
  Coding DNA Sequence Number=SeqID_18151
  Gene Ontology: Mol. function=nucleotide binding; Cellular component =intracellular; Biological process=protein transport
  Homolog annotation: Hit_ID=Q6ASS4; Match level="QueryCoverage=98%, HitCoverage=99%, E-value=9e-69, Identity=67%"; Hit description=SNF7 family protein
  Pfam annotation: Domain name=Snf7; Domain location=16-151; Score =57.7; E_value=3.7e-14; Accession=PF03357.11; Description=Snf7
MNIFKKKVDPKEALRTSKREMAVATRGVEREIGSLQMEEKKLVAEIKKTAKTGNEAMYAGTSISAGMKGASKAMSAMNKQMEPAKQIKVMKEFQKQSTQLDMTLEMMSDAIDETLDKDEAEEETEELTNQVLDEIGVDVASQLSSAPKGRIGATNKKVDNGQARPARNVAAPALEPSSAEVEDLERRLASLRRT

SEQ ID NO: 59931 - protein, 125 aa, Zea mays
  Coding DNA Sequence Number=SeqID_18152
  Homolog annotation: Hit_ID=Q9LVP5; Match level="QueryCoverage=65%, HitCoverage=69%, E-value=1e-25, Identity=65%"; Hit description =Arabidopsis thaliana genomic DNA, chromosome 3, P1 clone: MXE2
MKYLPPAPDNGIGVNVRIGEVNLLEGSSLAAPDNEELAAGMGRLQDSNAVLTHFNEYSERCFVEVSGDFASKTRLLKSMKADLDHIFTKLREMKARLAATYPDAFPNGAMSKTMDQRPDLESPLD

SEQ ID NO: 59932 - protein, 141 aa, Zea mays
  Coding DNA Sequence Number=SeqID_18153
  Gene Ontology: Biological process=lipid metabolic process
  Homolog annotation: Hit_ID=Q6ASS6; Match level="QueryCoverage=99%, HitCoverage=32%, E-value=5e-25, Identity=48%"; Hit description =Patatin-like phospholipase domain containing protein
MGLGVDKLSYEIFSLMKSEFLFGAGSGCLSPGPCTPAQVLLGGGRVRVLEIDGCGAGTKDALLAAAALARLEAGLRDHAGDPDARVADFFDLAAGAGAHGVLAAMLFLRRADCRSRYTADDVLAFVSGSVGDKRGWRGRRR

SEQ ID NO: 59933 - protein, 93 aa, Zea mays
  Coding DNA Sequence Number=SeqID_18154
  Gene Ontology: Mol. function=protein binding; Cellular component =nucleus; Biological process=regulation of transcription, DNA -dependent
  Homolog annotation: Hit_ID=Q8W514; Match level="QueryCoverage=90%, HitCoverage=28%, E-value=1e-30, Identity=57%"; Hit description=MSI type nucleosome/chromatin assembly factor C
MPKAGSGVADEEDFRAEWLPERTEPPGKDHWVQKMILGTHTSDNEPNYLMLAQVQLPHEDTEADVRHYDDEHSDNGLFGAATGEVDFPTPPFP

SEQ ID NO: 59934 - protein, 86 aa, Zea mays
  Coding DNA Sequence Number=SeqID_18155
MAKTTLIDREVFVVSLSSNLVEKDLYIKYMGTRTCELEEQVEIRDNTIEVLGNLLHDLQVELYEASAHMEMAWRWMRTMRRSTLRS

SEQ ID NO: 59935 - protein, 149 aa, Zea mays
  Coding DNA Sequence Number=SeqID_18156
MAREQARHGLGEQRGAARDASRGRRRGRASQGAPRAGRWSWGEAPRAREMEIEDDGTMDERQGRIRLGAVGGREDRHRECVRREEDAGAKISHMRALTTFYGFHPLEMLMHPLGLFPTEREDDPMWHDRVRHAKHVWALHPEQAPRVAV

SEQ ID NO: 59936 - protein, 91 aa, Zea mays
  Coding DNA Sequence Number=SeqID_18157
MGRLEPRAEWESRLVVKVCDLCRVLETGVTLCECLNTITANGYNELVNLAISQEDYIIAHRIEKKRKVPMARPSTQPQRFRIVSKTHNKGP

SEQ ID NO: 59937 - protein, 69 aa, Zea mays
  Coding DNA Sequence Number=SeqID_18158
MHDLLLALGLLGHLGWLMGQEDELPGCPNTGTDFLHVDCSDGTAAAAAEETASGTSAGADVDADAGDLA

SEQ ID NO: 59938 - protein, 117 aa, Zea mays
  Coding DNA Sequence Number=SeqID_18159
MMLVDYTTGLLQQPGCPEVVQGASLAEVQGKVASQTPPPAEARRKSPAALAPSVGAPAPRAGDDAVSQTPPPAEARGKSPAALAPAPSVGPLAPRAGDDAVLPPRGKTRDQNYNHPC

SEQ ID NO: 59939 - protein, 61 aa, Zea mays
  Coding DNA Sequence Number=SeqID_18160
MWKYILSWLQMNLKLIVFFLEMLVLYQVLSAGTSVILSSIVSPGFVIHLNRRLEDNDFRDR

SEQ ID NO: 59940 - protein, 301 aa, Zea mays
  Coding DNA Sequence Number=SeqID_18161
  Homolog annotation: Hit_ID=Q10S07; Match level="QueryCoverage=88%, HitCoverage=70%, E-value=4e-80, Identity=56%"; Hit description=CCT motif family protein, expressed
  Pfam annotation: Domain name=CCT; Domain location=209-247; Score =77.8; E_value=3.3e-20; Accession=PF06203.4; Description=CCT motif
MAIPDALCIAFIKATPVTSRHHSHSLLREQHMLDAVLPQIDGLSEVAAYYPTATDEASIGQFEPDGTSRDLRRADYDECFMAAVAAGGFMGLDGAMYQQTGAVLPGCSADASQQEFFSSAGSNSMVMIGEYQKMMEGEGLTTTYDDTDSMQGTFNTNAEMQVGGNNQHLINGCNGNPATLPPTELSVLEDSTFKVVRLSPEERKEKIHRYIKKRNERNFRKKIKYACRKTLADSRPRVRGRFAKNDELCEAAQSGSQSHEHYEQTDHMKEEDMLDTSDILAQLNGLNPYNYKYKSTIESWI

SEQ ID NO: 59941 - protein, 70 aa, Zea mays
  Coding DNA Sequence Number=SeqID_18162
MRRRHLGLMSGKGRKTGGGGLVPGGDEAVGEKETRRDPRLPQAPNNISKRKYRHSGVNSDAEMKFYRPFC

SEQ ID NO: 59942 - protein, 509 aa, Zea mays
  Coding DNA Sequence Number=SeqID_18163
  Gene Ontology: Mol. function=nucleic acid binding; Biological process= protein amino acid phosphorylation
  Homolog annotation: Hit_ID=Q10S20; Match level="QueryCoverage=82%, HitCoverage=41%, E-value=3e-97, Identity=51%"; Hit description=RNA recognition motif family protein, expressed
  Pfam annotation: Domain name=RRM_1; Domain location=25-94; Score =20.7; E_value=0.0017; Accession=PF00076.12; Description=RNA recognition motif. (a.k.a. RRM, RBD, or
MNVTPKKAEETALISDVVADSPYKIFIAGIAGVISSKMLMEIVSAFGPLAAYRFLFNNELGGPCAFLEYADRSVTSKACAGLNGMMLGGRVLTAVHVFPNPHVEAANEASPFYGIPDNAKLLLKEPTKVLQLKNVFEREEYMLLSKSELEETLEDVRVECTSMDKIHRFGAVKSVNVVEYPAAGVSAAEENIVELKIECTEFSDTENIAKAVSEYSVPIIPSIDVLNHSVASDTKDVDLIPESQDQKDKHLPSNAALCESEAPVADEDAELDETQSRAALPTPQHAEADHTEAAVDENKHTGAGKVTATATDDDAVEKSHGDPRTSETCNPAGPTDKAEKPGRYSEQGAGDVTEDRPEKEAQAVGTSDTGFVFEPGSVLVEFLREEAACMAAHSLHGRRFGNRTVHAGYAPYDLYLQKYPRYNCDRRNIGYVYEELLKPNCGTDAVQEGGRYTLATWMLCSSETLVIMDLSSVPLPARASQALNAEKVTDTEGPDARIVSMLRTRLLVN

SEQ ID NO: 59943 - protein, 208 aa, Zea mays
  Coding DNA Sequence Number=SeqID_18164
  Homolog annotation: Hit_ID=Q8RU34; Match level="QueryCoverage=62%, HitCoverage=16%, E-value=2e-12, Identity=50%"; Hit description=Bzip transcription factor-like
  Pfam annotation: Domain name=DUF630; Domain location=85-134; Score =51.5; E_value=2.8e-12; Accession=PF04783.3; Description=Protein of unknown function (DUF630)
  Subcellular localization annotation: CTP_CleavageSite=12; ConfidenceScore=5.37e-01
MKQPGPDAACPAAVRPPSYNGRRRGTGARCIRTPLPPIPKVGFRPPARQWGARPPTTPSPPLSPPLIPRPRARRSSASEPSPRRGDPAALCRERVALIRAATDRRYALAAAHAAYFRSLAVVGDALRRFVASAPAPATPGSSPVLTLPPSPAKLVATASASLPPWPSSTVSPLSHSLAEKRPPLLTAALESDFGSALTRVNAAYGTLP

SEQ ID NO: 59944 - protein, 165 aa, Zea mays
  Coding DNA Sequence Number=SeqID_18165
  Homolog annotation: Hit_ID=Q6Z156; Match level="QueryCoverage=43%, HitCoverage=16%, E-value=1e-22, Identity=72%"; Hit description =Putative CDPK substrate protein 1
MSATRSRHSAAGSPRRGEGSDADERRARGRGIRGGDSGGDGVVGGRAPHCRAGGRNPTFGIGGRGVRIQRAPIQRSLQLRIEEQGKCLQMMLEQQCIPGAEKAQDASTAADELRSPSEIPESSTVKEVPENSQNGSTKQTSLNQVVFVLPWEQMNAIVNFLAKPG

SEQ ID NO: 59945 - protein, 359 aa, Zea mays
  Coding DNA Sequence Number=SeqID_18166
  Gene Ontology: Mol. function=oxidoreductase activity, acting on single donors with incorporation of molecular oxygen, incorporation of two atoms of oxygen; Cellular component=chloroplast; Biological process=abscisic ...
  Gene Ontology: Biological process=acid biosynthetic process
  Homolog annotation: Hit_ID=Q45VT7; Match level="QueryCoverage=98%, HitCoverage=61%, E-value=0.0, Identity=94%"; Hit description=9, 10-9', 10' carotenoid cleavage dioxygenase 1
  Pfam annotation: Domain name=RPE65; Domain location=1-359; Score =288.5; E_value=1.2e-83; Accession=PF03055.6; Description=Retinal pigment epithelial membrane protein
IGDLKGFFGLFMVQMQQLRKKFKVLDFTYGFGTANTALIYHHGKLMALSEADKPYYTSIAAIMLMQNMCSTFSDVVKVLEDGDLQTLGLLDYDKRLKHSFTAHPKVDPFTDEMFTFGYSHEPPYCTYRVINKEGAMLDPVPITIPESVMMHDFAITENYSIFMDLPLLFRPKEMVKNGEFIYKFDPTKKGRFGILPRYAKDDKLIRWFQLPNCFIFHNANAWEEGDEVVLITCRLENPDLDKVNGYQSDKLENFGNELYEMRFNMKTGAASQKQLSVSAVDFPRVNESYTGRKQRYVYCTILDSIAKVTGIIKFDLHAEPESGVKELEVGGNVQGIYDLGPGRFGSEAIFVPKHPGNLK

SEQ ID NO: 59946 - protein, 664 aa, Zea mays
  Coding DNA Sequence Number=SeqID_18167
  Gene Ontology: Mol. function=glutamate-tRNA ligase activity; Cellular component=cytoplasm; Biological process=tRNA aminoacylation for protein translation
  Homolog annotation: Hit_ID=Q8S5M6; Match level="QueryCoverage=99%, HitCoverage=100%, E-value=0.0, Identity=81%"; Hit description =Putative glutamyl-tRNA synthetase
  Pfam annotation: Domain name=tRNA-synt_1c; Domain location=207-512; Score=442.2; E_value=7.1e-130; Accession=PF00749.11; Description =tRNA synthetases class I (E and Q), catalytic domain
  Pfam annotation: Domain name=tRNA-synt_1c_C; Domain location=514-639; Score=98.6; E_value=1.9e-26; Accession=PF03950.8; Description=tRNA synthetases class I (E and Q), anti-codon binding domain
  Pfam module annotation: Pfam domain module=tRNA-synt_1c::tRNA-synt_1c_ C; Domain location=207-512::514-639
MEATLAFSQDSPPISIICAAKFVGLPLTIDPSLASGLAPTLRFASGESLHGVNPILLYIASGATIPCFSGKNDIEFGHVVEWLEYVPIFLSGSEFENACLFVDGFLASRTFLVGHGLTIADIVVWSNLAGIGQRWESLRKSKKYQNLVRWFNSIDSEYSDTLNEVLAAYVGKRGIGKSPAPSLKEKVHVSKDPSAPEVDLPGAKVGKVCVRFAPEPSGYLHIGHAKAGLLNKYFAERYQGRLIVRFDDTNPSKESNEFVENVLKDIETLGIKYDAVTYTSDYFPKLMEMAGSLIKQGKAYIDDTPKEQMRKERMDGIESRCRNSTVEENLSLWNEMVNGTERGMQCCVRGKLDMQDPNKSLRDPVYYRCNIDPHHRVGSKYKVYPTYDFACPFVDALEGVTHALRSSEYHDRNAQYYRILQDMGLRRVEIYEFSRLNMVYTLLSKRKLLWFVQNKKVEDWTDPRFPTVQGIVRRGLKIEALIQFILQQGASKNLNLMEWDKLWTINKKIIDPLCARHTAVLKDQRVIFTLTNGPEKPFVRILPRHKKFVGAGKKATTFANRIWLDYADAAAISKGEEVTLMDWGNAIVKEIKLEEDDDFLENLNPCTRRENPALGDANMMNLKRGEIIQLERKGYYRCDAPFIRSLKPVVLFAIPDGRQQALLN

SEQ ID NO: 59947 - protein, 198 aa, Zea mays
  Coding DNA Sequence Number=SeqID_18168
  Gene Ontology: Mol. function=isomerase activity; Cellular component =chloroplast
  Homolog annotation: Hit_ID=Q6RW09; Match level="QueryCoverage=99%, HitCoverage=100%, E-value=1e-94, Identity=77%"; Hit description =Allene oxide cyclase
  Pfam annotation: Domain name=Allene_ox_cyc; Domain location=17-198; Score=296.0; E_value=6.8e-86; Accession=PF06351.2; Description =Allene oxide cyclase
  Subcellular localization annotation: CTP_CleavageSite=47; ConfidenceScore=5.73e-01
MAAALRCPASVRVSGPAAAGLAKVRQASRVVAVSGARQSRGGGVAVRASLFSPKPAAAKDARPTKVYNGSLDKRLGVTAGICVLIQHVPDRNGDRYEAIYSFYFGDYGHISVQGPYLTYEESYLAVTGGSGVFEGVYGQVKLNQIVFPFKIFYTFYLRGIPDLPRDLLCTPVPPSPTVEPTPAARAAEPHASLDNYTN

SEQ ID NO: 59948 - protein, 76 aa, Zea mays
  Coding DNA Sequence Number=SeqID_18169
MFLLLLERPVKKPVKDYMSARENNRHVMLFLHESEKPVKSTTVVEQVDEYVDTRDEMPAATYQSMEIEKDAEVFSL

SEQ ID NO: 59949 - protein, 113 aa, Zea mays
  Coding DNA Sequence Number=SeqID_18170
  Homolog annotation: Hit_ID=Q6Q625; Match level="QueryCoverage=51%, HitCoverage=18%, E-value=6e-11, Identity=64%"; Hit description =Putative root hair defective 3
MVSFEKSKVVAAVSMQDLEQKEVGGAGTEHATDKKGYLVRLPTILSLSTKFVPSIMNILKRLADAGQEPATAPERQREMKIQPKSTRNSSSYSKLLAGNLLQELRKIGCLKNI

SEQ ID NO: 59950 - protein, 39 aa, Zea mays
  Coding DNA Sequence Number=SeqID_18171
MPTYGMPPSDFALPNANVGASTSASITIPYDTTRFSCRT

SEQ ID NO: 59951 - protein, 133 aa, Zea mays
  Coding DNA Sequence Number=SeqID_18172
MSHRRQGGRPRRGSRGLGKDSGRIQGDMENSTVGTTPTREAPKGAEHGGVAQRRCVSTLARNYADTRAVTGEIRAWEGCSPRVQTQGRLSDGGDKGKPRVDGGGLRLHGEVSSERGPGEIKGFGGGPRGVPSW

SEQ ID NO: 59952 - protein, 110 aa, Zea mays
  Coding DNA Sequence Number=SeqID_18173
MEIVHKFLQCDGFRVDMGGKATVASELALEVEVGVAAAAPAALLLRNICSIVIGVAVATTAELPPPGVPANPAEHTFHLCSYSQTSVESTHTSDLTLQSFSIRKDIWKSS

SEQ ID NO: 59953 - protein, 60 aa, Zea mays
  Coding DNA Sequence Number=SeqID_18174
MMLHMGWEVFKRKRLDGGSIMAVMDSTSEKMYLCQIPNWVLIDLDRRYFSDMKTWSLTYT

SEQ ID NO: 59954 - protein, 274 aa, Zea mays
  Coding DNA Sequence Number=SeqID_18175
  Homolog annotation: Hit_ID=Q10ED5; Match level="QueryCoverage=97%, HitCoverage=99%, E-value=4e-85, Identity=59%"; Hit description =Expressed protein
MTLGSAAHKIPLEVAHTLVEIAEVARYAYHHRPGRPATHEGDPTAPPAGADSSGGTNEDAARLLEENAMLRARLADDLALLRELHGAPCVSKECPPDLYNRLMAAVNNVSFLAHLEKLQDESARQLNELTSGDMTEVEAADIPDKAGNGKKGLWVLVPCDTAGANLEEISGIDDENYVIVNEDDIVDGIAAFVARCILEDPKSKFSDYLMISVAKALDSMKARWRWSTFWEAGQIIYILATWGITLAGLYKSRHVLKVAAKGAAVSARFVMKAI

SEQ ID NO: 59955 - protein, 48 aa, Zea mays
  Coding DNA Sequence Number=SeqID_18176
MELDAITKDRAHGAMEGHEGAPDKLAIVEEDVHNDNVELGGAGGTKGI

SEQ ID NO: 59956 - protein, 113 aa, Zea mays
  Coding DNA Sequence Number=SeqID_18177
  Gene Ontology: Mol. function=GTPase activity; Biological process =immune response
  Homolog annotation: Hit_ID=Q10M62; Match level="QueryCoverage=79%, HitCoverage=11%, E-value=1e-21, Identity=59%"; Hit description =Expressed protein
MKVPNHDELAGIDNAKQSLCMIKSLLTEKQNEEEIEQRRELKDAIEIKLREEAMISRVLKEKLVSKELGIEQLQSDLAASVRFQVVLQNEIQRFQNELRCLTKVQALGSSGER

SEQ ID NO: 59957 - protein, 220 aa, Zea mays
  Coding DNA Sequence Number=SeqID_18178
  Gene Ontology: Mol. function=hydrolase activity; Cellular component =cytoplasm; Biological process=tRNA modification
  Homolog annotation: Hit_ID=Q10M63; Match level="QueryCoverage=86%, HitCoverage=97%, E-value=2e-70, Identity=82%"; Hit description =Cytidine and deoxycytidylate deaminase zinc-binding region family protein, expressed
  Pfam annotation: Domain name=dCMP_cyt_deam_1; Domain location=1-95; Score=19.3; E_value=8.1e-06; Accession=PF00383.13; Description =Cytidine and deoxycytidylate deaminas
MAPAFMELALEQAKFALDNLEVPVGCVIVEDGKVISSGSNKTNATRNATRHAEMEAIDVLLREWQSMGLDQPQVAEKFAGCDLYVTWIREVYFGCANDKFGGCGSIMSLHNGAASSSDELSGMLQDAIMISAKLDLLDLSVFDAFGAKPLHQKVSNALEGSWLKKQLLFLGVSTNKETQMPQGLTDQYECLNNNWFVFLDYNHNAKTSGVQTYKLTVKLV

SEQ ID NO: 59958 - protein, 39 aa, Zea mays
  Coding DNA Sequence Number=SeqID_18179
MEPLELFFAMFQMKLVVILFYLVILLFAMAFSGRAPSSF

SEQ ID NO: 59959 - protein, 248 aa, Zea mays
  Coding DNA Sequence Number=SeqID_18180
  Gene Ontology: Cellular component=integral to membrane
  Homolog annotation: Hit_ID=Q53RC1; Match level="QueryCoverage=80%, HitCoverage=81%, E-value=2e-71, Identity=62%"; Hit description =GNS1/SUR4 family
  Pfam annotation: Domain name=ELO; Domain location=4-248; Score=-26.2; E_value=1e-09; Accession=PF01151.9; Description=GNS1SUR4 family
  Subcellular localization annotation: CTP_CleavageSite=20; ConfidenceScore=5.15e-01
MAAASLLSRARWLLVEHPAVASFRWQPGRTVGATPSFAAAVICGYLAAVLVLRRLVLPRLPALPPPALRALSAAHNAVLLALSAAMAGGCALSTAATAPAPRCTSFGDTLLIMLARRPLTLLHVYHHALVVAMCYLWLATRQSLMPVALVTNAGVHVVMYSYYLSCSVGLRWPGRWKRAVTELQIAQFLFSFAASVVMLWLHFAAGGCEGMAGWVFNAVFNASLLALFLNFHGAAYKGAAKANKGKAE

SEQ ID NO: 59960 - protein, 169 aa, Zea mays
  Coding DNA Sequence Number=SeqID_18181
MSQHGHTTDQGMDRHAAYKMRRAAQRPYVRLRPPAHVTGSEPRGSIGSSPEQGAKVYWVWSGHVMAVDPRLALSKAWVFFFPKSRDPAESGLDHTLRGPGPIPGGSGTVPWGSKSIADTLECITFSGHVAAPEPSTWWGRVLLIACLEIDMLDWKMMVDLVPMEALRIP

SEQ ID NO: 59961 - protein, 148 aa, Zea mays
  Coding DNA Sequence Number=SeqID_18182
MFEEDHAYNWDEEEKTDANAPFGAEFVPIGNTTQLDMDDLTNSSSSLSSSPSTSKSTCYGAPTHFGGPWDVQGEQQVLTPGAVGVEYATPPDLDVDHDDDAPQRYRMLESVLVAENVPEQGGDVAIEELLIAIGEEPYLVDEALKITD

SEQ ID NO: 59962 - protein, 37 aa, Zea mays
  Coding DNA Sequence Number=SeqID_18183
MKPHSISPQGSDSACAPPASGGPSRRTPAAALLAVGG

SEQ ID NO: 59963 - protein, 567 aa, Zea mays
  Coding DNA Sequence Number=SeqID_18184
  Homolog annotation: Hit_ID=UPI00005A5C77; Match level="QueryCoverage =46%, HitCoverage=43%, E-value=4e-42, Identity=36%"; Hit description =PREDICTED: similar to CG6091-PA, isoform A isoform 5
  Pfam annotation: Domain name=OTU; Domain location=243-384; Score =111.4; E_value=2.7e-30; Accession=PF02338.9; Description=OTU-like cysteine protease
MTRIFVQRGTAGSSSSSGRSDTQPVQPAAAAREEELPLQPQPQLPELLAIDDTTDNLNEGSENISNKPLRTDDTISESSSSAEERAAREKPLKDDSNVINPTFLVEEPVGIQIPDQIEHENSVLSVTGSSQMAGAASHPPPPPAPPPKPLLGNNGLRRMGPGSSNSVRIGSSRRPVAWPLVAARTSASGSRPSSPRSLVDGEGYNSADEQGPCYALSYDDSERERMFDHDLRRVKGLEIRKMAEDGNCLFRAVADQVYGDAEAYDMARQMCVDYMVTRDIQGDIPWYMFLADDVVLVDESWIGERERDHFSQFITEIESFTLYCKRKRRDKVYGNNVEIQAFAEMYNRPIHIYSYSTEPINIFQGSYNTDVPPIRLSYHHGNHYNSVVDPRRQTVGAGLGFSSLRGTNNVDRDQVKAAIKAQQDQQIENALLAEGRFYSDLELTEREIERMVMESSRSEYLAKEKKLNIRESSTSRAEPSSSAAISGSSRSVAGADRGKEDYFVLPDTALTRSMQLLLAMGFSYIQVMEAYSIFGEDVDSMVCYLLETGGTGASAGGSNRRKGKAAE

SEQ ID NO: 59964 - protein, 289 aa, Zea mays
  Coding DNA Sequence Number=SeqID_18185
  Homolog annotation: Hit_ID=Q6EPW3; Match level="QueryCoverage=91%, HitCoverage=92%, E-value=6e-72, Identity=54%"; Hit description=F-box protein-like
MVTTTIEDLHGDVLGCALRRLDGRSLAAASCATVALRALATDPETWRALCVAEWPSLALALAAQRRLLAAVPPQRLFADAHPFPSADTGGAGGPDPDPVPAGELTPASSPWFLGSPFRVEAVERKRPASAAAVPSPAELELSWVVVDPARGRAVNVSSRRPVAVARHWYTGETLARFAVVLGGCKFEATVACSEGADGHVSEVSLAVEDADGAAVSGEGTLRLLAAAMEAPRKGGAREPEEARRRYLDFVKRKKGRKESKARREALVDLCCSAASAVVVLTCLAAVALR

SEQ ID NO: 59965 - protein, 79 aa, Zea mays
  Coding DNA Sequence Number=SeqID_18186
MADNIGFLNLKAMLSTMSSEDFSNCLAYTHLKGMFLSKALENRKKMSRAKLPKGELLSLDPKFLSFGITAGKRKNSLKF

SEQ ID NO: 59966 - protein, 91 aa, Zea mays
  Coding DNA Sequence Number=SeqID_18187
MTMPHYFIKMKGFANELASSGKDDVEAEETKDGAQSLDTVEAVVTTSETLVTEVIRSCVIFVTSSIVELLSVGTCMVMVINRKIDLLEGTT

SEQ ID NO: 59967 - protein, 366 aa, Zea mays
  Coding DNA Sequence Number=SeqID_18188
  Homolog annotation: Hit_ID=Q7G2F7; Match level="QueryCoverage=97%, HitCoverage=27%, E-value=1e-172, Identity=84%"; Hit description =Expressed protein
MAADAIVTESGALHVAGVPLVNPSTVVVWEVMPGLGNGIQATAKINAASSVPPSLNPPSWPGFAPLAAYLFSLQDYLVSEGAQTKKLTDNNETTEAASIHCCPVSNFSAYVSPEAAAQSATTTTWGSGVTSVAFDPTRGGSVITVVIVEGQYMSPYDPDEGPSITGWRVQCWESSCQPVVLHPIFGSPTSLGGQPPMQTVWSTRVNKSIPPTEDLKNPQTYVPMPTTSDERSSSECSVDRANRLSFDPYDLPNDVRQLAQIVYSAHGGEVAVAFLRGGVHIFSGPNFDQVDSYHVNVGSAIAPPAFSSSSCCLASVWHDTLKDRTILKIIRVLPPAILSTQTKISSAAWERAIADRYVTKFIDADS

SEQ ID NO: 59968 - protein, 89 aa, Zea mays
  Coding DNA Sequence Number=SeqID_18189
  Subcellular localization annotation: CTP_CleavageSite=47; ConfidenceScore=5.90e-01
MASSSALVVRSIPLPLPGTYKRNRPSPVLTTLAPANSSAFPRANQASAAVLPPSLRVTRRPFFPPIAPGNLTGDITAVDTRHRAADRPP

SEQ ID NO: 59969 - protein, 518 aa, Zea mays
  Coding DNA Sequence Number=SeqID_18190
  Homolog annotation: Hit_ID=Q7G2F7; Match level="QueryCoverage=90%, HitCoverage=38%, E-value=0.0, Identity=74%"; Hit description =Expressed protein
MGARRACVRHYCLVLNLDRIKCRLLEGTNAQDVRALVLDMQARLLLDMLGKGIESALTNPSTLLPEPWQASSDMLSSIDADKMTVEPALLPNIQGYVDAVLDLASHFITRLRRYASFCRTLASHVGPSSTTGTSRNMVTSPTNSSPSPSNNQGNQGGSTSATGNSQMQEWVQGAIAKISNNSDGAATATQNPMSTRTSFMPISINTGTFPGTPAIMSITAILSAFPKKAITKKIQHMMNAKTEDNSSTVRSGLGAAKVEEGHSARGGQFVLGGAKGPEENPIGKSVRIGSGNAGQGYTSDEVKVLFLILVDLCRRTSTLPHPLPASQVGSSSIIIRLHYIDGNYTVLPEVVEASLGPHMQNMPRPRGADAAGLLLRELELQPPAEEWHRRNMFGGPWSEPDDFGPLDNMPRLKISGSINSHLSDMEVDAVSSIGIDLWPRKRRLSERDAAFGLKTSVGLGGYLGVMGSRRDVVTAVWRTGLDGDWYKFLDLSFVGPFKIKKAPSSSKWDFGSDVFLGF

SEQ ID NO: 59970 - protein, 69 aa, Zea mays
  Coding DNA Sequence Number=SeqID_18191
MAMCPYQGWKYIVHETNPLSLVPLAPRGGMAGVLVEPPRPPLWSFRSSLSLLRGLFPLLRPLPKLVLPS

SEQ ID NO: 59971 - protein, 115 aa, Zea mays
  Coding DNA Sequence Number=SeqID_18192
  Subcellular localization annotation: CTP_CleavageSite=31; ConfidenceScore=5.03e-01
MATSNTTVLCQGSPHATPGMTELGWEHTVVTSSKVLETPSAFFMMALARLLWYVSTDSLRMVSYEGFEGGSERPLGTASTIWAWLGDVPSCRHGLIVLGRLSLRVGYRLAGLLDG

SEQ ID NO: 59972 - protein, 621 aa, Zea mays
  Coding DNA Sequence Number=SeqID_18193
  Gene Ontology: Mol. function=RNA-directed DNA polymerase activity; Cellular component=nucleus; Biological process=RNA-dependent DNA replication
  Homolog annotation: Hit_ID=Q8S472; Match level="QueryCoverage=99%, HitCoverage=58%, E-value=0.0, Identity=81%"; Hit description =Putative gypsy-type retrotransposon RIRE2
  Pfam annotation: Domain name=Retrotrans_gag; Domain location=121-200; Score=55.9; E_value=1.3e-13; Accession=PF03732.7; Description =Retrotransposon gag protein
MREASVYTGRTRNTAPAAPGRLGNEHHHRDRRAHLDERVRRGYHPRRGGRYDSGEDRSPSPEPPGPQAFSRAIRRAPFPTRFRPPTTITKYSGETRPELWLADYRLACQLGGTDDDNLIIRNLPLFLSDTARAWLEHLPPGQISNWDDLVQAFTGNFQGTCRQQPGESLRDYIRRFSKQRTELPNITDSDVIGAFLAGTTCRDLVSKLGRKTPTRASELMDIATKFASGQEAVEAIFRKDKQPQGRPSEDAPEASTQRGAKKKGKKKSQAKRDAADADLVAAAEYKNPRKPPGGANLFDKMLKEPCPYHQGPVKHTLEECVMLRRHFHRAGPPAEGGRARDDDKKEDHQAGEFPEVRDCFMIYGGQAANASARHRKQERREVCMVKVAAPVYLDWSDKPITFDQADNPDHVSSPGKYPLVVDPVIGDVRLTKVLMDRGSSLNIIYTETLGLLRVDLSSVRAGAAPFHGIIPGKRVQPLGRLDLPVCFGTPSNFRRETLTFEVVGFRGTYHAVLGRPCYAKFMAVPNYTYLQLKMPGPNEVITVGPTYKHAFECDVECVEYAEALAESEALIADLESLSKEVPDVKRHAGNFEPVETVKAVPLDPSGDASKQIWIGSGLDPK

SEQ ID NO: 59973 - protein, 89 aa, Zea mays
  Coding DNA Sequence Number=SeqID_18194
MEKRKTKRDKAYREERVHLNGIFYDGGTAAESDDNGPPSRRSTSATAAPDYPEIPYVTMFHVEFCNLAHRHIPDKPTSMLPLFLDARSP

SEQ ID NO: 59974 - protein, 156 aa, Zea mays
  Coding DNA Sequence Number=SeqID_18195
MEVVETTEATPSALEIIPVGATEAATAQLEKSEPKSSRTKQQPKLQSLAAMAGLSKTSTVPAATPRKERRIASVLDVVLKPSKVSTPASTKVSEDKIEELGEVAAASASPSRAEGGPSKTRSVEQVKENLLEKLEQGLILSKALNAQKMLKMRAPG

SEQ ID NO: 59975 - protein, 172 aa, Zea mays
  Coding DNA Sequence Number=SeqID_18196
MAGGEGTYDELLKGRQEKTSRFGSTLDADQRQTTLQIQAMRVVKSLEPYSPGAPSAATSFALRLPSSRSRPRESVHPVRDQQVLPAAGLSTPRGAAKGTVKKEESLIEVPVRFAESWRPAIYGCTARFREVLGATASPRCSRGSPDKSGSDKGRNCLLDAICLSDRVGPAKI

SEQ ID NO: 59976 - protein, 305 aa, Zea mays
  Coding DNA Sequence Number=SeqID_18197
  Homolog annotation: Hit_ID=Q6YZJ0; Match level="QueryCoverage=73%, HitCoverage=78%, E-value=1e-86, Identity=62%"; Hit description =Putative auxin-regulated protein
  Pfam annotation: Domain name=GST_N; Domain location=145-221; Score =13.3; E_value=0.046; Accession=PF02798.10; Description=Glutathione S- transferase, N-terminal domain
  Pfam annotation: Domain name=Glutaredoxin; Domain location=147-207; Score=5.9; E_value=0.038; Accession=PF00462.14; Description =Glutaredoxin
  Pfam module annotation: Pfam domain module=GST_N::Glutaredoxin; Domain location=145-221::147-207
  Subcellular localization annotation: CTP_CleavageSite=32; ConfidenceScore=5.48e-01
MAPPAAPTALHHRTPLLLPRRTVALGATATARAARAASLAVRAQPDTTAAAVSTSAPEPAPEFKPPPGFKAPEPKRYEVKSGQVGSVLGASLAIPLRLGTGVFVLGYSPSLVSPSEIPSDQYALEFGAWKVKEESKIGQCKRPEKPIEIYEFEGCPFCRKVREMVTVLDLDVLFYPCPQKGPTFRPKVLEMGGKKQFPYMVDPNTGVAMYESDDIIKYLADTYGDGTVPIMLSLGLLTAITAGLATLGRIGKGNSYIASKVPPQPIEIWACEAPYIEDPNTGVQMFESAEIIDYLKATYALYPSS

SEQ ID NO: 59977 - protein, 143 aa, Zea mays
  Coding DNA Sequence Number=SeqID_18198
  Subcellular localization annotation: CTP_CleavageSite=45; ConfidenceScore=5.04e-01
MDEDVTVAPEREERARSSSTASARGVISRATVTRPSAAAAASSVSCAAAARAARAFPRHQVHVRQVFDTYLGEARAALTAATQDTDDAAAAALSLVTAALEMSPRAEVTLELRAHAPRAQALSRRLHPWLEIDEARRRCDRTG

SEQ ID NO: 59978 - protein, 382 aa, Zea mays
  Coding DNA Sequence Number=SeqID_18199
  Homolog annotation: Hit_ID=Q10N24; Match level="QueryCoverage=9%, HitCoverage=28%, E-value=9e-07, Identity=77%"; Hit description =Expressed protein
MEKRNRILDLQDLLSDADFGPLLARQLLSPFVRRPPTYLVARHHILSAAMDLHLELYIGRRRRGGGKSQKYPLPWEAPCSSCSTSVGLMELLMDGEERSSPNSHKFCSASPKFPISYPRESVHPVRDQQVLPAAAAASHFDCSRTFRSRKRNLLLPLAVSDRTPSLLPRILPAHEPPPQPDNKEEEEKPCGSGRFLARRPPLALVPRCSRGSPDKSGSDKDNWSTVVARTFFPCVNGIEDGGTIHSGTFSNLRDELLAPQGSLSHTLSPIAACPQHLICSAAIKVSKPSPPAVTHSDIRHQTQHTQQTALQSLDSRAFLSKKPPAVAMERQEAARRTLPRRGQIKLRIFASLFRCFITPEAPARKEGDKNRDGGGRGVSPGG

SEQ ID NO: 59979 - protein, 77 aa, Zea mays
  Coding DNA Sequence Number=SeqID_18200
  Homolog annotation: Hit_ID=Q10N24; Match level="QueryCoverage=48%, HitCoverage=32%, E-value=7e-09, Identity=72%"; Hit description =Expressed protein
MGESVCDKLPWGARSSSLRVKFEIVMWWKIGLVTYLSGEKSENRVLFPFFLKADHALSQSAEVSPDEEEKRWLLLPS

SEQ ID NO: 59980 - protein, 744 aa, Zea mays
  Coding DNA Sequence Number=SeqID_18201
  Gene Ontology: Mol. function=microtubule motor activity; Cellular component=microtubule associated complex; Biological process =microtubule-based movement
  Homolog annotation: Hit_ID=Q93XG0; Match level="QueryCoverage=99%, HitCoverage=76%, E-value=0.0, Identity=90%"; Hit description=Kinesin heavy chain
  Pfam annotation: Domain name=DHC_N1; Domain location=144-675; Score= -262.7; E_value=0.039; Accession=PF08385.2; Description=Dynein heavy chain, N-terminal region
  Pfam annotation: Domain name=Kinesin; Domain location=18-345; Score =416.1; E_value=4.8e-122; Accession=PF00225.13; Description=Kinesin motor domain
  Pfam module annotation: Pfam domain module=DHC_N1::Kinesin; Domain location=144-675::18-345
MSSRLDKEKAVNVQVLLRCRPFSDDEVRSNAPQVITCNDYQREVAVTQSIAGKQFDRVFTFDKYKCSVLKAVQDSDAIMVFGPTAKQKDLYDQAIIPIVNESGPKGQLPADAGVIPRAVKQIFDTLERQNTEYSVKVTFLELYNEEITDLLAPEEISKATFEDRQKKTLPLMEDGKGGVLVRGLEEEIVTNASEIFSLLERGSAKRRTAETLLNKQSSRSHSLFSITIHIKEATPEGEELIKCGKLNLVDLAGSENISRSGAKEGRAREAGEINKSLLTLGRVITALVEHLGHVPYRDSKLTRLLRDSLGGRTKTCIIATVSPSVHCLEETLSTLDYAHRAKSIKNRPEVNQKMMKSTLIKDLYGEIDRLKAEVYAAREKVGVYIPKDRYQQEENERKAMADQIEQMNASLEANQKLISDLQEKYDSELRHSADLSKKLEVTEKCMDHTSNLLSATKEDLKQAQYNLKEKDYIISEQKKAENALTHQACVLRSDLEKYTRDNTSLYSKIARGDKLSATNRSVVNTFQTDLASKLDTLSNTLNASIDQQNMHLKAVEDLCQSCVDSHDRATSELKKKILASKSLYMSHMEAFQNVVLLHKASANATLEDISSLSATSCCSLDQLLVCVEGEAQNIFNDIHKLLTTHRSEMTHFTQQLRESFQISLDRTKEMSTYIIGLFDKYVEETSKLQSHSNNTHEAQMKSIEDFQMVYEEQSKSEEQKLLADISSLVSKHITRQRELVGAFS

SEQ ID NO: 59981 - protein, 215 aa, Zea mays
  Coding DNA Sequence Number=SeqID_18202
  Subcellular localization annotation: CTP_CleavageSite=88; ConfidenceScore=5.28e-01
MGVHFCRLDGAPDGWRGARPTATSFALRLPSSRSRPRESVHPVRDQQVLPAAAAASHFDCSRTFRSRKRNLLLPLAVSDTPSLLPRILPAHESPPQPDNKEEEEKPCGSWRDGLPSRSSLAALEAPRTKAAATKTQHTQQMALQSPDSRAFLSKKPPAAAMERQEAARRTLPRHGQIKLRIFASLFRCFITPEAPARKEGDKNRDGGGRRVSPGG

SEQ ID NO: 59982 - protein, 94 aa, Zea mays
  Coding DNA Sequence Number=SeqID_18203
  Gene Ontology: Mol. function=nucleic acid binding
  Homolog annotation: Hit_ID=Q3LRV2; Match level="QueryCoverage=67%, HitCoverage=28%, E-value=2e-23, Identity=81%"; Hit description=Gag
DEDYDQDEVAQIEQFNSQATTMILACLSREEYNNVQGLKIVKEIWDVLKIAHEGDELIKINKRETPNHPTFKSSKFSALLPLTRARHSIQDTPK

SEQ ID NO: 59983 - protein, 67 aa, Zea mays
  Coding DNA Sequence Number=SeqID_18204
  Homolog annotation: Hit_ID=Q6YZJ0; Match level="QueryCoverage=89%, HitCoverage=30%, E-value=1e-14, Identity=44%"; Hit description =Putative auxin-regulated protein
AITAGLATLGRIGKGNSYIASKVPPQPIEIWACEAPYIEDPNTGVQMFESAEIIDYLKATYALYPSS

SEQ ID NO: 59984 - protein, 74 aa, Zea mays
  Coding DNA Sequence Number=SeqID_18205
MERQEAARRTLPRRGQIKLRIFASLFRCFITPEAPARKEGDKNRDGGGRRVSPGLAAVQPAEEWFNFSENLFPE

SEQ ID NO: 59985 - protein, 66 aa, Zea mays
  Coding DNA Sequence Number=SeqID_18206
  Subcellular localization annotation: CTP_CleavageSite=52; ConfidenceScore=5.04e-01
MKLPDPSTEALLSSTSRISRHCSSTPPVHVARSILTTFDYDSYLTVTIVPPSTSPDASPDIYRCRC

SEQ ID NO: 59986 - protein, 144 aa, Zea mays
  Coding DNA Sequence Number=SeqID_18207
MGKSNKRKREPTPPSEDFGDSEYSEEEFSFESEGSPAPVSPPASSDDSDDSQGIVAEGSDESEYSSDEEDSSDSSEEGGGGDGGDDDDEEATVTMAVMTAAGAATAAARAATAAAAGAATAAAAARAATRPVARCHWSLDVSIG

SEQ ID NO: 59987 - protein, 127 aa, Zea mays
  Coding DNA Sequence Number=SeqID_18208
MGVGKGRLVWGGLRLPSPWRESSNDSNDSQGARGRRSGTYIRAVERSRLEGSDESEYSSDEEDSDGGGEDEDDDDDEGSGDGDGSGKGGGGGSKDGDGGSSRGSNRGGSSRGSTRGGSGGGSNRASG

SEQ ID NO: 59988 - protein, 107 aa, Zea mays
  Coding DNA Sequence Number=SeqID_18209
MALREDVVSDYGEDISDDSTFEVSLFTNELIAKLDKMVVALARSISPKMSSDTSTFVRTKSIEAPRDPTLKCLAELVLCKESVLAPTQLKDEATVVAPIVFESSTSP

SEQ ID NO: 59989 - protein, 106 aa, Zea mays
  Coding DNA Sequence Number=SeqID_18210
MEVTSDLGSDSVKKHLTRGDPRSSDMGACDGEASGQWAPSGNDFMSESAHAREVEGDTYVLGPFDEDFVPDERYAGSTTFYAIDFKWFTDTRTKHYITRYLETLAV

SEQ ID NO: 59990 - protein, 186 aa, Zea mays
  Coding DNA Sequence Number=SeqID_18211
  Gene Ontology: Mol. function=nucleic acid binding; Cellular component= spliceosome; Biological process=mRNA processing
  Homolog annotation: Hit_ID=Q9ZQW9; Match level="QueryCoverage=88%, HitCoverage=55%, E-value=2e-91, Identity=93%"; Hit description=U2 snRNP auxiliary factor, small subunit
  Pfam annotation: Domain name=RRM_1; Domain location=82-141; Score =10.9; E_value=0.014; Accession=PF00076.12; Description=RNA recognition motif. (a.k.a. RRM, RBD, or
  Pfam annotation: Domain name=zf-CCCH; Domain location=13-39; Score =35.1; E_value=2.4e-07; Accession=PF00642.15; Description=Zinc finger C-x8-C-x5-C-x3-H type (and similar)
  Pfam module annotation: Pfam domain module=RRM_1::zf-CCCH; Domain location=82-141::13-39
MAEYLASIFGTEKDRVNCPFYFKIGVCRHGDRCSRLHNRPTISPTLVLANMYQRPDMITPGVDAQGQPIDPEKMQEHFEDFYEDIYEELGKFGEIENLNVCDNLADHMIGNVYVQFREEEQAAVAYNALQGRFYSGRPIIVEYSPVTDFREATCRQFEENSCNRGGSEVPWEKPKPKPATTKEGPP

SEQ ID NO: 59991 - protein, 184 aa, Zea mays
  Coding DNA Sequence Number=SeqID_18212
MVALLSWVVTQRIGPYKEISDQGPRTDPQASARTRVRARADQRAWAVSDQGRGSGLADWAQCQGHRRPTDGSGRWAHVRKAVSRDLGHAIGIGRWGSNAGGFCGCGRHRVCSTEVKSPDLGRVWAARVPKSPGLARIGEENRRTHWWGPGHETGARDGRTEEGELQAVWGNSSEESRPREEAIE

SEQ ID NO: 59992 - protein, 275 aa, Zea mays
  Coding DNA Sequence Number=SeqID_18213
  Subcellular localization annotation: CTP_CleavageSite=60; ConfidenceScore=5.38e-01
MPSSGMLGGAVSLRAGPTRQPALYSYPAGPLSIRPLVTTRAPHIVDSWGPFWSESSTSPSAQTESVASNVGIPSTTSPLTFARVLGIIRSDQWSHYARDPHPHPCCGCWLDLPRDADLHHGRIASSADPFPRNKNRRHQRLYAPPPSTPRYYLARALSWTREGSRALVDHLRVVGGNTGALEYSELLAGLHGIFRSRPSPRIASLWPSLLLGPPVMPSLEMLGGAVSLRAVPRTESVASNAGIPSTTSSLTFARVLGIIRSDQWSHYARDPHPHP

SEQ ID NO: 59993 - protein, 86 aa, Zea mays
  Coding DNA Sequence Number=SeqID_18214
MALARRDPVADEEKRPTVRGGARMQKLRVERKGQEVMPSTSGHWIRGGCDPDAAAASTAGVGAMPSWEVEGLGFWEEGLNGEGRDS

SEQ ID NO: 59994 - protein, 92 aa, Zea mays
  Coding DNA Sequence Number=SeqID_18215
  Subcellular localization annotation: CTP_CleavageSite=76; ConfidenceScore=5.29e-01
MANHSDSRTVPILALWAGPVLPCVQGGGMLRDFANGSGPPSTQFRPPRRFKTSTDRSNVTAHATVHAPTHVSVPVYAATLTRAFAHMLTRQA

SEQ ID NO: 59995 - protein, 129 aa, Zea mays
  Coding DNA Sequence Number=SeqID_18216
MEGRRRREIVVNVLANPTRKLVQHPRRSPLVHLGWIAVTERQTECESMAVARVDSHSLSYYDLSLVVVQGALVFLQDVQGCGRICSQLVFEKGVKHHRQGRLTPGNLLKPHRLGARFTAKESAALHWCG

SEQ ID NO: 59996 - protein, 268 aa, Zea mays
  Coding DNA Sequence Number=SeqID_18217
MGMPPHDTLAESAAMYETMLSSQQRMMRPDWQAMYDALILPEIPTRFVYRPQTVMDVMSGSSSLWEMGAPPHDTLAESAAMYAAMLSSQQQHMARPDRQAMYNAPDLPKVPTRFVYRLQTAMNVMSGSISLWETGAESRLEGALVRCRRVENLDAIECGVGGVFIAPTTKNGCWKCAVAWRTEQSGAPPDTVRRAFNALQSTIASRSSRCSIGTPDSPVNYSGVPLNFPEGEEFELKCPGAPNTVLWHTGQSGAPDQGAFRVVFCSLV

SEQ ID NO: 59997 - protein, 217 aa, Zea mays
  Coding DNA Sequence Number=SeqID_18218
  Subcellular localization annotation: CTP_CleavageSite=60; ConfidenceScore=5.16e-01
MGGSRLGALVGEQLRSPQSPITPTSATSTRQGQWRNATTRLRVPNGTRTGIDDGSADGLSHGYGGGTVEGLGMTDVGMGEKSAGRTGFYPQLSGRRTRAVVEQSACGRLGMESRGEDFASSVTKGKQNQPENLPARNSPTTLAPFGYQGDSSDPRNLVSGTIIRGTLKTPNSQLKDSAACAAPTAVPLDRVRLTGSQVLQKAPQETPLRPTQGSDSG

SEQ ID NO: 59998 - protein, 125 aa, Zea mays
  Coding DNA Sequence Number=SeqID_18219
  Homolog annotation: Hit_ID=Q5SMJ0; Match level="QueryCoverage=48%, HitCoverage=4%, E-value=5e-18, Identity=75%"; Hit description =Putative salt-inducible protein kinase
MGQLGQGGGAGAAGLPGSATAREREKKRREKEREKKERKDLLLIFEIRSFYMNAFALSKQSKEMQEDLNEANKLASLHYPNVVAFYGVVLDGSGGSFAIVTEYMDNGSLRQALQRHEKYATLFQC

SEQ ID NO: 59999 - protein, 107 aa, Zea mays
  Coding DNA Sequence Number=SeqID_18220
  Subcellular localization annotation: CTP_CleavageSite=92; ConfidenceScore=5.47e-01
MSVVPLAGSQQTPRTSHGAAAEASPVSAAPFGSPTPVSRAYKNSLDLASFAPHDPFSSLPLLRLSQPRCRAPRRDHPPSLIAAIGATRSLTRSAVAWAVHEEAARGK

SEQ ID NO: 60000 - protein, 518 aa, Zea mays
  Coding DNA Sequence Number=SeqID_18221
  Gene Ontology: Mol. function=protein-tyrosine kinase activity; Cellular component=integral to membrane; Biological process=protein amino acid phosphorylation
  Homolog annotation: Hit_ID=Q9AUC2; Match level="QueryCoverage=89%, HitCoverage=63%, E-value=0.0, Identity=76%"; Hit description =Receptor-like protein kinase 1
  Pfam annotation: Domain name=LRR_1; Domain location=109-132; Score =15.1; E_value=0.25; Accession=PF00560.23; Description=Leucine Rich Repeat
  Pfam annotation: Domain name=LRR_1; Domain location=134-156; Score =12.1; E_value=1.6; Accession=PF00560.23; Description=Leucine Rich Repeat
  Pfam annotation: Domain name=LRR_1; Domain location=158-179; Score =7.5; E_value=11; Accession=PF00560.23; Description=Leucine Rich Repeat
  Pfam annotation: Domain name=LRR_1; Domain location=180-202; Score =10.8; E_value=2.7; Accession=PF00560.23; Description=Leucine Rich Repeat
  Pfam annotation: Domain name=LRR_1; Domain location=86-107; Score =6.1; E_value=20; Accession=PF00560.23; Description=Leucine Rich Repeat
  Pfam module annotation: Pfam domain module=LRR_1::LRR_1::LRR_1::LRR _1::LRR_1; Domain location=109-132::134-156::158-179::180-202::86-107
MAGVPSSLARLYFLLLPLATGCLLLLSAEAARLPLSLAPADAAADALLRLKAGINDSGGALGQLLEGMGLSGVLDLRALTSLPGPGLRTLSFMDNDFAGPLPDVKALSGLRALFLSGNKFSGVIPADAFAGMGSLKKVVLSNNDFTGPIPASLADAPRLLELQLNGNKFQGKIPDLKQDELTAVNLANNELEGEIPPSLKFTPPDMFAGEQHGFLVFYTMHACCSCNVHATPSFAGPPLGVKCEAPPPPSASPSPSPPPSPKTPPPASVKEGTTPSQPAADTVASTGASSADDAKQDEGHKPVEGSTSTSFGVLAAFIGTLGIAGVAFVALRRRRGYKTKNFGPTASSARPSDPPRVEPHPPAAKAEASAAQAPPAAAGCVARAGGAARKVEQGRLTFVRDDRGRFFELQDLLKATAEVLGTANLGVCYCATLTTGHSVVVKRFKEMNRVGKEDFEEHMRRLGRLSHPNLLPLVAYYYRKEEKLLIHDYVPNRSLPNLLHGGGDERGMKTPALHCTLR

SEQ ID NO: 60001 - protein, 939 aa, Zea mays
  Coding DNA Sequence Number=SeqID_18222
  Gene Ontology: Mol. function=RNA-directed DNA polymerase activity; Cellular component=mitochondrion; Biological process=RNA-dependent DNA replication
  Homolog annotation: Hit_ID=Q8S463; Match level="QueryCoverage=92%, HitCoverage=45%, E-value=0.0, Identity=89%"; Hit description =Putative prpol
  Pfam annotation: Domain name=RnaseH; Domain location=312-439; Score= -0.1; E_value=5.9e-05; Accession=PF00075.14; Description=RNase H
  Pfam annotation: Domain name=rve; Domain location=651-810; Score =94.1; E_value=4.1e-25; Accession=PF00665.16; Description=Integrase core domain
  Pfam module annotation: Pfam domain module=RnaseH::rve; Domain location=312-439::651-810
MPFGLRNVGAMYQRCMNHVFGEHIGRTVEAYVDDIVVKTRKASDLLSDLEVTFRCLKAKGVKLNPEKCVFGVPRGMLLGFIVSELGIEANPEKIAAITSMGPIKDLKGVQRVTGCLAALSRFISHLGERDLPLYRLLRKAECFTWTPEAEEALGNLKALLTNAPILVPPATGEALLIYVAATTQVVSAAIVVEIREEGHALPVQRPVYFISEVLSETKIRYPQVQKLLYAVVLTRRKLRHYFESHPVTVVSSFPLGEIIQCREASGRIAKWAVEIMGETISFAPRKAIKSQVLADFVAEWVDTQLPTVLIQPELWTMFFDGSLMKIGAGACLLFISPLGKHLRYVLRLHFPASNNVAEYEALVNGLRIAIELGVRRLDARDDSQLIIDQVMKNSHCRDLKMEAYCDEVRRLEDKCYGLELNHIARRYNETADELAKIASGRTTVPPDVISRDLHQPSVKIDDTPEPEAPSAQPEVPSAQSEAPSARLEAPSAQPEAPSVQPEVPSAPEGEALRVEEERSGVTPNRNWQTPYLQYLHRGELPLDRAEAWRLARRAKSFVLLGDENELYHRSPSGILQRCIPIAEGQELLREIHSGACGHHAAPRALVGNAFRQGFYWPTAVADATRIVCTCEGCQFYARQTHLPAQALQMIPITWPFAVWGLDLVGPLQKAPGGYTHLLVAIDKFFEWIEVRPLNSIRSKQAVAFFTNIIHHFGVPNSIITDNGTQFTGRRFLDLCEDHHIRVDWAAVAHPMTNGQVERANDMILQGLKPRIYNDLNKFGKRWMKELPSVVWSLRTTPSRATGFMSFFLVYGAEAILPTDLEYGSPRTRAYADQSNQASRENLLDQLEEAWDMALLHSARYQQSLRRYHARGVQSRDLQVGDLVFRLRQDARGRHKLTPPWEGPFIIAKVLKPGTYKLANSQGEVYSNAWNIQQLRRFYP

SEQ ID NO: 60002 - protein, 64 aa, Zea mays
  Coding DNA Sequence Number=SeqID_18223
MTHQCDKVVPRVLSGRSDLDLGLLGLNRAWPASAPPSKPGCAAVRATWRLEIPLRPSTFAKETL

SEQ ID NO: 60003 - protein, 122 aa, Zea mays
  Coding DNA Sequence Number=SeqID_18224
  Homolog annotation: Hit_ID=Q653U8; Match level="QueryCoverage=34%, HitCoverage=12%, E-value=2e-14, Identity=90%"; Hit description =Putative 3-hydroxyisobutyrate dehydrogenase, mitochondrial
MAMAISMLGVSEAFALGQNLGIKATTVTDIFNCSSARCWSRDHDGKVIPEEVATAIVYLKDTIGKEAVQEIIINLSKDRDWFIHDTYMFLQCCICPIFLYFSKCSLYAHLQYSEGKILVEIL

SEQ ID NO: 60004 - protein, 512 aa, Zea mays
  Coding DNA Sequence Number=SeqID_18225
  Gene Ontology: Mol. function=protein serine/threonine phosphatase activity; Cellular component=protein serine/threonine phosphatase complex; Biological process=protein amino acid dephosphorylation
  Homolog annotation: Hit_ID=Q71QD5; Match level="QueryCoverage=76%, HitCoverage=68%, E-value=2e-51, Identity=35%"; Hit description =Protein phosphatase 2C
  Pfam annotation: Domain name=PP2C; Domain location=116-501; Score =132.2; E_value=1.4e-36; Accession=PF00481.12; Description=Protein phosphatase 2C
  Subcellular localization annotation: CTP_CleavageSite=30; ConfidenceScore=5.44e-01
MTSAGVNVPGDDGVGNPAAASGSASAPECRTMQRRRRRLEPQGSGDAAAGPSWVRRLRPAASRFSPSPSQGSADRPNDEEQEEDDPDVQEMELVPLPPAGPQELQPADVPAQVWPVAFGSLSMAGRMRMMEDTISLHPDLCTWADGSPVHFFAVFDGHGGSHVSALCRDRMHEFVAEELGKEGAAFLRRRQEWLAWGDGAGAETSAAAFVRGPRGAWPEREEEERAWRSALRRSFRRADAMAALACACGRVARPSCRCPLSSVVSGIVGSTAVVALLVRGRLVVANCGDSRAVLCRGPAGTPPVPLSSDHKVCVALAPPEVSVEADSWLASGGGLFVLADVQRPDVSGNGGTTVCWPMTLLRLTVPPNRPDERARIEAAGGLVVFNNGHRVRGILAMSRALGTNVWWDRLLRPEVIAEPEITVTERTAEDECMILATDGMWDVIANDVACNVARHCLEDGNPPPAATAAAATAGREEEPRCVRATSLLARLAIGRETLDNVSIIVVDLKHRE

SEQ ID NO: 60005 - protein, 343 aa, Zea mays
  Coding DNA Sequence Number=SeqID_18226
  Gene Ontology: Mol. function=cysteine-type endopeptidase activity; Cellular component=endoplasmic reticulum; Biological process =proteolysis
  Homolog annotation: Hit_ID=Q2TN87; Match level="QueryCoverage=99%, HitCoverage=98%, E-value=1e-119, Identity=61%"; Hit description =Putative cysteine protease
  Pfam annotation: Domain name=Inhibitor_I29; Domain location=41-98; Score=92.8; E_value=1e-24; Accession=PF08246.2; Description =Cathepsin propeptide inhibitor domain (
  Pfam annotation: Domain name=Peptidase_C1; Domain location=127-342; Score=438.2; E_value=1.1e-128; Accession=PF00112.13; Description =Papain family cysteine protease
  Pfam module annotation: Pfam domain module=Inhibitor_I29::Peptidase _C1; Domain location=41-98::127-342
MVSSRAFLLLLAILTGCACSFPSPVLAARELSDDAAMAERHERWMAVYGRVYKDAAEKARRFEVFKDNLAFVESFNADKKNKFWLGVNQFADLTTEEFKANKGFKPISAEEVPTTGFKYENLSVSALPTAVDWRTKGAVTPIKNQGQCGCCWAFSAVAAMEGIVKLSTDNLVSLSEQELVDCDTHSMDEGCEGGWMDSAFEFVIKNGGLATESSYPYKAVDGKCKGGSKSAATIKGHEDVPPNNEAALMKAVASQPVSVAVDASDRTFMLYSGGVMTGSCGTQLDHGIAAIGYGVESDGTKYWILKNSWGTTWGEKRFLRMEKDISDKQGMCGLAMKPSYPTE

SEQ ID NO: 60006 - protein, 63 aa, Zea mays
  Coding DNA Sequence Number=SeqID_18227
MTQLFEFYEAEDPEHLFGEGKDVRFTSGDEDDGFDCAYGNGKEREEVVEVDLREFQDVDEFED

SEQ ID NO: 60007 - protein, 191 aa, Zea mays
  Coding DNA Sequence Number=SeqID_18228
MAGFADSIVGTHKPISGDHKKDEAESLSSPLFRQCANSPNRTNLHHRREGRDPPARGKLSLSPIWVRCRVVEHRGCMVKLSVVSARRIKSRGRRNRSSACHRRRKLWRPVGSLFLASIPSEYLPKGFIFIRASCRGHQEGISDSNLVVRPSVAMALPWILGRHRLGLIGEKERVEESWAPLIRLPAVEIRR

SEQ ID NO: 60008 - protein, 173 aa, Zea mays
  Coding DNA Sequence Number=SeqID_18229
MDNIDEDKLTVDKTYNKNIKAKPFQTRDQIDLRSFGWPTDAEATPISFFPDGFPPIGDLASSQSSLGDNNYDNDQPHMNYHFRRYLTWPLAEVDMQPPMEPPLHRLDASMLAMSTSIEAKSSSHSTRDTYVVVKDDDDDDEDDDELDEKSWPHATTWLDCPSSLNSAVIGHPT

SEQ ID NO: 60009 - protein, 129 aa, Zea mays
  Coding DNA Sequence Number=SeqID_18230
  Homolog annotation: Hit_ID=Q6QP51; Match level="QueryCoverage=58%, HitCoverage=43%, E-value=3e-07, Identity=55%"; Hit description =Putative growth-regulating factor 1
MHPGYGQAAWGNDQAGQGTTKSIKTSEESNHSSDASGATPGGCARAHPPEQSITEKGKQPRSPRSDCCATHRGKTDNSRVQPRAQQEAPPRPTLGLGLGKRSPPRPTPGPSLSLGLGRNRVLARPRPRP

SEQ ID NO: 60010 - protein, 248 aa, Zea mays
  Coding DNA Sequence Number=SeqID_18231
  Subcellular localization annotation: CTP_CleavageSite=39; ConfidenceScore=5.46e-01
QGSTPSVAPGSSERATPGHRGHGARAAVHSQSSQPRGKRTMMRKREASSPQGQIRRELGIFGGAPGDSEERKTNCGFYRKTNVVVDFNMFWFGPYRGSLAFGRRLDCRPWRTRAGIVAIAVGWGSRQPGPPSPGEVGRAWGGAGVGNATTPSWATSRPAGPGEEEARGGHERRGGAKWAARGGNTDPRRRGEKEKGKGKGKVFSNLRHPEAFVFFVDRAHYEKRPSTAKGLLLRVFFSAEGPQDGDTV

SEQ ID NO: 60011 - protein, 68 aa, Zea mays
  Coding DNA Sequence Number=SeqID_18232
MAAKDQIRRNGRAQPEAPPTGGPIPPIFGRPGGAWPSRPPKSESRSLPNASAVWAVAQPPAAPGWGRL

SEQ ID NO: 60012 - protein, 54 aa, Zea mays
  Coding DNA Sequence Number=SeqID_18233
MEPPCHMGGIAVTPIRVMITSPMRLSKFSGGPPPHAGAAPLGLAQGWRKTGPWP

SEQ ID NO: 60013 - protein, 1329 aa, Zea mays
  Coding DNA Sequence Number=SeqID_18234
  Gene Ontology: Mol. function=protein serine/threonine kinase activity; Cellular component=integral to membrane; Biological process=protein amino acid phosphorylation
  Homolog annotation: Hit_ID=Q2R2D7; Match level="QueryCoverage=64%, HitCoverage=89%, E-value=1e-168, Identity=37%"; Hit description =Receptor kinase, putative, expressed
  Pfam annotation: Domain name=LRRNT_2; Domain location=36-77; Score =37.0; E_value=6.5e-08; Accession=PF08263.3; Description=Leucine rich repeat N-terminal domain
  Pfam annotation: Domain name=LRR_1; Domain location=109-131; Score =15.2; E_value=0.23; Accession=PF00560.23; Description=Leucine Rich Repeat
  Pfam annotation: Domain name=LRR_1; Domain location=133-155; Score =15.7; E_value=0.17; Accession=PF00560.23; Description=Leucine Rich Repeat
  Pfam annotation: Domain name=LRR_1; Domain location=157-179; Score =6.0; E_value=22; Accession=PF00560.23; Description=Leucine Rich Repeat
  Pfam annotation: Domain name=LRR_1; Domain location=181-203; Score =12.6; E_value=1.3; Accession=PF00560.23; Description=Leucine Rich Repeat
  Pfam annotation: Domain name=LRR_1; Domain location=205-227; Score =14.2; E_value=0.48; Accession=PF00560.23; Description=Leucine Rich Repeat
  Pfam annotation: Domain name=LRR_1; Domain location=229-251; Score =13.9; E_value=0.57; Accession=PF00560.23; Description=Leucine Rich Repeat
  Pfam annotation: Domain name=LRR_1; Domain location=253-274; Score =9.5; E_value=4.8; Accession=PF00560.23; Description=Leucine Rich Repeat
  Pfam annotation: Domain name=LRR_1; Domain location=276-298; Score =15.3; E_value=0.22; Accession=PF00560.23; Description=Leucine Rich Repeat
  Pfam annotation: Domain name=LRR_1; Domain location=300-322; Score =15.2; E_value=0.23; Accession=PF00560.23; Description=Leucine Rich Repeat
  Pfam annotation: Domain name=LRR_1; Domain location=324-346; Score =15.7; E_value=0.16; Accession=PF00560.23; Description=Leucine Rich Repeat
  Pfam annotation: Domain name=LRR_1; Domain location=348-370; Score =5.9; E_value=23; Accession=PF00560.23; Description=Leucine Rich Repeat
  Pfam annotation: Domain name=LRR_1; Domain location=400-418; Score =1.2; E_value=1.7e+02; Accession=PF00560.23; Description=Leucine Rich Repeat
  Pfam annotation: Domain name=LRR_1; Domain location=420-442; Score =14.9; E_value=0.3; Accession=PF00560.23; Description=Leucine Rich Repeat
  Pfam annotation: Domain name=LRR_1; Domain location=444-466; Score =13.8; E_value=0.63; Accession=PF00560.23; Description=Leucine Rich Repeat
  Pfam annotation: Domain name=LRR_1; Domain location=467-489; Score =15.8; E_value=0.16; Accession=PF00560.23; Description=Leucine Rich Repeat
  Pfam annotation: Domain name=LRR_1; Domain location=492-514; Score =2.6; E_value=92; Accession=PF00560.23; Description=Leucine Rich Repeat
  Pfam annotation: Domain name=LRR_1; Domain location=516-538; Score =10.8; E_value=2.7; Accession=PF00560.23; Description=Leucine Rich Repeat
  Pfam annotation: Domain name=LRR_1; Domain location=540-562; Score =19.7; E_value=0.01; Accession=PF00560.23; Description=Leucine Rich Repeat
  Pfam annotation: Domain name=LRR_1; Domain location=564-586; Score =17.0; E_value=0.066; Accession=PF00560.23; Description=Leucine Rich Repeat
  Pfam annotation: Domain name=LRR_1; Domain location=588-610; Score =8.6; E_value=7; Accession=PF00560.23; Description=Leucine Rich Repeat
  Pfam annotation: Domain name=LRR_1; Domain location=611-635; Score =0.7; E_value=2.1e+02; Accession=PF00560.23; Description=Leucine Rich Repeat
  Pfam annotation: Domain name=LRR_1; Domain location=85-107; Score =4.1; E_value=48; Accession=PF00560.23; Description=Leucine Rich Repeat
  Pfam annotation: Domain name=Pkinase; Domain location=704-939; Score =88.6; E_value=1.9e-23; Accession=PF00069.15; Description=Protein kinase domain
  Pfam annotation: Domain name=Pkinase_Tyr; Domain location=704-929; Score=59.4; E_value=4.1e-16; Accession=PF07714.7; Description =Protein tyrosine kinase
  Pfam module annotation: Pfam domain module=LRRNT_2::LRR_1::LRR_1::LRR_ 1::LRR_1::LRR_1::LRR_1::LRR_1::LRR_1::LRR_1::LRR_1::LRR_1::LRR_1: LRR_
  Pfam module annotation: Pfam domain module=Pkinase_Tyr; Domain location=36-77::109-131::133-155::157-179::181-203::205-227::229 -251::253-274::276-298::300-322::324-346::348-370::400-418::420 -442::444-466::467-489::...
  Pfam module annotation: Domain location=492-514::516-538::540 -562::564-586::588-610::611-635::85-107::704-939::704-929
MVLLLECLLLALVSLACSTINMAGTSLAAHPASTSNISDHFALVSFKSHIMSDPSRALATWGNQSVPTCRWRGVSCGLKGHRHGRVVALDLGELNLVGTITHALGNLTYLRLLNLSSNHIHGILPPELGNLHDLEDLQLSYNYIEGEIPSSLSNCSHLVNILIDVNQLQGGIPVELSSLRNVQSVNLAHNMLTGRIPSKIASLLSLKQLNLKFNNLTGEIPTEIGALVNLNFLDLGFNQFYGTIPGSLGNLSALTSLRIPSNELEGRIPTLKGLSSLTELELGKNKLEGTIPSWLGNISSLEIIDLQRNGIVGQIPESLGSLELLTILSLSSNRLSGSIPHELGNLQALTGLFIDNNELESTLPPSIFNISSLQILNETGFEARNDADWDFLASLTNCSNLKLLDVNTNSLQASLGKLKKLNELMFSNNSFSGSIPATLGNLTKLTILTLSSNVISGAIPSTLSNCPLEVLDLSHNNLSGPIPKELFFISTLSSFMDLAHNSLSGTLPLEVGNLKNLGELDFSSNMISGEIPISIGECQSLEYLNISGNLLQGTIPLSLGNLKGLLVLDLSYNNLSGTIPEILGNLKGLSSLNLSFNKFQGGLPTDGVFLNASVITVTGNDDLCGGIPQLKLPPCSNHTTKKPPQRLGMVALICGAVVFVTSVVVLSVFYQNCRKKKANLQISVINQQYMRVPYAELASATNGFASENLIGEGSFGSVYKGRMRGDGQHIAVAVKVLNLMQRGATQSFIAECETLRCARHRNLVKILTVCSRDGEQKSLDLAARLSIVIDVASAVDYLHQYKPTPIIHCDLKPSNVLLDSDMVAHVGDFGLARFLHQDKDKSSGWASMRGSIGYAAPEYGLGNEVSTHGDVYSFGILLLEIFTGKSPTDSEFGEAIGLRKPSGVFTWLIGYFYSPSPTRPTISDYWSKLPHHKLQLELLPRPVPPLPRQSSKLNPTSYLRALTGWSPPMAYPGDPRARPDLETCAVLASGDIKLSRDSLVGRAAVCQLNGNSHDTSPPHVEAALWDQLGIHKERLQILGIDRGWFVKGQFRTGATLSILKHGLSKGMDRWLVGNFGCAFALRGGREDTTEGMMRIGRIQAMEVAIFGAGLGGMGEALIVAVVEPQHKGTYPLKPPSIGKNVSFASPIATVLGATITGGHNSSVMCEERQNSVARVGSAASPNHDGDSLNHIPSDIAVEPDLPQPHVHETNGYSPLHILGAASEPTSTPQDQLSKTVPFSGPSTSTQMPIKTAAYAVTRHSTRLANKSKKRDGKGAIQIAQELLAHKLKDLAPNVADSHNDLVQQLVQHFDQPLSKGKIEAIKNLLENGK

SEQ ID NO: 60014 - protein, 103 aa, Zea mays
  Coding DNA Sequence Number=SeqID_18235
MGRAVRVKGTYWVRRRVVVKKERGTPELIGSPWRIVRGRIAAVFAVRCGGNDAADLWGHMSVSREDKRLTLRARVAEGIERARVEKAGGGVGLCAVGAEVGRK

SEQ ID NO: 60015 - protein, 109 aa, Zea mays
  Coding DNA Sequence Number=SeqID_18236
MGGGVSADPGRREPSARGQRNQSRGIFQGVVNEDDRSGHTCSGTAMEPIPCEGQSRGDAKLRLSIPTTPSHAPTCVTRTGGATAPPTRSLTTARSQRPSPQRIKLIIVV

SEQ ID NO: 60016 - protein, 67 aa, Zea mays
  Coding DNA Sequence Number=SeqID_18237
MGTYVVGRRVDELRRGHHHEHDGAPVLGVGQGWHCIRPLIYDEQPVVPECVAEDLPESNNLVKASVL

SEQ ID NO: 60017 - protein, 167 aa, Zea mays
  Coding DNA Sequence Number=SeqID_18238
MVVETPEKRPMTPLESRIVTASSSGFLDGAEISWWCGSVTALPPLSMLRLGVGNGTTDERVLIHAGRADEADVRLAAAGEPESVVGGGLGSCVPTARSWDGNAGVGVAAAGRAESVAGSDRGGGCGPSVDGGSSVAGAVVARGVCRAIAWRKGGGTNGLHYLLLNRY

SEQ ID NO: 60018 - protein, 107 aa, Zea mays
  Coding DNA Sequence Number=SeqID_18239
MEARIKDITCSRGLFEAELGVPGGAEQIMSQLKNKKTTKKGEETTVTKIKDITCSPKTKMLAVTVGDRYPPGPLEGKKASQKALGLLSRKAIPLWARGGLLMEWADA

SEQ ID NO: 60019 - protein, 183 aa, Zea mays
  Coding DNA Sequence Number=SeqID_18240
MKKMTGTYWWCKNRIHGAGRVMGVAGAGERGAPYSGKKRAGLATVWGGRGRGEGRGAVDRGTAGSVAGEENARGQKIVWATPTIGRGWRCGMRGEDGGMTAVESRASREGCNGWILWDDGVGGGSGGSKSRRCAIGWAPSMERVSEKISDRGWGGDHGVACTRGAEATTCFTRGDVDAHVPII

SEQ ID NO: 60020 - protein, 91 aa, Zea mays
  Coding DNA Sequence Number=SeqID_18241
MASGVEELRRVSTDGGRLTNGVVTGCYADGEVPAGNVDSEHELRRGTPARHDDDVTKRHQLCGGPCGDLVSQLIEEKSSLGLSDRLREGKG

SEQ ID NO: 60021 - protein, 363 aa, Zea mays
  Coding DNA Sequence Number=SeqID_18242
  Gene Ontology: Mol. function=oligopeptide transporter activity; Cellular component=integral to membrane; Biological process =oligopeptide transport
  Homolog annotation: Hit_ID=Q5VRJ9; Match level="QueryCoverage=99%, HitCoverage=47%, E-value=1e-170, Identity=78%"; Hit description =Putative isp4 protein
  Pfam annotation: Domain name=OPT; Domain location=15-363; Score=28.8; E_value=8.4e-11; Accession=PF03169.6; Description=OPT oligopeptide transporter protein
  Subcellular localization annotation: CTP_CleavageSite=63; ConfidenceScore=5.40e-01
VALTVPAWDDPATPALTFRTWVLGTASCAALSFLNAFFGYRKEPLTVTAVSAQVAVLPVGRLMAAALPERAFFRGRPCEFTLNPGPFSVKEHVLITIFANAGAGTVFAKNLVTSVRVFYGQHMSFLIALLLILTSQVMGFGWAGVFRRYLVEPAAMWWPSNLVQVSLFRALHEKERRRKGSMTRNQFFTVAFICSFAYYIFPGYLFQMLTSLSWICWVFPSSVIAQQLGSGLHGLGIGAVGLDWSSISSYLGSPLASPWFATANIAAAFFIVVYIITPINYWFNVYKARNFPIYSDGLYTVAGQKYNISSIMDSHFYFDTDAYEKSGPLYISTFFASSYGLSFACLTATVSHVLLFHGRLWAL

SEQ ID NO: 60022 - protein, 260 aa, Zea mays
  Coding DNA Sequence Number=SeqID_18243
  Gene Ontology: Biological process=regulation of transcription
  Homolog annotation: Hit_ID=Q9LWU9; Match level="QueryCoverage=50%, HitCoverage=28%, E-value=1e-35, Identity=52%"; Hit description =Putative gibberellin response modulator
MNCVLAAHHLLYDETGAAVVDFLGLARSTGATILLLGEHEDTLNSRRWEARFALALRYYATAFDVMGTAGLADAGPARAKAEEMFAREICNTVAFEAADRFERALDREDGDDEGLTLWWMDQAMYTVSAWTPVSDGGGGGSTVHSGSSLLPVSSCAPCWPDRHRVAMAAQQARRLPNHPLARGAGTHLVHVSSPPHDVAPLGASREPVLVIGDPGVLDEMPERGGLFRVLQCSPTSSGAAMLLLSDSSHLYSLMAAIPAD

SEQ ID NO: 60023 - protein, 196 aa, Zea mays
  Coding DNA Sequence Number=SeqID_18244
MAAGIGAYGCIASRGRVYDQPKSATPFPLIHLVDFRHHSHLLPVQAPPWARFSGKEMVALCFDSAGRTERERSTASAQDLTSKPLWKLRFNKIEIAEQELIEGKFLGHNRELRLARSQASASASASGEGLRLARSQASASASASGEGLRLSRPQASTSGGVTTSPDHSLGLRRSHCLARPRPQTDYATRDTSLPYL

SEQ ID NO: 60024 - protein, 375 aa, Zea mays
  Coding DNA Sequence Number=SeqID_18245
  Gene Ontology: Mol. function=protein serine/threonine kinase activity; Cellular component=phosphorylase kinase complex; Biological process=protein amino acid phosphorylation
  Homolog annotation: Hit_ID=Q8H643; Match level="QueryCoverage=99%, HitCoverage=82%, E-value=1e-151, Identity=68%"; Hit description =Calcium-dependent calmodulin-independent protein kinase CDPK- like
  Pfam annotation: Domain name=Pkinase; Domain location=1-207; Score =226.2; E_value=7.2e-65; Accession=PF00069.15; Description=Protein kinase domain
  Pfam annotation: Domain name=Pkinase_Tyr; Domain location=1-205; Score=-61.1; E_value=1e-08; Accession=PF07714.7; Description=Protein tyrosine kinase
  Pfam module annotation: Pfam domain module=Pkinase::Pkinase_Tyr; Domain location=1-207::1-205
MARLAGHPNVVGLKAVYEDRDSVHLVMELCAGGELFHRLHERGCFPEREAAALFRHLMEVVAHCHAKGIVHRDLKPENILLVSRSPQSPIKLADFGLATYTQPGRSLSGMVGSPFYIAPEVLSGGYNEAADVWSAGVILYILLSGIPPFWGKTKSKIFDCIRSMELRFPSDPWDRVSDSAKELVTGMLRRDPRLRLTAKQVLEHPWMQEHADPQDSCGQCHETGLQREGAGSCSFSTPLASRSRDVSFDTRGPIAWRGGGEDEATCCSPTFAAVCRSSFSAFITDPAPAALLGLLRLGWLWLLVRSEPAEPQPVAASSTPRTARGSTPRGVNGRRNHTIGGGGREHLDVAVESVIRWASCTNFSTAPSLRASLVC

SEQ ID NO: 60025 - protein, 76 aa, Zea mays
  Coding DNA Sequence Number=SeqID_18246
MALVAHQTVWLHIGQSGPKTQTNKDKGPKPTNGDCVSHLELKEMGPNPGAIHMCARIESYTYDDSWYRNECHIINI

SEQ ID NO: 60026 - protein, 86 aa, Zea mays
  Coding DNA Sequence Number=SeqID_18247
MANDWITTYCINEDGFPKVLYAATVRLGIPERPEYMSREFTEHGTESCEVTVHIGASDKYLEMQPWSVTATGSRMQDTVQLVARKA

SEQ ID NO: 60027 - protein, 276 aa, Zea mays
  Coding DNA Sequence Number=SeqID_18248
  Gene Ontology: Mol. function=hydrolase activity, acting on carbon -nitrogen (but not peptide) bonds, in cyclic amides; Cellular component=mitochondrion; Biological process=pyrimidine base biosynthetic process
  Homolog annotation: Hit_ID=Q8VXS9; Match level="QueryCoverage=92%, HitCoverage=81%, E-value=1e-101, Identity=63%"; Hit description =Dihydroorotase
  Pfam annotation: Domain name=Amidohydro_1; Domain location=16-276; Score=-19.4; E_value=0.0016; Accession=PF01979.10; Description =Amidohydrolase family
MASKSQLQDQLIITRPDDWHLHLREGGVLEAVVPHSARRVFDVMFLRSCGSARHFGRAIIMPNLKPPVTTTARAVEYREEIMRALPPGSSFEPLMTLYLTDNTSPEEIKLARKSGIIFAVKLYPAGATTNSQDGVTDIFGKCLPVLEEMVRQEMPLLVHGEVTDPHVDTFDREKVFIDKILAPLVQKLPQLKIVMEHITTMDAVNFIESCEEGQAIVSAVTNGSRRYFLGTDSAPHDKRNKECSCGCAGIYSAPVALSLYVKVFEEVISISSCYGC

SEQ ID NO: 60028 - protein, 274 aa, Zea mays
  Coding DNA Sequence Number=SeqID_18249
  Gene Ontology: Mol. function=protein phosphatase type 2A regulator activity; Cellular component=protein phosphatase type 2A complex; Biological process=signal transduction
  Homolog annotation: Hit_ID=Q8L6I5; Match level="QueryCoverage=71%, HitCoverage=39%, E-value=1e-97, Identity=87%"; Hit description =Hypothetical protein B'teta
  Pfam annotation: Domain name=B56; Domain location=1-271; Score=280.2; E_value=3.9e-81; Accession=PF01603.10; Description=Protein phosphatase 2A regulatory B subunit (B56 family)
MCCVVFDFADPTKDVREKEVKRQTLLELVDYITSATSKFPEPVVQEVVRMVSVNLFRVPSPAPRENKALESFDMEEEESVMDPAWSHLQIVYELFLRFIQSPETNAKLAKRYIDHGFIIRLLDLFDSEDPREREYLKTILHRIYDKFIRKAINNIFYRFIFETEKHNGIAELLEILGSIINGFALPLKEEHKLFLVCHFHMSSRIDHSRLPLPHDGIMPILAFLINDFSGLSEAVEEGDSWLSGYSLDTDRYAKNKVQRPRIEGRKGHMVACPL

SEQ ID NO: 60029 - protein, 192 aa, Zea mays
  Coding DNA Sequence Number=SeqID_18250
MPVLGRAIFVPCCGPPGVFGFSLEFSASVRSPGAYRGDRESKPDPVSCSFLAINSTARVEREHVGVIGIAGDGTRREARLPSRGTWPVGAGAIGGRSWRGRPAGQAKQPGAVSDATKVLQYNRAGGKNANGEPFCTDSCIGLETLNDSLPAYGYGFQKRPVTKFGAELFVLVKGWRRHPERWFSEMEEDTDG

SEQ ID NO: 60030 - protein, 115 aa, Zea mays
  Coding DNA Sequence Number=SeqID_18251
  Homolog annotation: Hit_ID=Q6ZAJ7; Match level="QueryCoverage=27%, HitCoverage=6%, E-value=8e-07, Identity=78%"; Hit description =Transporter-like protein
  Subcellular localization annotation: CTP_CleavageSite=61; ConfidenceScore=5.51e-01
MPTSLYMAGSNISSIFSGTDAMFTNTSVHRRRDVTTASEDHSFPLRFAAGDDASTTGRMAMVMSVMPLAPTSMVMANPNLGIEAADDKIWGKRLKDGARAEGATKSGMHVYFGGR

SEQ ID NO: 60031 - protein, 141 aa, Zea mays
  Coding DNA Sequence Number=SeqID_18252
MGKSKKGGGSSHHSGNQRKREPTPPSEDFSDSEYSEEEFSSESEGSPAPASPPTSSDDSDDSQGIAAVVWTYIWAVERAGLEGSDESEYSSDEENSSDSSEGGGGGDGDDDGGDGDGGGDSGKGGSGDGSGGSKGSNKASG

SEQ ID NO: 60032 - protein, 551 aa, Zea mays
  Coding DNA Sequence Number=SeqID_18253
  Gene Ontology: Mol. function=transketolase activity; Cellular component=chloroplast; Biological process=pentose-phosphate shunt, oxidative branch
  Homolog annotation: Hit_ID=Q7SIC9; Match level="QueryCoverage=97%, HitCoverage=85%, E-value=0.0, Identity=92%"; Hit description =Transketolase, chloroplast
  Pfam annotation: Domain name=Transket_pyr; Domain location=240-415; Score=231.3; E_value=2.1e-66; Accession=PF02779.14; Description =Transketolase, pyrimidine binding dom
  Pfam annotation: Domain name=Transketolase_C; Domain location=427 -544; Score=19.7; E_value=8.5e-05; Accession=PF02780.10; Description =Transketolase, C-terminal domain
  Pfam annotation: Domain name=Transketolase_N; Domain location=1-225; Score=283.4; E_value=4.5e-82; Accession=PF00456.11; Description =Transketolase, thiamine diphosphate b
  Pfam module annotation: Pfam domain module=Transket_pyr::Transketolase _C::Transketolase_N; Domain location=240-415::427-544::1-225
MRSRVWLVGSAEIAGEEDLKQFRQWGSRTPGHPENFETPGVEVTTGPLGQGIANAVGLALAEKHLAARFNKPDSEIVDHYTYVILGDGCQMEGIANEACSLAGHWGLGKLIAFYDDNHISIDGDTEIAFTEDVTTTIGFGSPNKANSYSVHGSALGAKEVEATRQNLGWPYDTFFVPEDVKSHWSRHTPEGAALEADWNAKFAEYEKKYADDAATLKSIITGELPTGWVDALPKYTPESPGDATRNLSQQCLNALANVVPGLIGGSADLASSNMTLLKMFGDFQKDTAEERNVRFGVREHGMGAICNGIALHSPGFVPYCATFFVFTDYMRGAMRISALSEAGVIYVMTHDSIGLGEDGPTHQPIEHLVSFRAMPNILMLRPADGNETAGAYKVAVLNRKRPSILALSRQKLPHLPGTSIEGVEKGGYTISDNSTGNKPDIIVMGTGSELEIAAKAADELRKEGKTVRVVSFVSWELFDEQSDEYKESVLPAAVTARISIEAGSTLGWQKYVGAQGKAIGIDKFGASAPAGTIYKEYGITVESIIAAAKSF

SEQ ID NO: 60033 - protein, 113 aa, Zea mays
  Coding DNA Sequence Number=SeqID_18254
MPTAFPGTRPPRNPDAKRNWEGSELGTCVLTTIPVVTRSAHDDPRICNGGVEFPAPQSGIPPGFATNRPATPGRTTTAYPNGENVARAGNPRSGAAMFLPTVWIPRRGCEVHT

SEQ ID NO: 60034 - protein, 215 aa, Zea mays
  Coding DNA Sequence Number=SeqID_18255
  Gene Ontology: Mol. function=3-phosphoshikimate 1-carboxyvinyltransfer ase activity; Cellular component=chloroplast; Biological process =aromatic amino acid family biosynthetic process, shikimate pathway
  Homolog annotation: Hit_ID=Q93VK6; Match level="QueryCoverage=93%, HitCoverage=39%, E-value=1e-99, Identity=88%"; Hit description=3 -phosphoshikimate 1-carboxyvinyltransferase
  Pfam annotation: Domain name=EPSP_synthase; Domain location=1-209; Score=13.4; E_value=3.6e-12; Accession=PF00275.10; Description=EPSP synthase (3-phosphoshikimate 1-carboxyvinyltransferase)
MYTIETWFIRESRSPKNAYVEGDASSASYFLAGAAITGGTVTVEGCGTTSLQGDVKFAEVLEMMGAKVTWTETSVTVTGPPREPFGRKHLKAIDVNMNKMPDVAMTLAVVALFADGPTAIRDVASWRVKETERMVAIRTELTKLGASVEEGPDYCIITPPEKLNVTAIDTYDDHRMAMAFSLAACAEVPVTIRDPGCTRKTFPDYFDVLSTFVKN

SEQ ID NO: 60035 - protein, 165 aa, Zea mays
  Coding DNA Sequence Number=SeqID_18256
  Gene Ontology: Mol. function=structural constituent of ribosome; Cellular component=ribonucleoprotein complex; Biological process =translation
  Homolog annotation: Hit_ID=P35686; Match level="QueryCoverage=98%, HitCoverage=97%, E-value=7e-52, Identity=68%"; Hit description=40S ribosomal protein S20
  Pfam annotation: Domain name=Ribosomal_S10; Domain location=28-160; Score=145.3; E_value=1.6e-40; Accession=PF00338.12; Description =Ribosomal protein S10pS20e
MAADMAYAPPMKAGKAGFEAGMMDPQHRIRITLSSKSVKNLEKVCGDLVKGAKGKELKVKGPVRMPTKVLHITTRKSPCGEGDLSLPPPQLLTSNRKVNIWVMSFSDYGFVIFWTCWAGTNTWDRFEMRIHKRVIDLVSTPDVVKQITSITIEPGVEVEVTISDA

SEQ ID NO: 60036 - protein, 105 aa, Zea mays
  Coding DNA Sequence Number=SeqID_18257
MEALNLSWNGLLALVLNVEVVSSPGGCEIDDFFPPWRKIILRVCPATFLVVGGGDRATMARQDAVPRSDVKPVNDAGTPAGDLSGIVLAPETTTGCLFPRNVPTP

SEQ ID NO: 60037 - protein, 288 aa, Zea mays
  Coding DNA Sequence Number=SeqID_18258
MAIPVARVHLAVAHAALPALVPTPPKCEMLPLLPTPCVAVVLPKPLAKPSRADSDERWDARKTMTGLAASTDQSSTSSSPRSTAGSVWSSARRRGSASRKIATTPPKPGRADSDERWDVRKTMTGLAASTDQSSASSTSSPRSTADSVWSSAQRRGSSCKSATALPPKPGRADSAVRWDAHKKTAIPASSSSSSSSGTSSHVSSGKWTMSRASSSAERWDVHKKYRPPQAAVALDDGESSTASSNDIDTDKEEIVWKPRAIYAEPCFISAAPAPSMLPMPTAILLRVA

SEQ ID NO: 60038 - protein, 359 aa, Zea mays
  Coding DNA Sequence Number=SeqID_18259
  Homolog annotation: Hit_ID=Q53QH2; Match level="QueryCoverage=77%, HitCoverage=89%, E-value=7e-74, Identity=54%"; Hit description=F-box domain, putative
  Pfam annotation: Domain name=F-box; Domain location=62-109; Score =29.6; E_value=1.1e-05; Accession=PF00646.23; Description=F-box domain
MYGIAMDTGRSLPIYYKPTNWRSSETDTTKTFSFPRPASRHRSHGCWCDGSIFPGLRRRRHDHIEDLPADVLALVLRRLDGASLAAVGCASSGLHALATDPATWRALCLAMWPAVRDLPCVDHRALFADAFPVPCPVSPPTPTPQPLPARLVSAVDLRHAGACVLSCVVGTDAASDWFLGAPFRVDVDAPLHEGFASSPAAVAPADLELSWVLVDPATGRALSAASRRAVSVDRKWLTGDTVARFAVVIGGGVALEAAVTCDDGRYGHVREVSLRVEDADGAGVSGRDGLAAVAAAMAAPRRGCRGAGEDAARVRYEDFVRERRVRKEWKARREGILDLCCSGVGAAAFLGFLLMLTFR

SEQ ID NO: 60039 - protein, 306 aa, Zea mays
  Coding DNA Sequence Number=SeqID_18260
MAIPVARVHLAMEHAALPPLLPAPPNCKMLPLLPTPPCVATIILPKPHANEPSRADSDERWDAHKTRPASAESTASSRPRSFSCGAAGRRSTYRMNATSPPRPGLAADSAERWNAHKKAAASTASSSPGTSSLKGNTCTISRSHASSTERWDAHKKAASPSSSSTTTSSSSSGTSFFKGSPCTMISRSRASSTERWDAHKKAASPASSSSSCTSSLKGSPCTMISRSRASCTERWDAHRKRRCPPQAALLDDDGERSSTGSNDNIETEEIVWKPRPTAIYAEPCFISTAPEPSMLPMPTAFLASVA

SEQ ID NO: 60040 - protein, 274 aa, Zea mays
  Coding DNA Sequence Number=SeqID_18261
MAIPVARVHLAVAHAALPALVPTPPKCEMLPLLPTPCVAVVLPKPLAKPSRADSDERWDARKTMTGLAASTDQSSTSSSPRSTAGSVWSSARRRGSASRKIATTPPKPGRADSDERWDISPQHRQRQALVPPPTASGAAPNDADPPAKARQRRAPPKPGRADSAVRWDAHKKTAIPASSSSSGTSSHVSSGKWTMSRASSSAERWDVHKKYRPPQAAVALDDGESSTASSNDIDTDKEEIVWKPRTIYAEPCFISAAPAPSMLPMPTAFLLRVA

SEQ ID NO: 60041 - protein, 749 aa, Zea mays
  Coding DNA Sequence Number=SeqID_18262
  Gene Ontology: Mol. function=cation:chloride symporter activity; Cellular component=integral to membrane; Biological process=sodium ion transport
  Homolog annotation: Hit_ID=Q6Z0E2; Match level="QueryCoverage=96%, HitCoverage=73%, E-value=0.0, Identity=81%"; Hit description =Putative Na+/K+/Cl-cotransport protein
  Pfam annotation: Domain name=AA_permease; Domain location=9-400; Score=-67.4; E_value=0.00061; Accession=PF00324.11; Description =Amino acid permease
MVNNESWFLQSETITVVNNTLVNGTTKSGATTISTPSLHDLQIYGVIVTILLCFIVFGGVKIINKVAPAFLVPVLFSILCIYIGVSIAPEPGASKGITGLSIVTLAENWGSEYQPTNDAGVPDPNGSIYWDFNALLGLFFPAVTGIMAGSNRSASLRDTQSSIPVGTLSATLSTTVMYLLSVFIFGALATREELLTDRLLAAAIAWPGPAMIYIGIILSTLGAALQSMTGAPRLLAAIANDDILPILNCFKAYEGSEPHVATLFTSFICVACVVIGNLDLITPTITMFFLLCYAGVNLSCFLLDLLDAPSWRPRWKIHHWLLSLVGATQCIVIMFMISWTFTVVSLALASLIYYYVSLKGKAGDWGDGFKSAYFQLALRSLRSLGANSVHPKNWYPIPLIFCRPWGKLPENVPCHPKLADFANCMKKKGRGMSIFVSIIDGDYHESVEEANAAYRQLSAYIDYKQCEGVAEIIVARSISDGFRSIVQIMGLGNLKPNIVVMRYPEIWRRENLAQIPSSFTSIINDCIIANKAIVIVKGLDEWPNEFQRLYGTIDLYWIVRDGGLMLLLSQLLLARDGFESCKIQVFCIAEEGTEAEELKADVKKFLYDLRMRAEVIVVTMKSMEAHSEISPNAKKDPQEEYASAQDRIRAYLSQMKEDAQREGRPLMEDGRQVVVNEEKVEKFLYTMLKLNTTIVKYSMMAAVVLVSLPPPPLNHPAYCYMEYMDLLVVNVPRMLIVRGYRRDVVTLFT

SEQ ID NO: 60042 - protein, 98 aa, Zea mays
  Coding DNA Sequence Number=SeqID_18263
MSGEHSKNEKVLSGGKPEPLGSMPENTMPAGGMKPSDDKHKHKEHEEESTGSTKLHKKKGNKKKKMMKVVYYAADSSVASTSDVESTSSKCQERKKIN

SEQ ID NO: 60043 - protein, 309 aa, Zea mays
  Coding DNA Sequence Number=SeqID_18264
  Gene Ontology: Mol. function=DNA binding; Cellular component=nucleus; Biological process=regulation of transcription
  Homolog annotation: Hit_ID=Q53QG7; Match level="QueryCoverage=55%, HitCoverage=60%, E-value=2e-63, Identity=68%"; Hit description=No apical meristem (NAM) protein, putative
  Pfam annotation: Domain name=NAM; Domain location=16-150; Score =147.0; E_value=5e-41; Accession=PF02365.6; Description=No apical meristem (NAM) protein
MMESSGGSGSSDPLLLAPGFRFYPTEEELLTFYLRHRLAGTKPVVEHLIPVMDIYGYHPSELQAMAGAANVCDTEQWFFFCPRAERELHGGRPARTTPSGYWKATGSPSYVYSSSPNNRVIGEKRTMVFYQGRAPTGNRTRWKMNEYKAVADDAPPAPGAPVMLRNDFSVCRVYISTGTLRSFDRRPLNRPGGLAVVSAHQQAVHCGYQQQQLQPQLPPPAAVAKTTTRHHHQQMHAAVVVDDDAADSNGRHAAAAENSHDSSSSGSRGGVDGAEDAAMAIDWDSLIPPVDDLAFRGVDDLTRVIWPHN

SEQ ID NO: 60044 - protein, 94 aa, Zea mays
  Coding DNA Sequence Number=SeqID_18265
MAFTEAVSQAMDGLPTAVYSDAVTLLSRWRPGGKRQTPARVILIGCRASGYGGQLTASSAVKIFPPPAVIRTQGARIATQARIVAHAHRRRQVH

SEQ ID NO: 60045 - protein, 127 aa, Zea mays
  Coding DNA Sequence Number=SeqID_18266
  Gene Ontology: Mol. function=kinase activity; Cellular component =ornithine carbamoyltransferase complex; Biological process=amino acid metabolic process
  Homolog annotation: Hit_ID=Q6QP54; Match level="QueryCoverage=69%, HitCoverage=34%, E-value=4e-13, Identity=52%"; Hit description =Putative kinase
MPRIFPPQPDEASALSKTDRGGDEERSDVELAVTEHPVMMALPVDVAGLCPRSGDVEAPPKPRSSLSSMGRGRARAPGVGRGGGCSAEARAESEPWGSGEPEFVIFWGLARVRALGRAERSSPSSGA

SEQ ID NO: 60046 - protein, 57 aa, Zea mays
  Coding DNA Sequence Number=SeqID_18267
MAGKILISTVGRQINGWRSLPYPEHPRRRRRPAPTAEAMAGGPIPVFQPPKPNSELS

SEQ ID NO: 60047 - protein, 234 aa, Zea mays
  Coding DNA Sequence Number=SeqID_18268
MDAGARRACASTTRGAGAGVGLWGWARQSRVGAWRQSWEEGDRQVRRVKRWGGGTDLREAEAAWIAAFLPDPIRGDDARVLAILVRSEGGGVDSARWCELCRWCRTQDGRGAGFWWGRAGTAELAAGVAVEGSGGRGGGFHGGGGERRASALPGSPAAAPAAAATASRASAATLILEAQRPRHIPYAAHAQPGLLDPDLSPGSGGWELWTASGMEDGMGAPCKEGSADGWDLAV

SEQ ID NO: 60048 - protein, 90 aa, Zea mays
  Coding DNA Sequence Number=SeqID_18269
MRLHIVVVVLLVTTYVAPTASLQQYHKPSRISGIGPSDATKIWRRVWKFSLVFSIFEDFGISVDCVATSEAEKEAYEGAEKKRKATEEIN

SEQ ID NO: 60049 - protein, 130 aa, Zea mays
  Coding DNA Sequence Number=SeqID_18270
  Subcellular localization annotation: CTP_CleavageSite=22; ConfidenceScore=5.06e-01
MPGGALYQVDPISPPQLAESQRCQLPRSTYHPPRTITTRTRNLPGGPLLLQAIGETLDERGRAILDDKPENTITCPKNQTSQFSIRLNTRDKQKTQNPIRLPKRRLVQDHSWHREQLKKSINTKTINTVK

SEQ ID NO: 60050 - protein, 49 aa, Zea mays
  Coding DNA Sequence Number=SeqID_18271
MAVLGLGSLGRGGDGALGRGRLGRGGDMPEHVAYSRSISVAREPSEEVC

SEQ ID NO: 60051 - protein, 135 aa, Zea mays
  Coding DNA Sequence Number=SeqID_18272
  Gene Ontology: Mol. function=nucleic acid binding; Biological process= DNA integration
  Homolog annotation: Hit_ID=UPI00004C1778; Match level="QueryCoverage =87%, HitCoverage=18%, E-value=9e-34, Identity=65%"; Hit description =UPI00004C1778 related cluster
MAERKQETRKFPRLTMTRLDDALRLEKFTSVHFKRWQVKATIWLTAMNVFHMTMGKLEGDITSKEEKKFAEANTLSVVYIPAYLSTVCVILRCIIHIGRNYGMHLLQNMVHLMLAVNYMSWRAFMIIRWLIIALV

SEQ ID NO: 60052 - protein, 40 aa, Zea mays
  Coding DNA Sequence Number=SeqID_18273
MEHQTWNQSTNEADERSSNGRTWPCGRVCRVFIRTGPLNL

SEQ ID NO: 60053 - protein, 472 aa, Zea mays
  Coding DNA Sequence Number=SeqID_18274
  Gene Ontology: Mol. function=DNA binding; Cellular component =mitochondrion; Biological process=DNA integration
  Homolog annotation: Hit_ID=UPI00004C1731; Match level="QueryCoverage =95%, HitCoverage=33%, E-value=0.0, Identity=77%"; Hit description =UPI00004C1731 related cluster
  Pfam annotation: Domain name=RnaseH; Domain location=37-165; Score= -3.6; E_value=0.00012; Accession=PF00075.14; Description=RNase H
  Pfam annotation: Domain name=rve; Domain location=211-362; Score =85.3; E_value=1.9e-22; Accession=PF00665.16; Description=Integrase core domain
  Pfam module annotation: Pfam domain module=RnaseH::rve; Domain location=37-165::211-362
MGETISFAPQKAIKSQVLADFVAEWVDTQLPTAPIQPELWTMFFDGSLMKTGAGAGLLFISPLGKHLRYVLRLHFPASNNVAKYEALVNGLWIAIELGVRRLDARGDSQLVIDQVMKNSHCRDPKMEAYCDEVRRLEDKFYGLELNHIARRYNETADELAKTASRRTTVPPDVFSRDLHQPSVKIDDMPKPEATSAEPEAPSAQPEVPSAQSEVPSARPEKAPGGYTHLLVAIDKFSKWIEVRPLNSIRSEQAVAFFTNIIHRFGVPNSIITDNGTQFTGRKFLDFCEDHHIRVDWAAVAHPMTNGQVERANDMILQGLKPRIYNDLNKFGKRWMKELPSMVWSLRTTPSRATGFMPFFLVYGVEAILPTDLEYGSPRTRAYADQSNQANREDSLDQLEEARDMALLHSARYQQSLRRYHARGVRSRDLQVGDLVLRLRQDARGRHKLTPPWEGPFVIAKVLKPGTYKLANS

SEQ ID NO: 60054 - protein, 523 aa, Zea mays
  Coding DNA Sequence Number=SeqID_18275
  Gene Ontology: Mol. function=triacylglycerol lipase activity; Biological process=lipid metabolic process
  Homolog annotation: Hit_ID=Q9AUS6; Match level="QueryCoverage=92%, HitCoverage=99%, E-value=0.0, Identity=68%"; Hit description =Putative lipase
  Pfam annotation: Domain name=Lipase_3; Domain location=257-378; Score= 89.1; E_value=1.3e-23; Accession=PF01764.16; Description=Lipase (class 3)
  Subcellular localization annotation: CTP_CleavageSite=60; ConfidenceScore=5.71e-01
MSAAVTAPPCHSRPSPLNPSSRATPSPSSNGGKPNAVSTTRRHLANLDRLLVKPPPLPLPAQPRKQPTGVPVPGDGEASPDNRSGHGGLLNALNLSTFLPFTRKAAVDELSPRSLAYMQRLLTLSPRLSPKGSIAGEWRRYHGEGGWEGLLDPLDQNLRRELLRYGDFVQAAYTAFHSMPAAAEASSSSGQQRTLVLPDRTYHPTRSLFASSSLSIPPWAQRRSAPNWLTQRTSFVGYVAVCDNEQEVRRMGRRDVAIVLRGTATCPEWAENLRASLVPLTADDDASAPKVAKGFLSLYKTPGDHAPSLSAAIVEEVKRLMETAPQITARPPIAVVSFGGPKTGNRAFAERLQRERGVNVLRVVNAGDVVTRVPAPIAREGYVHAGGAELRLHSSDSPCLRPDAGPACCHDLEAYLHLLDGFAGSGRPFRPDASRSVARLLTYQRPNVKLAYVERARMLGFEQASPRTATANGAAADGHVSSAAMATTRDGIGGNNGGPRWRAGSSRSEVAATMSWTEREPYD

SEQ ID NO: 60055 - protein, 72 aa, Zea mays
  Coding DNA Sequence Number=SeqID_18276
  Subcellular localization annotation: CTP_CleavageSite=58; ConfidenceScore=5.28e-01
MGPAWRPLGPCSRLTFPWRMGPTATALLPGRKNRHGSCATPVYSYGSESTAGAATRVVAAFDVGVTGNNVFL

SEQ ID NO: 60056 - protein, 327 aa, Zea mays
  Coding DNA Sequence Number=SeqID_18277
  Homolog annotation: Hit_ID=Q5Z8H3; Match level="QueryCoverage=53%, HitCoverage=29%, E-value=1e-07, Identity=30%"; Hit description =Putative neurofilament triplet H1 protein
  Pfam annotation: Domain name=CaM_binding; Domain location=234-324; Score=-4.2; E_value=0.00057; Accession=PF07839.2; Description=Plant calmodulin-binding domain
  Subcellular localization annotation: CTP_CleavageSite=94; ConfidenceScore=5.80e-01
MATSKKDPPNPSRGRTSPNLMSSSSESSGHGYGARRARSVPSSAHRKFGSSSPSVSASGSTDVHHSSLFNAGRSISSRTMGSSIQGTKAQPFPSAASKPTLAKEKSDKRVMLPGAAQGDKVQPLSTAQSPGAAARKRLDTVNGATTNSKAKSVSQKAMGASSARKEKHKDPSMQIKGTECINTTTSIEEHLHKELPDPVDLKSMEMTVPDQHEPSFNEPEHVLKDDEKSEGHFSEEKVDAGANEIHNGGQDDNGGVKTIYECGIVEKKADRSVDKTVPKTEVAQVWRKDDPKGNDVIEETKSKLLLERKSRVKALVGAFETVLSFKE

SEQ ID NO: 60057 - protein, 845 aa, Zea mays
  Coding DNA Sequence Number=SeqID_18278
  Gene Ontology: Mol. function=oxidoreductase activity; Cellular component=extracellular space; Biological process=cell proliferation
  Homolog annotation: Hit_ID=Q2QMP1; Match level="QueryCoverage=38%, HitCoverage=27%, E-value=7e-30, Identity=33%"; Hit description=MATH domain containing protein, expressed
TKQKKNRKAKDKERDEKCEVKILERLRDETAIDNSDGLPSQVEVIAKIDALEEGSSDGSDMSNSFSVYHDLFKKLSLTQLLEKNIEGQKLLKKHFEARDAKAKEEPSDSSNSLDKPPDVPEIPVHSSEDTVDLKVNGTPKKDASVVNPVLEDSVSGIPVTANNEPVPSPTTTKMDPVSNKVNGSSLKMKVTMASPCSKSHPADMDKDASLPSKSPRTNRAAPVPPKLPSADKATLVPSKLPSVDKATPVPQKSPLVNKVAQARPKSPAVDKATPHRPKSPAVDKATPVRSQSPAVDKATLVRPQSPAVDKATPVRPQSAAVDKATPVRPKSPAIDKATPIAPKSPPVDKASPALPKSLSGAKDALFPSRSLQIDKFTPAAPRLSQDDKAALPSSEQSHISPATSSEAQGATTRKVTTTTSLSEAAAAWRPSSAPVLPTPRSTGPAASHIQTSTLLSRSMSEAAGRRPVNDPSFSAPSYTPQTYRNAIIGKSGLSMTSASLAYQPSSLDQDTAPSRPLSAYASSTVMMPPAGRSDQSSARHGFKSGPGKLEAHDGWQQWKGDSNVDMHLWRDHAPYQQMTNSQAYEQSRRDDTYQQACSRGTEKFSRHAGLQARQQFQTETPASHVWHQPQGPVAEEFPHLDIINDLLEEDQINGSIPESFRQDYNVFGLPFSPRGNLSDMEMASVRSPARFNSPKYDGGLSGAYDMNAVNGLRERQFPSLDIYSNGLSDVSASKPWLNGSASPSVSLGVNTNGYHPQLNLAVACGREKNGMKVSVNVEPTTKSGYHLLTQNGTRATLLDYSLLDGATAKGHVAATTDQHVSTSSFDLDVSWQAVGRQHQTDDTGL

SEQ ID NO: 60058 - protein, 333 aa, Zea mays
  Coding DNA Sequence Number=SeqID_18279
  Homolog annotation: Hit_ID=Q2QMP1; Match level="QueryCoverage=80%, HitCoverage=24%, E-value=5e-99, Identity=67%"; Hit description=MATH domain containing protein, expressed
MVDMFLFIKWSVGARGDWGARSIFLYILKDVMSLIIFHYSFALLIMTNFSQFTIAVANIDPKKMKYSGELNLVCFLLGRFWKKEHDWGWKKFMELSKIQDGFLVDDVLEIIAQVQVIREKVDRPFRCLDRPYRRELIRIYMTNVEQIYRRFIEERRSKLSKLIEDKIKWSSFRAFWSAIDPNTRHRMSREKTDTILKMLVKQFFVEKEVTSTLVMDSLYTSLKALEYQMKGRKGKTKLADLEELPAPMVHVDMDMFILADDVIALLERAALEPLPCQPLAPKDDKTSQPRMKVSTFLALEPRINYVRTIFLLVSHAYLQIFEHAISMFSALSW

SEQ ID NO: 60059 - protein, 687 aa, Zea mays
  Coding DNA Sequence Number=SeqID_18280
  Gene Ontology: Mol. function=metal ion binding; Biological process =RNA-dependent DNA replication
  Homolog annotation: Hit_ID=Q2QZM2; Match level="QueryCoverage=89%, HitCoverage=96%, E-value=6e-69, Identity=30%"; Hit description =Expressed protein
  Pfam annotation: Domain name=DUF594; Domain location=618-677; Score =66.2; E_value=1.1e-16; Accession=PF04578.4; Description=Protein of unknown function, DUF594
MRGIRESLRTVQGSLLRLEAVVLLSALILAALVLYGSANRRSSDKLLRGAMWMAYSMSYVVVSYAVGIIQDGPFRGETFVLWAAALLLIQASAYSAPVHSRRDVDQRKKLLLQHVLQTGLVLWLIVNATGHNASYRAAIWAFWALNVLKTAAKIAEMIEVSRPDLSVRVVAEYMAEYMAEADGVQQQPAADPATMQGYAYIFHGEEVMEPVIHTGGHRVRENMLSQSAVKSVVTIDQVYQWIDQQPDSDVEKDRAKDFCLAFALFKLLKRRFYGYVPAEAGSEKARSLVLNGLIHMDATGPDAAFRVVEAELAFLYDFFYTRNIVLVGAKTYICIAVAVAGLTMWTAFFGTLGPGYHRLHIGVRNLDRSVTMLLVVITAGLEVFQAVAGFSSNWRYVKTVYRCVRDDRRWSGRRLGHHLWWKQSIAPPETRYWEDKVGQYVLLKRFERRPCNLLSWLTLYLVEPRRQGQKRGRRKPLPPEVKRAVLLWLKQNHCHLSNGVATLRKHHLLPRLAWACRLPMVTDQILAWHVVTTSCDWSYSFRPAGRFAAGDDHHRLVAKKLSNYCAYLVAFVPEMLPDPSYNAEQIFDTAVQQARDHLDGCKTHSSIIARLEEMEIAERPAAFGVDDARRWEVLAEFWTELVLFLAPSDNVDIHAEMLGAGGEFMTQLWALLSHAGVLERPPIMQRQ

SEQ ID NO: 60060 - protein, 152 aa, Zea mays
  Coding DNA Sequence Number=SeqID_18281
MVSASPDPGLGLDLDLGRQTRPRPRRSLRLARSRARTDHVKAGSVFDNILICDEPDYARHVVDETFAANKEAEKEAFEGAEKKRKAREEEEARRAREEGERRRRERDRDRGRDRYISSICHAGSLFPLGIIFVLSLPYKRQRHRHYDYHDEL

SEQ ID NO: 60061 - protein, 120 aa, Zea mays
  Coding DNA Sequence Number=SeqID_18282
  Subcellular localization annotation: CTP_CleavageSite=34; ConfidenceScore=5.32e-01
MAPETGLGCCQPHPGGWHSSRSRAVSAVFLSVVKDMQKSSPRRALQGQDAVLVFSSVLVKKGFGRCKRLYWSTIIIGEDPNNTSGNGDNDVDTNFSVGYDQSSTMAIPVMQGGNVVGDHN

SEQ ID NO: 60062 - protein, 151 aa, Zea mays
  Coding DNA Sequence Number=SeqID_18283
MGRSRRGRGWPRRADGKCKRAPSPPSEDFGDSEYSEEASSESDCSSAPVSPPASSEDLDDSMGLSTAAQVYWRSIERARLDEVDSSDSSEEWSGGDGNDNGDDSGDDSEGDSGDDGVRVTVVAAAATTARATTVAAATVAWVTAATARPVA

SEQ ID NO: 60063 - protein, 256 aa, Zea mays
  Coding DNA Sequence Number=SeqID_18284
MAAAADGQRARQHRGTGTGTEPSRIDHEPQDLLQRQRRRAAEEALKAKAKAKATTDVSASARAVGVSEDPATVTTMWIADGSTGRQRSQIDKHVLSRAPCNATAESRIGHAVNIPFFLGGQMISLLTPPYVDGKAGMKDETHKVQCVPEAMSIPGDRAACRIVRRSANDRCAVPEEFVDHPSTSQKASHSHNTARRRRLGYLKDCNQSRAQHKDQRPLSYASRRAERCVCMGHSSYRFGFGFGRTFKLAASSVLLK

SEQ ID NO: 60064 - protein, 59 aa, Zea mays
  Coding DNA Sequence Number=SeqID_18285
MAALAEFAAVSGATPTLLPVGSSRTHTFLEIPMAMTDDRGGEQNSNSIDNRRSMRNLSI

SEQ ID NO: 60065 - protein, 38 aa, Zea mays
  Coding DNA Sequence Number=SeqID_18286
MGDYVLGHVRSKVCGQVHSGLYVKNHRKRPTGYLVVIF

SEQ ID NO: 60066 - protein, 53 aa, Zea mays
  Coding DNA Sequence Number=SeqID_18287
MANEVAANEARTIIIVRRAAACRRDNIIFIVPNRGDASQCVVDIYAGVAILSA

SEQ ID NO: 60067 - protein, 43 aa, Zea mays
  Coding DNA Sequence Number=SeqID_18288
MESSATEYTGSIPEATRALSLSQFDWFHLNSHLPTTMAEPELR

SEQ ID NO: 60068 - protein, 1473 aa, Zea mays
  Coding DNA Sequence Number=SeqID_18289
  Gene Ontology: Mol. function=RNA-directed DNA polymerase activity; Cellular component=chromatin; Biological process=chromatin assembly or disassembly
  Homolog annotation: Hit_ID=Q108V0; Match level="QueryCoverage=86%, HitCoverage=78%, E-value=0.0, Identity=64%"; Hit description =Expressed protein
CSFLFAPEELNQSELTSLYTLKGKGHDVITQTSLNHDIPEGRSKEKLSSDPFLLDNVVAADYFDSQADYQQLENYQDCELRAQEFHRIALNLCMQQEPTLEGHNAGIDALLLAAECYVNPFFLLGFQSNLEPLDKIERIHSELMQGNASSVSKNLHLKDFNKKTIYNLENKRDRSVIDLLLQAARFDFEYHGKIPEGELYPNIAEDGKRSVEISPEALQFADAVTLVRKNQAMLCHFIMKQFQRKGHLGSEILLQSLLFLLHSATDLFCPPENVVDIILKSAESLNDQLTCLYSFFSAGNKKLDRIKIHGLRRRWMLLQKLVLASSGSDSTRELARNKRDGFHFRSLVPPSTWIQKISDFSMFSSPLPRFFGWMAVSCYAKEYLNEKLFLASDFSQLTSLLSIYMDELCLMDGVAIPKVRSAKGEQFSCTDLFLKKETTLSDQPSMTEQFKILLPELHFFFPSMGKLFNAFGESILEAVGLQLKCLPNSAIPDVLCWFSELCLWPYLEHIKEHLVVANGVSYIRGSIAANAKSVVFYLLESIVTEHLEAVIPEMPRIVHILVSLCRASYTDVAFLKSVLCLIKPLISYFLRKGTNETKVLGHIKEGSNFELLCFEELFEIVRCGKDSVDTTEDNIQAPLVIFILGSMFLDFSFERRIEMLGSLLVWIDCISSDPPSLLCNYLQGFQTLLDGFEAVLIQNIELLGVGILSATNSSIESSDSLGIDGTMLLEKKAQDNEEQTLMKSVTYCENDGNHKGLRNLHPNSIIEFCGTLEKFILHLTSYIEDSWKWHHQLASRISLSMAKCLLFAKFLKSIAQEDTISSSSEQDVAVKISCELAQKHWQSALEGLGDTILINQETQFWQVASAMLDYIMGIPNVLAWGNVLNTTCSAVKHFCSHAPRLSWRLQTDKWLSLLVSGGIEGFKNSEICLIDLFCTMLNHSEPEQRFVAVQQLGRIINSTSSTEADLKYPNYDQNFLISVSTVTSLLVTHTWDRVAALALHDSSMLLRNHAMALLTEYVPFVDRKHLQSFLSSSNGILTGLGQLSGVIEEGYFTRMSLLLFSKACLYSNPEDIALIPECVWQKLENMQTSTGGFGYMEKDLCLALCQLKSESDATTVLPLPTPSPVAKVLSGCNSQPVSPDFKSIRESILQVMSSLSSIEAYFEFFAARSAQEHEELEEAEIELELIEKEKSVPNFVEHTNDTMVLAMPSYDRDGSEVNKRLQQIRENIRSLERSRLKEEITARRQKKLLLRHAREKYLEETRSRETELMQELDRERALEMEREVERQRQLDIERAKSRELQFNIDLEKEKQTQRELQRELEQVELGRSSRREFSANPNSRSRERYRERDGGGRAQQEAGSLRSSSSRGQEGGSAQAPAPAGPGPTVMLAGSRTFSGANLPTILQPRERAADEDSAWAEDASSNGDPELDGVRPHGPRGSRSSSSRQVAERRERDGTAAGTGRREGKWERKQHP

SEQ ID NO: 60069 - protein, 189 aa, Zea mays
  Coding DNA Sequence Number=SeqID_18290
  Subcellular localization annotation: CTP_CleavageSite=34; ConfidenceScore=5.02e-01
MYRTPPQGTNQPWQSEPHTPSPIDGTTAKRTTPRAATDSSSNDDENLRILPPPPMPPRSHDHKARSSGVAPVAPPAIDPTLAFILQSLTQQQAHLAAEQARHAAIQQQMSKRMISMFQTIQDRQDTLQQQLLADRIEHRAFMTHILQHTGVQLPLVRLVTLDFSSSIDGPVSAPQLLPPAPAVTTATVA

SEQ ID NO: 60070 - protein, 265 aa, Zea mays
  Coding DNA Sequence Number=SeqID_18291
MEAAAALPPERDTSADWGDGVVPLGFRVKASSRESPSQKAGNVLEADLRSHWATATNTKEWILLELQEPCLLSHIRIYNKSVLEWELTAGLRYKPDAFVKLRPRCEAPKRDVVYPANHTPCRYLRISCLRGNPIAIFFIQLFGIPVPGLEPELQPLLSYLLPQITSSKQPLSHNMHLQADLNSVVDTPESSVRFLALLAGPFYPILHLINERDPTKSLFGSADSDALRTSPASTPTVSSNFEACTTKEITESICSACFIFAGISI

SEQ ID NO: 60071 - protein, 149 aa, Zea mays
  Coding DNA Sequence Number=SeqID_18292
  Subcellular localization annotation: CTP_CleavageSite=53; ConfidenceScore=5.41e-01
MVRLRGGIATPASNSRRAGARLHGPSARMGSPDTGARVDHTPRPSFSANKRTPAAALPSSLVGEVSLDLGYGGRKGQRGKGYEVESVRLCSLRGTESCRDPADAVAINLACTVRRSRLREDKQDFVNGHWREDPIWQRASASRGNAHTR

SEQ ID NO: 60072 - protein, 171 aa, Zea mays
  Coding DNA Sequence Number=SeqID_18293
MELDVVATQTEPTQRREGAATAMETEVRPWAPAGAGHLQRPREFHWGVERHGQKVPAPTSRHGGAEGVGLGVHWPWVRKSRGRWSLCRAPNGGEESSCSCGKGHREEEGARARRRTTGRALGGMGAWRKELAAGKVGGHGAPALAAVAAWAGRKTGENACVGEKRRRESGG

SEQ ID NO: 60073 - protein, 127 aa, Zea mays
  Coding DNA Sequence Number=SeqID_18294
  Subcellular localization annotation: CTP_CleavageSite=25; ConfidenceScore=5.02e-01
MVRARVWVPRTQARVVDHTPRPSFSANKRTPAVALPSSLVGEVSLDLGYGGRKGQRGKGYEVESVRLCSLRGTESCRDPADAVAINLARTVRRSRLREDKQDFVNGHWREDPIWQRASASRGNAHTR

SEQ ID NO: 60074 - protein, 63 aa, Zea mays
  Coding DNA Sequence Number=SeqID_18295
MDGPTPAMGRRDLVGGATVCRREDDGCTPIVDLGIDEEPVAEEPGEQQVEVAEQELIEGKLCP

SEQ ID NO: 60075 - protein, 49 aa, Zea mays
  Coding DNA Sequence Number=SeqID_18296
MADLEVGSIWSEEVGRGLPAGRWRSFAAGLPSVSSGRAIGVGEWCIAFA

SEQ ID NO: 60076 - protein, 283 aa, Zea mays
  Coding DNA Sequence Number=SeqID_18297
  Gene Ontology: Mol. function=phosphoglycolate phosphatase activity; Biological process=metabolic process
  Homolog annotation: Hit_ID=Q4F886; Match level="QueryCoverage=79%, HitCoverage=99%, E-value=1e-112, Identity=85%"; Hit description=DT -related protein
  Pfam annotation: Domain name=Hydrolase; Domain location=59-252; Score= 110.2; E_value=5.9e-30; Accession=PF00702.16; Description=haloacid dehalogenase-like hydrolase
MAVARLCAAAAAARLQPALAAGARGLGTAAEVAAGARWEPMGAREYYDYRRAMYGDITHKAILVDAAGTLLAPTEPMAQAQKYGVDYSEDEILMRYRWAYAQPWGRSRLRYVNDGRPFWQYIVSSSTGCSNLEYFEELYQYYTTEKAWHLCDPDAGRVFEALRKAGVKTAVVSNFDTRLRPLLQALKCDRWFDAVAVSAEVAAEKPNPTIFLKACELLGVKPEEVVHIGDDRRNDLWGARDAGCDAWLWGSDVYSFKEVAERIGVEHIKFMDLMIQYAKFNDR

SEQ ID NO: 60077 - protein, 807 aa, Zea mays
  Coding DNA Sequence Number=SeqID_18298
  Gene Ontology: Mol. function=GTPase activator activity; Cellular component=intracellular; Biological process=signal transduction
  Homolog annotation: Hit_ID=Q69RJ1; Match level="QueryCoverage=89%, HitCoverage=94%, E-value=0.0, Identity=73%"; Hit description =Pleckstrin homology (PH) domain-containing protein-like
  Pfam annotation: Domain name=PH; Domain location=7-114; Score=21.0; E_ value=0.0043; Accession=PF00169.19; Description=PH domain
  Pfam annotation: Domain name=RhoGAP; Domain location=72-227; Score =102.6; E_value=1.2e-27; Accession=PF00620.17; Description=RhoGAP domain
  Pfam module annotation: Pfam domain module=PH::RhoGAP; Domain location=7-114::72-227
MSCGDEMPCIGTIFLTCFDLLAGIGWKSWKKRWFILTRTSLVFFKNDPSTLPQRSGEVNLTLGGIDLNNSGSVVVREDKRLLTVLFPDGRDGIKVEGILRQAADVEEVDRRLQEYEQGRTEFAPEEDAHVIGDCVKHVLRELPSSPVPASCCTALLEAFRLDIKESRIKSMRAAISETFPEPTRRLLQRILKMMHTVASHTAENRMTPSAVAACMAPLLLRPLLSGECELEDDFDMSDDSAAQLIAAANAANSAQGIVTTLLEEYESIFNDEHFRCSLSPDSQTGDSGSEESTDDETVDIKDNGFHDAENDVDQELDDAERILNGKLSETSACVHADLHDYKEVNGNDSDAELFVEDNTFEPNVNLNDTPLSRLIENGKKPSNLASSHETPLSVGEILSSLDAGVPLPGRAAEYSKDRLSSKPNGIQQHVKRTNLWGRSNARKGQRSELVDPSSEEELAIQRLEVMKNDLQVRIAKEARSNAILQASLERRKQALHERRVALEQNVSRLQEQLQAERDLRAALEIGLSMYSSQFSSSHSMDSKTKAELEEIALAEADVARLKQKVAELHLQLNQQRQHQYGSSVDANDCPPHLPNHLSQNTVQTGFDRTVAFCNQEKQRNEESLPCTSHWRSIKQHVLSQDSSRPFSRKHSSDTSLSDSMEASTSVLAEGGPLLVNIARTTEQGVEYGRPPTVPSSTLVELTTRLDFFKERRSQLMEQLHSLDLGHGSASHGFPYKSSSPWNNPRRGKCCHFENLICVHYVADPYSVNSLPKGIGGNAWTFDNPYLTQQEHWILQRVSMPTFTNQSK

SEQ ID NO: 60078 - protein, 774 aa, Zea mays
  Coding DNA Sequence Number=SeqID_18299
  Gene Ontology: Mol. function=phosphatidylinositol phosphate kinase activity; Cellular component=plasma membrane; Biological process =phosphatidylinositol metabolic process
  Homolog annotation: Hit_ID=Q7XAM7; Match level="QueryCoverage=99%, HitCoverage=99%, E-value=0.0, Identity=80%"; Hit description =Phosphatidylinositol-4-phosphate 5-kinase-like protein
  Pfam annotation: Domain name=MORN; Domain location=110-132; Score =36.0; E_value=1.3e-07; Accession=PF02493.10; Description=MORN repeat
  Pfam annotation: Domain name=MORN; Domain location=133-155; Score =23.6; E_value=0.00071; Accession=PF02493.10; Description=MORN repeat
  Pfam annotation: Domain name=MORN; Domain location=156-178; Score =31.5; E_value=3e-06; Accession=PF02493.10; Description=MORN repeat
  Pfam annotation: Domain name=MORN; Domain location=179-201; Score =34.0; E_value=5.1e-07; Accession=PF02493.10; Description=MORN repeat
  Pfam annotation: Domain name=MORN; Domain location=202-224; Score =29.6; E_value=1.1e-05; Accession=PF02493.10; Description=MORN repeat
  Pfam annotation: Domain name=MORN; Domain location=64-86; Score=36.2; E_value=1.2e-07; Accession=PF02493.10; Description=MORN repeat
  Pfam annotation: Domain name=MORN; Domain location=87-109; Score =34.7; E_value=3.2e-07; Accession=PF02493.10; Description=MORN repeat
  Pfam annotation: Domain name=PIP5K; Domain location=469-769; Score =474.5; E_value=1.3e-139; Accession=PF01504.9; Description =Phosphatidylinositol-4-phosphate 5-Kinase
  Pfam module annotation: Pfam domain module=MORN::MORN::MORN::MORN::MOR N::MORN::MORN::PIP5K; Domain location=110-132::133-155::156-178::179 -201::202-224::64-86::87-109::469-769
MHDHTRARAWEATARKVQPVGRRRVSPMSAADDSETASSSSSSSSPAGDDADHVDRGLPNGDFYTGQWRGGAPHGNGKYLWTDGCMYEGEWRHGKATGRGKFSWPSGATYEGEFKDGFMDGSGTYTGAAGDTYRGSWSANLKHGDGNKSYANGDQYDGEWRAGLQDGAGRYTWRNGTEYTGQWRAGLIHGRGALAWSNGNRYDGGWEDGSPRGQGTFRWADGSVYVGYWTRDAHTGIVQQKGVYYPSPAASSPTARDPRDVFARDLPGFLGAGPDTASPRKSRASSGTRAPNGRPSSVSGLSNSSGGDRKYDKICIWESDGDITCDIVDGPALGDEAVTAQRSVRTDDGGGDDRGLPPPSPAPHVTQWLPQRESKRQGETIAKGHKHYELMLNLQLGIRHAVGKQGPIVLDLKSSAFDPKEKVWTKFPPEGSKCTPPHNSCDFRWKDYCPKVFRTLRKLFKVDAADYMLSLCGNEALRELSSPGKSGSFFYLTNDDRYMIKTMKKSEVKMLLKMLPAYYNHVRAFENTLVTKFFGLHCVKLAGANQKKVRFVIMGNLFCSEYPIHRRFDLKGSSLGRTTDKPQTEIDQYTTLKDLDLNFIFRLKKQWFHEFQRQVDRDCEFLEQEKIMDYSLLVGVHFRENTEKLLTEGSIDYDIINNVPTPRLSRGNTDRFLADPNRSPKTKLGANMPSRAELTARKSDCEPQLIGEPTGEYYDVILYFGIIDILQDYDISKKLEHAYKSFQHDPASISAVDPRQYSRRFREFIYKAFQEEDG

SEQ ID NO: 60079 - protein, 206 aa, Zea mays
  Coding DNA Sequence Number=SeqID_18300
  Homolog annotation: Hit_ID=Q10L85; Match level="QueryCoverage=81%, HitCoverage=79%, E-value=9e-31, Identity=42%"; Hit description =Expressed protein
MPGNGLPLRRWLVACVRPARREARLAVWGGGGTRGAEPGQAAGEVMVEHLGHVVCRADGFRVGRPAPVLGIGDRLEAGRTRRAGPRNCPFEYAKDGDGRTVIRVAEEFLVRAVAGGANAGRNGKPRGGDGDGDGDGCGSAALCSTPELRKHYEQLVGAVRGRPWSPRLDTIAERKGRRRLADVVSPGRLSPARLLGMGKDKGLSFS

SEQ ID NO: 60080 - protein, 105 aa, Zea mays
  Coding DNA Sequence Number=SeqID_18301
  Gene Ontology: Mol. function=protein serine/threonine kinase activity
MEDVMLGAAPLPVLDMTKKRSRSSAIRIIKRVSRSVKLRLGTGGTTERIISALHTVLSEQGDEDDDLKNARLLCVMLERCRRTLTVPVAKVRNLLQHTVGNLDPL

SEQ ID NO: 60081 - protein, 243 aa, Zea mays
  Coding DNA Sequence Number=SeqID_18302
  Homolog annotation: Hit_ID=Q0H903; Match level="QueryCoverage=25%, HitCoverage=14%, E-value=3e-21, Identity=79%"; Hit description =Phytoene synthase
MAAPREEGATELNQESRWPVWSSLLLYRQILDEIEANDYDNFTRRAYVPKTKKLMALPKAYLRSLVPVWEKLSKFSGHAAGGSSIESLMKMSEPAVLSHFKPADYVSILAQIHKELECRPPDDKASLFIIAEAEDEIKRLNGEAEKRILIFDPLDEPIRQPDLRGTTLQNMATMDPNMQARSVQESLHSSLRYIRLPPKTTREMRVPRHIGTFTFKPYLYYLLDMLNKDINSFSMRVRFVSVA

SEQ ID NO: 60082 - protein, 117 aa, Zea mays
  Coding DNA Sequence Number=SeqID_18303
MKVVSPERAWWSPRSSELRWATRPAATESGEEEGSALAPEDRHEERGAHDAWVVRHGRRWKGTVGEDFGVAQGRRRCKEDARRFGSDLIVGRAVRATKTGACAAWWRWERFSARRSG

SEQ ID NO: 60083 - protein, 308 aa, Zea mays
  Coding DNA Sequence Number=SeqID_18304
  Homolog annotation: Hit_ID=Q6AVI7; Match level="QueryCoverage=85%, HitCoverage=56%, E-value=3e-69, Identity=56%"; Hit description =Putative glycine rich protein
  Subcellular localization annotation: CTP_CleavageSite=14; ConfidenceScore=5.40e-01
MATSPAASSSSAPTASAVAAATMAVEATDGPVLSVVSKRLRALRKKYNRITQMEESLAAGKTLNREQEEVLRSKPVVAALIDELERLRPPLASALAEELSSRPAPAPSAASSSDSDSSVQDLLALVYFGSLFDVKQQSDFVSLVYTRELERSSCLTYDYVGDDPEDSLAETDLNAVSALASLAALRPPAAAGVSHRDALQACAHHARLWLCRADEPIHPDSTITYAGVRAKLDRIMASGYFTAQLEMRTPLDLAAAVASFGAGGVQVQESMVVSPQAPEAVEESQAVEGHKVCWSLGRGRVETTVGEP

SEQ ID NO: 60084 - protein, 173 aa, Zea mays
  Coding DNA Sequence Number=SeqID_18305
  Homolog annotation: Hit_ID=Q6AVI7; Match level="QueryCoverage=35%, HitCoverage=13%, E-value=5e-09, Identity=53%"; Hit description =Putative glycine rich protein
  Pfam annotation: Domain name=GRP; Domain location=39-163; Score= -14.9; E_value=0.0024; Accession=PF07172.2; Description=Glycine rich protein family
MRRRCAEGGALQNEKEDSQATEIYNDHPVVDSEHVEDEVLVHPTDEVPPAETEQEQETFDADVKDQEQKDQQFIQRRSYQNQRGGGRGGSRRGYPNGRGGRGGRGGGYQNGRGGYQNGRGGAGGYYYESGYYQPRNYNRGRGGRSGGGNSYYNSHGGGAQGHHPGSVELGANA

SEQ ID NO: 60085 - protein, 168 aa, Zea mays
  Coding DNA Sequence Number=SeqID_18306
  Gene Ontology: Mol. function=identical protein binding; Cellular component=cytoplasm; Biological process=negative regulation of enzyme activity
  Homolog annotation: Hit_ID=Q8H4X8; Match level="QueryCoverage=88%, HitCoverage=19%, E-value=1e-34, Identity=55%"; Hit description =Putative subtilisin-like serine protease AIR3
MVDTSWMRDTEGQGTTRSPPPLPTSCPHASLFGYTISTAKSGAPQAHVATYKVCWSKECSAAVLTGFESAIHDGVDVISVSFDQDTPLANDAKPLFHEPVTLRSLHAAIHDVSVVCSTGNSVPYDDIIVTTVVAATITTIVNRDFHNILTRATACVSGDKPRVHHTTL

SEQ ID NO: 60086 - protein, 177 aa, Zea mays
  Coding DNA Sequence Number=SeqID_18307
  Homolog annotation: Hit_ID=Q2QWV7; Match level="QueryCoverage=33%, HitCoverage=13%, E-value=6e-07, Identity=51%"; Hit description=TRAF -type zinc finger family protein
MEEDPRRPSRRPIARDLAQARPLPCHSPRAPQEALTMRELGVAKAVDMGDDWTLCSSSATLAPPLLLSPRPQHHASLGLDLGRRRCPRCSSGTSVVDSSTPSSEAMHKLAQILLLGLIAVHVDVITGDPFCGPSVVVVDLHREMDHDTAYPYKLLCCEQGCKKQLLQQDMSSVWNRF

SEQ ID NO: 60087 - protein, 657 aa, Zea mays
  Coding DNA Sequence Number=SeqID_18308
  Gene Ontology: Mol. function=protein-tyrosine kinase activity; Cellular component=large ribosomal subunit; Biological process =protein amino acid phosphorylation
  Homolog annotation: Hit_ID=Q6ER42; Match level="QueryCoverage=92%, HitCoverage=93%, E-value=1e-169, Identity=55%"; Hit description =Brassinosteroid LRR receptor kinase-like
  Pfam annotation: Domain name=LRR_1; Domain location=118-139; Score =3.5; E_value=64; Accession=PF00560.23; Description=Leucine Rich Repeat
  Pfam annotation: Domain name=LRR_1; Domain location=142-162; Score =10.6; E_value=3; Accession=PF00560.23; Description=Leucine Rich Repeat
  Pfam annotation: Domain name=LRR_1; Domain location=164-185; Score =8.5; E_value=7.2; Accession=PF00560.23; Description=Leucine Rich Repeat
  Pfam annotation: Domain name=LRR_1; Domain location=187-209; Score =5.9; E_value=22; Accession=PF00560.23; Description=Leucine Rich Repeat
  Pfam annotation: Domain name=LRR_1; Domain location=211-234; Score =12.7; E_value=1.2; Accession=PF00560.23; Description=Leucine Rich Repeat
  Pfam annotation: Domain name=LRR_1; Domain location=69-92; Score=2.1; E_value=1.1e+02; Accession=PF00560.23; Description=Leucine Rich Repeat
  Pfam annotation: Domain name=LRR_1; Domain location=94-116; Score =5.7; E_value=24; Accession=PF00560.23; Description=Leucine Rich Repeat
  Pfam annotation: Domain name=Pkinase; Domain location=355-634; Score=- 26.4; E_value=5.5e-07; Accession=PF00069.15; Description=Protein kinase domain
  Pfam annotation: Domain name=Pkinase_Tyr; Domain location=366-634; Score=-67.6; E_value=2.5e-08; Accession=PF07714.7; Description =Protein tyrosine kinase
  Pfam module annotation: Pfam domain module=LRR_1::LRR_1::LRR_1::LRR _1::LRR_1::LRR_1::LRR_1::Pkinase::Pkinase_Tyr; Domain location=118
  Subcellular localization annotation: CTP_CleavageSite=81; ConfidenceScore=5.45e-01
MPLRLAACRVFLLLAAAAAAATSPSPVATATSNGSANCTLRDGEIVRAAFRQVANFPLPLPGRRRACRHVRRLRFPSRNLTGAVDWDELGNLSGLLTVDLSGNSLHGRVGSSFWRAPSLRAVDVSCNRLEGALRFGGHPGTRLATLNVSGNRFTSVENVAGLSGLVGLDVSRNAIGAVPEGLRGLTLVRQLNLSWNNMAGTFPTDLPPLAGLQVLDISHNDFSGAVDADTIRKFGSSSFVQAGDALRVVEDLAPAPAPASSGGRHKRRRAVTMALVSVGAAVTLVFLAACVACAMTRRWNKKKKDKDKDRKTAAWEDDEVAVGALKLAAAAPVVVLERPLMELTLADLAAATSGFGRESQLADTGGRSGAAYRAVLPGDLHVVVRVVEGAVAGVGEDADAAATEAAFRELARLRHPNILPLLGYCIAGDQKLVLYEYMEKGDLHRWLHELPVGSMDTEDICIDAMEAMTEDSRKPAGDWPTRYRIILGVARGLAFLHQGWAGAGGGRRPIVHGRLVPTNVLLGDDMEPRISDFLPHPGGGGGAETAEGDVYRFGALVFEVVTGQARWGDAATTSWARGVVRNRKGLNLVDERLRDETAGTGAERELLECLQVGFLCTAAAPEKRPTMQQVVGLLKDVRPAATAGGGVPPPPLRSLAE

SEQ ID NO: 60088 - protein, 377 aa, Zea mays
  Coding DNA Sequence Number=SeqID_18309
  Gene Ontology: Mol. function=protein serine/threonine kinase activity; Cellular component=membrane; Biological process=protein amino acid phosphorylation
  Homolog annotation: Hit_ID=Q8W0B8; Match level="QueryCoverage=99%, HitCoverage=62%, E-value=1e-169, Identity=78%"; Hit description =Putative brassinosteroid insensitive 1-associated receptor kinase 1
  Pfam annotation: Domain name=Pkinase; Domain location=79-359; Score =105.0; E_value=2.2e-28; Accession=PF00069.15; Description=Protein kinase domain
  Pfam annotation: Domain name=Pkinase_Tyr; Domain location=79-359; Score=141.7; E_value=2e-39; Accession=PF07714.7; Description=Protein tyrosine kinase
  Pfam module annotation: Pfam domain module=Pkinase::Pkinase_Tyr; Domain location=79-359::79-359
  Subcellular localization annotation: CTP_CleavageSite=74; ConfidenceScore=5.40e-01
MGDQHQSWQHNAPPPPPDHVIKINSHPTLPPPPHNVHSSGSASNHSGGESRPALSPGTALSFSRSTFTYEQLMTATNGFSDANLLGQGGFGFVHKGVLPDGTEVAVKQLRDGSGQGEREFQAEVEIISRVHHKHLVSLVGYCISGAHRLLVYEFVPNNTLEFHLHGRGRPTLDWPTRLKIALGSAKGLAYLHEDCHPKIIHRDIKASNILLDLRFEAKVADFGLAKFTSDANTHVSTRVMGTFGYLAPEYAASGKLTEKSDVFSFGVMLLELITGRRPVNSRQADDNLVDWISLLLSTIEARPLMIKAFEDGNHDALVDPRLGSEYNDNEMARMIACAAACVRHSSRRRPRMGQVVRALEGDVSLDDLNEGVRPGHS

SEQ ID NO: 60089 - protein, 1338 aa, Zea mays
  Coding DNA Sequence Number=SeqID_18310
  Gene Ontology: Mol. function=ubiquitin-protein ligase activity; Cellular component=ubiquitin ligase complex; Biological process =protein ubiquitination
  Homolog annotation: Hit_ID=Q6H6D6; Match level="QueryCoverage=37%, HitCoverage=53%, E-value=1e-23, Identity=23%"; Hit description =Transducin-like
  Pfam annotation: Domain name=U-box; Domain location=404-477; Score =48.2; E_value=2.8e-11; Accession=PF04564.6; Description=U-box domain
  Pfam annotation: Domain name=WD40; Domain location=1064-1100; Score =18.7; E_value=0.021; Accession=PF00400.22; Description=WD domain, G -beta repeat
  Pfam annotation: Domain name=WD40; Domain location=1106-1146; Score =22.1; E_value=0.002; Accession=PF00400.22; Description=WD domain, G -beta repeat
  Pfam annotation: Domain name=WD40; Domain location=1299-1336; Score =14.5; E_value=0.39; Accession=PF00400.22; Description=WD domain, G -beta repeat
  Pfam module annotation: Pfam domain module=U-box::WD40::WD40::WD40; Domain location=404-477::1064-1100::1106-1146::1299-1336
MAGPTPTCSAIVSHTAAFLAELVADPLLRRHLLSAAAAAGGGQQHPAATLQALSLVSDALDTAASCSPSPSSLRAAERLLRSLPAATPLSCLLLALARAARRGAGAAAAVLDLFALDPALARHELAPAAFEALFAPRLLPVMRHFAARRAAAAARTKGEEGGSDEATPMRVLSLMSGAQAQEMRALEREYDKVLDANCRAYALYLKRILEAGEPSSPAVSSPLPQPLPPPELVFGVEDDDDSRGDEDTAPENDESAASSQSELRDNPMWAETEEQPGDLYPRRQGSVKGRRDLLRPPSLYPQRVPPHLIVQQQQALPVGRGSPASRLRAEHSRSRSPATPSDDSMEESSSELCAAKEEKIAASPLSSKQPRPRADAGQLSPEPASFPVRCDAAAVDPLQPLPTPKDFVCPITSQVFDDPVTLETGQTYERRAIQEWLDRGNATCPITRQRLHGAQLPKTNYVLKRLIGAWRDQRRTPSPSSSPSPSPPPATPPPAPATAMAGDSPAPPFPLPVKAAAASSPSPDANTSASAPSPTSVIAQASLESAVAELRAAVSCLCTSEDLAQSERSVLKIERLWRDATAGGADAEPAILAALARPAVLNGFVEILFNSVSAQVLRVAVFLLAELASRDDAVVQTLTRLVEMDLAEALVATIRRGGGDEDPLKMCVSPKAASVILLSQILVEDAAAAADDDSSSTPPVPRSALMSERFIRSLAASLEAEPVEERLAAMRILLRCIWEDGHCRRSIAEKASLGAVLDAFHAVGDADKIDIVRFLYELLKLKKRSAAERLLRTIKEGGSFSMMHTLLVYLQSAPPEHSPVVAGLLLQLDLLVEPRKISMYREEALDCLIQCLKNADFPRCQLLAAETIMCLPGRFSSSGRPLARSTLLKLARVKERYRQSQDLSAARADGEDEMEEGKAASEWERKAAYAVVSHEFGLVFEALSECLRTKNAELFTTSLVCAAWLVHMLSLLPDTGVLGAARVCLLRQFVVVLRSAKHGSDRVLAMVALRSFMNDREGMHDITTYIKDVLRTLRELKKSSGLAFEMLKLLSDGQESSVDMWSHKEINQVDCSANGEVTSVVYLNNYIFSGHSDGTLKVWQGSENILALVHEAQEHSKAITSLSVLHSESEEKLYSGSLDRSIRAWQLRDGVLRCVEVHDTRDPVQSLAVASAVACFVPQGAGVKVLSWGSGSSRVVNANKYVRSMALPGSKRILGKASPVYALQAHGGLLYTGGTPSSSSAASADGGGGAAVKVWSCANYGLVGSMATAAEARSLVVSADLVYVASRAAAVEIWSREKLARIGTLQAGGRVQCMAVDADGDVLVVGTSDGKIQAWGLT

SEQ ID NO: 60090 - protein, 163 aa, Zea mays
  Coding DNA Sequence Number=SeqID_18311
  Gene Ontology: Mol. function=catalytic activity
  Pfam annotation: Domain name=4HBT; Domain location=66-142; Score =22.1; E_value=0.0019; Accession=PF03061.12; Description=Thioesterase superfamily
MGDGETRLVAAATARKWLEDPRVGYDGGVGSQALSCVAIAGARVSVAERGRVVCSLRVRAPVADAEGRWHAGAIAAAVDCVCSAVAYTVEAAPTATVHYSLSYFSPADRDTEVEVEGRVVGRMGKLTAAVVVVRDKESGELVAVGRQWVTPAWPTKANKTSKL

SEQ ID NO: 60091 - protein, 193 aa, Zea mays
  Coding DNA Sequence Number=SeqID_18312
  Gene Ontology: Mol. function=translation initiation factor activity; Cellular component=fibrillar center; Biological process=translation
  Homolog annotation: Hit_ID=Q5N7Y7; Match level="QueryCoverage=78%, HitCoverage=30%, E-value=5e-78, Identity=85%"; Hit description =Putative eukaryotic translation initiation factor 3 subunit 6 interacting protein
MAAAHYDREDGLPPSAPPHAAADAYDPNYVPDSVKTFVVHLYRHIRDKNVYEIHQMYEGGFQRLSDRLFRDVFWPSAEAVSPYCDGDHVFLLLYRELWYRHAHARLSPLTAAHRAESWTNYCDLFSVVLHGVVNMQLPNQWLWDMVDEFVYQFQSFCQYRAKLKTKTEDELNQLKQFDKVAIYSKSLLSPTNL

SEQ ID NO: 60092 - protein, 240 aa, Zea mays
  Coding DNA Sequence Number=SeqID_18313
  Gene Ontology: Mol. function=catalytic activity; Biological process =nucleoside metabolic process
  Homolog annotation: Hit_ID=Q9LWK9; Match level="QueryCoverage=99%, HitCoverage=79%, E-value=1e-99, Identity=71%"; Hit description =Putative bark storage protein
  Pfam annotation: Domain name=PNP_UDP_1; Domain location=1-224; Score=- 64.5; E_value=0.00027; Accession=PF01048.10; Description =Phosphorylase family
MTGLSMLNAGLTTQLLLSLFRVKGIVHWGIAGNANEDLQIGDVTIPESWAHLSLWNWQRHGDGPENELPLENAGDYTREYGFLNFSDYTVGQDAGNPELAANTLNSRYYALAGKLEGLELPACVNATTCLPRAPRVTRVPRGCSANIYTDNASYRQFIRSHFGCTPVEMESAAVALVAHQHGVPFITIRSLSDLAGGGSSISNEAATFLDIAAQNAVDVMLKFVPLIARRGGEQEHAADM

SEQ ID NO: 60093 - protein, 252 aa, Zea mays
  Coding DNA Sequence Number=SeqID_18314
  Homolog annotation: Hit_ID=Q2QXC0; Match level="QueryCoverage=70%, HitCoverage=24%, E-value=3e-18, Identity=28%"; Hit description =Expressed protein
  Pfam annotation: Domain name=DUF1618; Domain location=19-157; Score =78.2; E_value=2.6e-20; Accession=PF07762.4; Description=Protein of unknown function (DUF1618)
MRNPSADTGVVAHAGRLYWLALAYGVFVCDPFADTAHLRFLALPADCDLGEKPYRINRAYVAQCRRVAPSEGQLRYVEIRGLSYEAYVAPAVAPPPVHPTVWMWTLVDPEATEPWRFEYEAPFAEVWAHESYAAAGLPHGEVPHVALVDPDDHGIVYFFQGSKSKLFGLDVRARRVVSCEECSVRDDLKMKDWNSRPIVDAWEVPPPSPPCSELSSPSPQGSDELAPVAKRVIEILRLMSDTDDDDGGYATI

SEQ ID NO: 60094 - protein, 89 aa, Zea mays
  Coding DNA Sequence Number=SeqID_18315
  Gene Ontology: Mol. function=translation initiation factor activity
  Homolog annotation: Hit_ID=Q5N7Y7; Match level="QueryCoverage=76%, HitCoverage=13%, E-value=2e-29, Identity=91%"; Hit description =Putative eukaryotic translation initiation factor 3 subunit 6 interacting protein
MAVPCSTCCCVQQWQWWRKLSILMTYKHKMHAVDSEGKIVSSADFDFYIVEDVIHVVESKPTKRHGDYFLRQILKFEEMIGELEKVQLD

SEQ ID NO: 60095 - protein, 635 aa, Zea mays
  Coding DNA Sequence Number=SeqID_18316
  Gene Ontology: Cellular component=integral to membrane
  Homolog annotation: Hit_ID=Q8L4G8; Match level="QueryCoverage=89%, HitCoverage=89%, E-value=1e-156, Identity=53%"; Hit description=C4 -dicarboxylate transporter-like protein
  Pfam annotation: Domain name=C4dic_mal_tran; Domain location=265-530; Score=288.1; E_value=1.7e-83; Accession=PF03595.8; Description=C4 -dicarboxylate transportermalic acid transport protein
MARCSTCDRFSRFMETTDEFAVPPRPALVHPDADGVRTPSALGPLSPEDPPPAFMERDWRHGGDNTAAYPGCSPFQPSAAGRPVSISLPASPTGGFDISSRTEAELQRDAAAVTDAPPPRMMMLPPFAPAPAMALEQPGKVVFRSQPIPAAPPRAGAMALEQPGKVVFRSQPIIPGPELDKLRVLTPMTPSIRYTSTTSAVDANARWRAFVSFVAAVLLWPAHVPLAVADADEEADVVLSYWWQSSEELILPSDKTWPFLLRFPVSAFGMCLGMSSQAILWKRIAMLESSRFLHITVKINLVLWCASVALMAAVSALYGCKLVLYFEAVRREYYHPIRVNFFFAPWIACLFLAIGVPDVVAATLPHWLWYVLMAPIVCLELKIYGQWISGGQRRLSRVANPSNHLSIVGNFVGALLGGIMGLKEGPMFFFSVGLAHYMVLFVTLYQRLPTSETLPRDLHPVFFLFVAAPSVACLAWARITGEFGYGSRVAYFIAMFLYASLAVRINLFRGFSFSLAWWAYTFPMTSAAIASIRYSSEVKNAFTQCMCIGLAAAATLAVAALFLATLLHAVVYRDLFPNDISIAITERRRSKPLVGEKMLLRLRSGKKVQQALSTAPADAAADLEAARAATTTSYT

SEQ ID NO: 60096 - protein, 260 aa, Zea mays
  Coding DNA Sequence Number=SeqID_18317
  Homolog annotation: Hit_ID=Q8GSM4; Match level="QueryCoverage=24%, HitCoverage=18%, E-value=2e-12, Identity=49%"; Hit description=Ovate protein
  Pfam annotation: Domain name=DUF623; Domain location=201-260; Score =77.1; E_value=5.5e-20; Accession=PF04844.4; Description=Protein of unknown function, DUF623
  Subcellular localization annotation: CTP_CleavageSite=34; ConfidenceScore=5.48e-01
MNYGGGSRSSSRLRDRLARMFRPSALLRSTCNTAAAASSCSSSSKNDSRMKLLLSNPYGFSSSDDTDVFSSDGEDDDRAAGRGSKRPGESAAETFFSSSRSFSSDSSEFYTNNKKQHKKKTATKAKAKAKGMAKAKPPAAAPSDRSSKAPASSSRRRPQYHRRAASSCDTCGVRDGFRPVVVVSAAAEEQVRRGFAVVKRSRDPYGDFRSSMVEMIVGRQLLGAPDMERLLRSYLSLNAPRHHPVILQAFSDIWVVVHGG

SEQ ID NO: 60097 - protein, 235 aa, Zea mays
  Coding DNA Sequence Number=SeqID_18318
  Gene Ontology: Mol. function=transferase activity; Cellular component= nucleus; Biological process=positive regulation of transcription from RNA polymerase II promoter
  Homolog annotation: Hit_ID=Q7G609; Match level="QueryCoverage=79%, HitCoverage=69%, E-value=4e-43, Identity=52%"; Hit description =Putative CCR4-associated factor 1
  Pfam annotation: Domain name=CAF1; Domain location=47-235; Score =35.1; E_value=9e-11; Accession=PF04857.10; Description=CAF1 family ribonuclease
  Subcellular localization annotation: CTP_CleavageSite=39; ConfidenceScore=5.09e-01
MFSYAAPPITYSPVPPPPPYAAGLLYPPPYYGGPVVPTPAVHVVQLRSVTATNFAAELDLIGSLLQNYPYIVVDTEYPGTVHRPPAGRRDDDLSPDEWYAMLKANVDELPPVQLGITLCDSHGNLPVVLDYGYGYTEGCWEVELSDFDIRRHRHAAQSVAFLRSQGVDFDAVRARGVGSAAFGAKLAEILLASRGAGVGLTWVAFGGAYDLTYLVKMIGGIGQPLPETRQGFLER

SEQ ID NO: 60098 - protein, 82 aa, Zea mays
  Coding DNA Sequence Number=SeqID_18319
MTRECLSEVELRSIVSSGKSRLFPVEALKKTRDEAQAQDAEKTLQNLKRFGREESNSQPGNTLDDEDIKLLGDDEDALADDE

SEQ ID NO: 60099 - protein, 183 aa, Zea mays
  Coding DNA Sequence Number=SeqID_18320
  Homolog annotation: Hit_ID=Q9AVP5; Match level="QueryCoverage=47%, HitCoverage=13%, E-value=3e-08, Identity=40%"; Hit description=BY-2 kinesin-like protein 5
MATPRLPALRLPSPPPARCTAAIRGRARATEDLEEKPTVEDLSVFSATTVPPRPAMQIRGFDPPPARVFAWHALELDAFKYLQIVASYGGCTGANNLDKNEEILSGRARQRHVDRRRWEAPDKLINLKELGQHLGSVGVFCRVWPLLNTESPVTVEQERITVKSVGIKKEFDADRVFGQEYAQ

SEQ ID NO: 60100 - protein, 95 aa, Zea mays
  Coding DNA Sequence Number=SeqID_18321
MDELGAQTCLLANAGGSSRAWGRERVWGSSGLARHGERERSLLLARCAREACRSAGRKTQGEAGWRFVAPWEVEGARASVGETTSRALGRQRPMA

SEQ ID NO: 60101 - protein, 225 aa, Zea mays
  Coding DNA Sequence Number=SeqID_18322
MARLRHTAWKSVIPFLPSRLTKRSLRRLEVESVRGCSPVPPLEAPPAPPIGVPTTGVAAGGDPDDGEDSNSNSSPLGKSRGNSTIIHRTVRCSKEERPQELASFGKLQRLLRYNSPDMSGTSGTPILAHRTLYSICPVRHRTSRRAQKTELQRSNPNGFGDMAGAPDMSGDRWPRSKSFAPQLHRNSPVYTRNMFGEIIAGAAVAVSPKLARFLEGRSFLGSTAT

SEQ ID NO: 60102 - protein, 165 aa, Zea mays
  Coding DNA Sequence Number=SeqID_18323
  Homolog annotation: Hit_ID=Q9AVP5; Match level="QueryCoverage=52%, HitCoverage=13%, E-value=3e-08, Identity=40%"; Hit description=BY-2 kinesin-like protein 5
IRGFDPPPARVFAWHALELDAFKYLQIVASYGGCTGANNLDKNEEILSGRARQRHVDRRRWEAPDKLINLKELGQHLGSVGVFCRVWPLLNTESPVTVEQERITVKSVGIKKEFDADRVFGQEYAQGSLSDNFCAIIVLTEYGCLTAIIRKKEIVDVIVKAIKST

SEQ ID NO: 60103 - protein, 334 aa, Zea mays
  Coding DNA Sequence Number=SeqID_18324
  Gene Ontology: Mol. function=carboxypeptidase activity; Cellular component=membrane; Biological process=auxin mediated signaling pathway
  Homolog annotation: Hit_ID=Q5JNG4; Match level="QueryCoverage=87%, HitCoverage=84%, E-value=3e-50, Identity=35%"; Hit description =Putative MtN21
  Pfam annotation: Domain name=DUF6; Domain location=176-298; Score =40.1; E_value=7.7e-09; Accession=PF00892.11; Description=Integral membrane protein DUF6
  Pfam annotation: Domain name=DUF6; Domain location=18-130; Score =16.1; E_value=0.008; Accession=PF00892.11; Description=Integral membrane protein DUF6
  Pfam annotation: Domain name=TPT; Domain location=167-298; Score= -29.1; E_value=0.028; Accession=PF03151.7; Description=Triose -phosphate Transporter family
  Pfam module annotation: Pfam domain module=DUF6::DUF6::TPT; Domain location=176-298::18-130::167-298
MAACAGVGPVVGMVVFQIIFAFVNIFYKLAVSDGMDLRVLIAYRYLFGSAFLGPLAYFVERGTMAQNLYIAGMKFTSATFASATTNLLPACTFVIALVFRYEKFAIRSLASQAKVAGTLLGVGGAMLLTFYKGVDITPWHSNLNLVATLTQHHHHHTTTTTTNYAMGSLLCVCSCFFYALWIVVQAKLSNDTALMCIMTTLQSSIFALCFDRDASQWRLKFDIRLLSCAYSGIFASGVALVIMAWCVQQRGPLFVSVFSPLMLLIVAVLSSLLLGEKLHLGTAMGAVLIVMGLYAVLWGKGREAAAEAARVSVNDHPTTSNSNSSEEDDDKKRH

SEQ ID NO: 60104 - protein, 151 aa, Zea mays
  Coding DNA Sequence Number=SeqID_18325
  Subcellular localization annotation: CTP_CleavageSite=25; ConfidenceScore=5.23e-01
MTGYGTTTFLSFTYGGHLFHPGGLHASTPGASTLRAYVLALATSVLALKAFGLRGPSCADHWCPGPRGTCVGLWRLSPGAFVLVLEPLLALALRAGPLRASVLALAAHLFQLLRSLFFWLRRQLFRPLGHLGIKDVLVWCGQATIWLGEGM

SEQ ID NO: 60105 - protein, 143 aa, Zea mays
  Coding DNA Sequence Number=SeqID_18326
MMRRPSNKVVWFRVKGLGQNYPSVVPVIPQNWIDEKERQGTSLSWLSHNQTHHDHSATCTFSFTSNLPPRANYQAAAVQSLSLMATAVGVSRPDPAAFYFDITALGSSIPQESWQQPDPAPAFPSSSFSIGSKAAVTSSNKSW

SEQ ID NO: 60106 - protein, 160 aa, Zea mays
  Coding DNA Sequence Number=SeqID_18327
MVVMGSTSDKRYLCQDRVDVGLLTEDPFTGHMPHHGELNSKLATFGNSGRPLRYNSPDCPVHRRTVRCAKRSNGYSRQQSSATKLQRSEPNGLVTWLAHRTLVGAPDSVRCAHTTEAFTNAQAKKEMVIGDKLATSHGKAPSGESANKNREESPPRVKSH

SEQ ID NO: 60107 - protein, 182 aa, Zea mays
  Coding DNA Sequence Number=SeqID_18328
  Gene Ontology: Mol. function=protein dimerization activity; Cellular component=nucleus; Biological process=regulation of transcription, DNA-dependent
  Homolog annotation: Hit_ID=Q10MJ6; Match level="QueryCoverage=56%, HitCoverage=59%, E-value=8e-21, Identity=52%"; Hit description=BZIP transcription factor family protein, expressed
  Pfam annotation: Domain name=bZIP_1; Domain location=24-88; Score =23.2; E_value=0.00044; Accession=PF00170.11; Description=bZIP transcription factor
  Pfam annotation: Domain name=bZIP_2; Domain location=24-85; Score =23.4; E_value=0.0008; Accession=PF07716.5; Description=Basic region leucine zipper
  Pfam module annotation: Pfam domain module=bZIP_1::bZIP_2; Domain location=24-88::24-85
MSLTEEQCAAVFEEAARRAAVVITEEERRRNRMTSNRLSARKSRMKRQRHVDDLAAEAERLRRENEAMRAGVGDAVLRSRALEQENRVLAAHARQLCAALLLRNSQLSLLGDVAGVPLDVPGVPDHLVQLYGGVQVPVMPLSPSVMPLSPSPPPPLHLQLPLEIQLMLLQPDVMDAVGMLEL

SEQ ID NO: 60108 - protein, 153 aa, Zea mays
  Coding DNA Sequence Number=SeqID_18329
  Subcellular localization annotation: CTP_CleavageSite=95; ConfidenceScore=5.09e-01
MGSPICIAPPSPPTLRRLQSAQIPLRHLANTHHARADLLARPPQIPPGSSPFLTSGVNVRGPTFPKSTRFLSLPHIACRHSRTVLPHIELPHHCRGFLTTSTVHGPIIAPIRASTFADKLPAPQHAHTYHHLNHVRDPDIAPDRQESGSLKAR

SEQ ID NO: 60109 - protein, 74 aa, Zea mays
  Coding DNA Sequence Number=SeqID_18330
MASGEAKHWVVADWLEVMAGQHLVGAIADVICVVVEGAMVPRAVADCLLQRVQGASNRIARRPCMSVAIETTRP

SEQ ID NO: 60110 - protein, 609 aa, Zea mays
  Coding DNA Sequence Number=SeqID_18331
  Gene Ontology: Mol. function=microtubule motor activity; Cellular component=microtubule associated complex; Biological process =microtubule-based movement
  Homolog annotation: Hit_ID=Q9AVP5; Match level="QueryCoverage=55%, HitCoverage=52%, E-value=1e-104, Identity=58%"; Hit description=BY-2 kinesin-like protein 5
  Pfam annotation: Domain name=Kinesin; Domain location=10-364; Score =397.6; E_value=1.8e-116; Accession=PF00225.13; Description=Kinesin motor domain
MEGHVPLPLPLLPDGETAVGYSKDDASSPLQEEISSLRSRQRRVDRRRREALDRLVELKGEDHGQAAGIKREFGADRVFGQESTQEDVFEEVKPILRSALDGHNVCILAYGQTGTGKTYTMEGTGGNKLGVVPRAIQELFSRASEDGSCAYSFSMSMLEVYLGSLRDLLAAPRQPLFRRTECKAAACSSSLSILATKGGAVEVEGLTDVSTPDLKNASQWYRRGRRARSTAWTNVNDASSRSHCLTRITIRRRMRHGGGGGVSKLWLVDLGGSERLLKTGASGLTMDEGKAINLSLSALGDVIAALRRKRPHVPYRNSKLTQILSDSLGDGSKVVMVVHVSLSEDDVGETVCSLNLAKRARSIEPNREIPQDLKTLKQKRVAELDREIRAAEEELKRLDEQIRRAEEKEISLEEEEEEEEEKKLFASSVCQALSDDEKGSPRSTLVVVGHTDAAESPRATTEKAKGRRPPPARGHGGSAAPHFMSSTVCSRQRRCAGGYHSVGNGKPRLTAVSVNRYPPPAAELSGSQNAAARASRSASVALSSGVHKLRCLRVNKSDQVNVISNSSVDSTAASAPPPRRRESCFGSRPVLQRAAAPLHLHRRRMSSLT

SEQ ID NO: 60111 - protein, 478 aa, Zea mays
  Coding DNA Sequence Number=SeqID_18332
  Gene Ontology: Mol. function=sequence-specific DNA binding; Cellular component=nucleus; Biological process=regulation of transcription, DNA-dependent
  Homolog annotation: Hit_ID=Q9ZRY4; Match level="QueryCoverage=97%, HitCoverage=48%, E-value=2e-96, Identity=45%"; Hit description=NDX1 homeobox protein
MGPPLVIFFGLMIDMVSAVEELSGLSSKELNEMLKESDNFVLQSKAEGGGPKQTLVDMEKLVSSLPLHLIAVCLELRQGPDLTYVLRGMRFLHSLSDLASRHTRLEQVLLDDVKLSEQVMDLIFFLLSILAEQKKENNVGASPLVHASLVAASLHLLTSYFSSQWHELVHILLAHPKVDIFVDVAFDSLHEDVRLLNIRLSSMDFGIFPVGSLESRLAHFICQQCEASLQFLLLLCQQKLFRDRILRNKELSRNGGILSLSHTILKLAVPECLKQSTDLVASISRLKAKILSILLQLCEAESVSYLDEVATNSNSMRLGQTLALEVLNLLKIAFGKKKYITSDSHDKVKIYPMGSMLISALRLVDVFSDDSNFRSSFLTNTVPFLTQILATPHGEFVSSWCSVNLPAIEEDASLDYDPFVASEVALLASNNVLTEAKADYSCPFRPSLPSVAYAQTRTSCVVKIIANLHVFIPNICEG

SEQ ID NO: 60112 - protein, 61 aa, Zea mays
  Coding DNA Sequence Number=SeqID_18333
MTAGPGEPRSPRELARAALGGGVNQLTRSLAAEWACDKIRVNSVAPGIVMTDMVKNLPSIV

SEQ ID NO: 60113 - protein, 104 aa, Zea mays
  Coding DNA Sequence Number=SeqID_18334
  Subcellular localization annotation: CTP_CleavageSite=65; ConfidenceScore=5.05e-01
MVDACPCPVLVRNASNSSKRGLRYLAHVCKPSPVPIPNSKHCRHKQPAPGKSPEPSINSNACAPAASSGEKRSFLSPGRQQTDELSTAATLCLNQHLDRELYNH

SEQ ID NO: 60114 - protein, 369 aa, Zea mays
  Coding DNA Sequence Number=SeqID_18335
  Gene Ontology: Mol. function=sequence-specific DNA binding; Cellular component=nucleus; Biological process=regulation of transcription, DNA-dependent
  Homolog annotation: Hit_ID=Q60D94; Match level="QueryCoverage=60%, HitCoverage=42%, E-value=3e-70, Identity=61%"; Hit description =Unknow protein
  Pfam annotation: Domain name=Homeobox; Domain location=141-204; Score= -0.9; E_value=0.0061; Accession=PF00046.19; Description=Homeobox domain
MEDMHPMQQPLPTRASTPDSKMNNFPKDVQNMEVSAPIPPINREGNDKDETPKNTVSRNGGFLQNAVGQDLVHLGVARTASGGSSAVTSVVSTGHQRSKMDLDPASGSVDNFKTPELTKENGLQGDDKGESSVYDERQPKRRKRNIMNSEQIDELEKALVDEPEMHRNPVLLQGWSEKLSLQGPEITSSQLKNWLNNRKAKLARIAKERGTFEGDNADKPSTPHPGESSESAGEDNYIPPARVMTAPSKGRLVSPDGNEKTSQAELSPNTMLIRPFTRSFSLEPGRLVSLVDSDGKEVGRGKIFQAPGKSPAPVESRICTVDVTELRTEKWRELPHPSEASGRTFQEAEARNGGIMRVSWDSGRLLPVV

SEQ ID NO: 60115 - protein, 46 aa, Zea mays
  Coding DNA Sequence Number=SeqID_18336
MEKSRGLTTDGVAPANSTGSGDERQTPATNGNVNGEQMGEEEETVA

SEQ ID NO: 60116 - protein, 647 aa, Zea mays
  Coding DNA Sequence Number=SeqID_18337
  Gene Ontology: Biological process=biosynthetic process
  Pfam annotation: Domain name=Glycos_transf_1; Domain location=156 -338; Score=-6.5; E_value=0.0046; Accession=PF00534.10; Description =Glycosyl transferases group 1
CWNMNIDAQSLMLATVAKSLVSLGYEVEVLAFTDGKARDIWENICLVNVVNTGALKSVDWSQYNAVLEPFRLLPVIWLIHEDTLGQYLRSYAKLHDSIQNVIEDWRTHFNACAYVVFPDSYHPLLYSPLDSGNFLVISGSPVDIWSAKRFGSSHSDETTRKQHGIEKDDVVILVVGSYLFFDDLPWDYVTVMRASATQILDIAKTKNLRVQFVFFCGNGSDAYNSAFQELTSHMGLPDVSIKRFSVTHDIRNLLMFVDVVLYGSLRQEPVFPPLLLLSMSSEIPVVAPNLTVITKYVSDGVHGFLFDSADPSTISSAFIQILGEKKLLDTAYSVALEGKLLSKNMLAHDCIKAHVKLLESVIHFPSYAKLPSSVSKVQERTWLWDPFELKAALENSLLEDESHASTKAVDILREFSQSNQTTYADTNDTSSYDYPRLSDWVERPLLSWDEVYKNARKSERLKSEGNERDEGELERTGQPVCIYEIYSGEGAWPFLHHGSLYRGVTLEFPPQQLIFCARVYSKLMPIFAYYLKSKGGRRPRSDDVDAVTRLSVLDNPYYRDLLCEFGAIFAIANRVDTVHKLPWIGFQSWRAAGRKFQYPASLAIMSLSNNISNSNVARMSSMLQSKLAMGDLTVWDSYTPVLSTMLI

SEQ ID NO: 60117 - protein, 169 aa, Zea mays
  Coding DNA Sequence Number=SeqID_18338
MQRATSKTEGGCGLVWASPFSRRAGTEETESRQRSESSACRAPQYSQKSESTACRALARNALPFVGASLQIWQPSSPRAAACRAAAWNSPPDLAVDPVINASDEVTMTPTVPSVEACGGRSSPSLYSYSAPYFVRCVPMSSSSQTPCLGLPRFEADGVRRVLLKSLRAS

SEQ ID NO: 60118 - protein, 124 aa, Zea mays
  Coding DNA Sequence Number=SeqID_18339
  Gene Ontology: Mol. function=RNA binding; Cellular component=nucleus; Biological process=nicotianamine biosynthetic process
  Homolog annotation: Hit_ID=Q5QMM5; Match level="QueryCoverage=93%, HitCoverage=40%, E-value=4e-53, Identity=87%"; Hit description =Putative QUAKING isoform 5
  Pfam annotation: Domain name=KH_1; Domain location=18-105; Score =19.6; E_value=0.0066; Accession=PF00013.19; Description=KH domain
MGWQGAVQNHSSYIVKKIVRLEVPTDAYPNFNFIGRLLGPRGHSLKRIEATTGCRVFIRGKGSIKDPVKEEQLKGRPGYEHLDDPTHILIEAELPADVIDARLAQAQEILEESLKPVGRFAQME

SEQ ID NO: 60119 - protein, 81 aa, Zea mays
  Coding DNA Sequence Number=SeqID_18340
  Subcellular localization annotation: CTP_CleavageSite=18; ConfidenceScore=5.10e-01
MKLWKETSRSSKITTSSRCGLAATPSRLPVKAAFIYVSFPHFDLLLFDEPTAPTAMVVCATFGLSGVPTSPEEQRSAAPDM

SEQ ID NO: 60120 - protein, 171 aa, Zea mays
  Coding DNA Sequence Number=SeqID_18341
MSGDPVAVNGRELWLEVVARGGVGSGECDIESVTRSTGRARARDYAIGGERRQETSVGVRRTTKSSIEQVCEPGWTTKSLVEQVYEAKWTAKSPAKQVYEVEWTTKSPAEQVYEVKRTTKSPAEQVYEVERTTKSPAKQVCKAKRVTKFAAEWPSVGQKPQAHINHDRTCR

SEQ ID NO: 60121 - protein, 81 aa, Zea mays
  Coding DNA Sequence Number=SeqID_18342
MCPEDSLSRRGGDRLSDWAREAIGGQQFLVGVGVPPWIAPRRGPGSVQLKTSIIKLMGTWSDHPGKQCYHKGIMGRPWLTN

SEQ ID NO: 60122 - protein, 151 aa, Zea mays
  Coding DNA Sequence Number=SeqID_18343
  Homolog annotation: Hit_ID=Q6QP51; Match level="QueryCoverage=32%, HitCoverage=22%, E-value=6e-07, Identity=75%"; Hit description =Putative growth-regulating factor 1
MQTTYNCTKGAHPFDFDASSMEAQAHMSCNRRASYYVRETAPPLAPVPHILDRGIGAATRGNPAHGPAVPTKHAGHGDQERDTPKGILLREGSGPRALLLIRGSKAGPLEGFDSRLRALGPRALLLIRGSKAVPSEGFDSRLRPLGLRAHY

SEQ ID NO: 60123 - protein, 132 aa, Zea mays
  Coding DNA Sequence Number=SeqID_18344
  Subcellular localization annotation: CTP_CleavageSite=13; ConfidenceScore=5.05e-01
MGGSKRDTRPFVLSSKTHSLAPAMSQSFSPSNAEDTGQLERRWDASDDVEVRTQEEEATRGTTSESGWAVGRWPGGSDHQSGERGQTADVTHGSAETNKKFGSDHWGTRRLANDYLAVKHGETLKPECLLIL

SEQ ID NO: 60124 - protein, 396 aa, Zea mays
  Coding DNA Sequence Number=SeqID_18345
  Pfam annotation: Domain name=VQ; Domain location=104-134; Score=48.0; E_value=3.2e-11; Accession=PF05678.4; Description=VQ motif
MGAESRRRGFLLAYNSARYVGTGAHEKPPGSRAGVLGSPVFTRRKRKEAAMCIQPHALPRPAGQKLLLSRHRAPNKLEPLSPAASAASPSAAPKPPRKRPRVSRRPPPTVITTDVSNFRAMVQEFTGIPTPLPFAPHHLAALPAARSSVALPTIPPRQVPRAPVDSSEHACSGGATVSYLWLSMDGACVAVCNLRCEISTVSVTGLGCGGGGELFLRCHVPAGGGRAIQIDSRGAGQTGGEALLWRDVASLSCDGSPACVRQLVDQGSVVFEVRRRRGRAALLGRVRGSELVGRAEVPWRDAGDLGLGAAAATLERRVELAAPAIGSRRVPAREAAVAPVLYARISVRLSETAVPVSRRRADASARQHGGESGCEWSVGDDDAFAAVACAVDDAFE

SEQ ID NO: 60125 - protein, 226 aa, Zea mays
  Coding DNA Sequence Number=SeqID_18346
  Gene Ontology: Mol. function=catalytic activity; Biological process =trehalose biosynthetic process
  Homolog annotation: Hit_ID=Q1W5S7; Match level="QueryCoverage=99%, HitCoverage=65%, E-value=1e-111, Identity=88%"; Hit description =Sister of ramosa 3
  Pfam annotation: Domain name=Trehalose_PPase; Domain location=1-209; Score=234.6; E_value=2.2e-67; Accession=PF02358.7; Description =Trehalose-phosphatase
MSEEMRDAVRGVAEHFPTAIVSGRCRDKVFNFVKLAELYYAGSHGMDIKGPTAQSKHTKAKAEAVLCQPASAFLPVIDEAYRALTARTAPIPGATVENNKFCLSVHFRCVQEEKWRALEEQVRSVLKEYPDLRLTKGRKVLEVRPSIKWDKGNAIQFLLECLGFADSNNVFPIYIGDDRTDEDAFKGIGILVSKIPKETSASYSLREPSEVKEFLHMLVRSKQRRD

SEQ ID NO: 60126 - protein, 289 aa, Zea mays
  Coding DNA Sequence Number=SeqID_18347
  Gene Ontology: Mol. function=kinase activity
  Homolog annotation: Hit_ID=Q8L561; Match level="QueryCoverage=79%, HitCoverage=96%, E-value=4e-18, Identity=33%"; Hit description =Putative Skp1
  Pfam annotation: Domain name=Skp1; Domain location=205-286; Score =99.0; E_value=1.4e-26; Accession=PF01466.9; Description=Skp1 family, dimerisation domain
MEAVGEEKGATVAEEGKMMKEQGEKGVVASTSEAEKEKMVEAKGEKAVAASEAEGGKMVEGQGEKAVATSEAEDVKMVEGKGEKAVATTEAEDVKMVEGKGEKAVATTEAEDVKMVEWKGEKAVAATEAEIGTSEPKDVAGGRLITLKELGRQEEVVTDDEVVIVPLVDGPTLVTVLEYCTKHAEVAAAARGTSAVAFATASKALEAWDRDFLDRLTMDALHDLFVASNFLEIQGLLNAIAQKAADVIKGKTTEQIRDAFNIVNDLTPEQEATAAELRRKYTWDYHPEA

SEQ ID NO: 60127 - protein, 280 aa, Zea mays
  Coding DNA Sequence Number=SeqID_18348
  Homolog annotation: Hit_ID=Q10QL0; Match level="QueryCoverage=31%, HitCoverage=42%, E-value=3e-17, Identity=49%"; Hit description =Protease inhibitor/seed storage/LTP family protein, expressed
  Pfam annotation: Domain name=Tryp_alpha_amyl; Domain location=119 -197; Score=11.3; E_value=0.0064; Accession=PF00234.12; Description =Protease inhibitorseed storageLTP f
MPLMVGRRPEGAGTWWRRADPAADDEPLEDLVVRAGRPRDDDSAAFKRAAPRAKRDAYQIPSRASKPTSATQVASSLVLSFSPGPAMARLGLLALAVAVLALASGVASQAPGPAPSADCASALAGLMGCLPYVQQGSTQGKPDRECCAGVKAALKSPATVVCLCAAVGQNYGMPVNLTRGAGLPAACGEDPAALSKCNSQYSAALVSALTTARDYRHACTKIALARKAGTSQQPTASGTAPAVPSPGSSKSSSSAAAAIRFPVSAFAVVVAATLLSHCLL

SEQ ID NO: 60128 - protein, 1007 aa, Zea mays
  Coding DNA Sequence Number=SeqID_18349
  Gene Ontology: Mol. function=protein kinase activity; Cellular component=integral to membrane; Biological process=protein amino acid phosphorylation
  Homolog annotation: Hit_ID=Q8LI36; Match level="QueryCoverage=97%, HitCoverage=97%, E-value=0.0, Identity=74%"; Hit description =Putative receptor-like protein kinase
  Pfam annotation: Domain name=LRRNT_2; Domain location=20-70; Score =45.3; E_value=2.1e-10; Accession=PF08263.3; Description=Leucine rich repeat N-terminal domain
  Pfam annotation: Domain name=LRR_1; Domain location=122-144; Score =15.8; E_value=0.15; Accession=PF00560.23; Description=Leucine Rich Repeat
  Pfam annotation: Domain name=LRR_1; Domain location=146-173; Score =10.0; E_value=3.8; Accession=PF00560.23; Description=Leucine Rich Repeat
  Pfam annotation: Domain name=LRR_1; Domain location=245-264; Score =9.0; E_value=5.9; Accession=PF00560.23; Description=Leucine Rich Repeat
  Pfam annotation: Domain name=LRR_1; Domain location=267-286; Score =12.1; E_value=1.5; Accession=PF00560.23; Description=Leucine Rich Repeat
  Pfam annotation: Domain name=LRR_1; Domain location=288-309; Score =5.4; E_value=28; Accession=PF00560.23; Description=Leucine Rich Repeat
  Pfam annotation: Domain name=LRR_1; Domain location=312-334; Score =2.2; E_value=1.1e+02; Accession=PF00560.23; Description=Leucine Rich Repeat
  Pfam annotation: Domain name=LRR_1; Domain location=336-355; Score =13.4; E_value=0.83; Accession=PF00560.23; Description=Leucine Rich Repeat
  Pfam annotation: Domain name=LRR_1; Domain location=360-382; Score =9.7; E_value=4.5; Accession=PF00560.23; Description=Leucine Rich Repeat
  Pfam annotation: Domain name=LRR_1; Domain location=384-406; Score =13.7; E_value=0.67; Accession=PF00560.23; Description=Leucine Rich Repeat
  Pfam annotation: Domain name=LRR_1; Domain location=417-439; Score =17.6; E_value=0.045; Accession=PF00560.23; Description=Leucine Rich Repeat
  Pfam annotation: Domain name=LRR_1; Domain location=441-463; Score =7.4; E_value=12; Accession=PF00560.23; Description=Leucine Rich Repeat
  Pfam annotation: Domain name=LRR_1; Domain location=465-486; Score =14.0; E_value=0.53; Accession=PF00560.23; Description=Leucine Rich Repeat
  Pfam annotation: Domain name=LRR_1; Domain location=487-509; Score =11.7; E_value=1.8; Accession=PF00560.23; Description=Leucine Rich Repeat
  Pfam annotation: Domain name=LRR_1; Domain location=98-120; Score =12.3; E_value=1.4; Accession=PF00560.23; Description=Leucine Rich Repeat
  Pfam annotation: Domain name=Pkinase; Domain location=726-1002; Score= -4.8; E_value=2.8e-08; Accession=PF00069.15; Description=Protein kinase domain
  Pfam annotation: Domain name=Pkinase_Tyr; Domain location=730-1002; Score=-76.7; E_value=9.2e-08; Accession=PF07714.7; Description =Protein tyrosine kinase
  Pfam module annotation: Pfam domain module=LRRNT_2::LRR_1::LRR_1::LRR_ 1::LRR_1::LRR_1::LRR_1::LRR_1::LRR_1::LRR_1::LRR_1::LRR_1::LRR_1: LRR_ 1::LRR_1::Pkinase::Pkinase_Tyr; Domain
  Pfam module annotation: Domain location=245-264::267-286::288 -309::312-334::336-355::360-382::384-406::417-439::441-463::465 -486::487-509::98-120::726-1002::730-1002
MAALLAFLLLLLLLLSGGAAGDDVAALLEFKKGIAGRDRDRVLGSWSRPATTEAGSGGGCPASWRGVACDGGAVVGVALDGLGLGGELKLATLAGMRALQNLSLAGNAFSGRLPPGIGSLSSLRHLDLSRNRFYGPVPARLANLSGLVHLDLSRNNFTSAFPHRRESSSWQNLRRATSAATSFWGNAHRPAAKLRNAEHVDLSENLSRGHRFGPPHHSTSGTRSALPGNGLFGMMPETLLQNSMRLVEVDLSRNGFSGSLPIVNSTTLKVLNLSSNVLSGSLPATMGKCTSVDLSGNLFSGELAILRSWDGIVEVIDLSSNKLVGSYPNDASQFQNLVSLKLRNNSLSGSLPSVLGTYQKLSVLDLSQNTLEGSVLPTFFMSPTLTVLNLSGNKFSGTIPFESTHSTESILLSSQPGLRIVDLSSNSLTGPLPPDISNLQKLEFLILMMNELSGEIPSEISKLQALEYIDLSHNHLTGRIPDMPQNGLKVFNVSYNNLQGTVPKSIEKFPLSCFRPGNDMLVFPDGLPAGNDDYTGVSQGQTSHVHKAGVRVALIIGCIGAVLLVIFIALAFYVVRSQELCGRNGFRSQITIRDLKGRISPPNLFKPPKDNVIPSKTSFSNDHLLRAAARSMSAQKELLAEASVEYGYTDPKEVAESTSLGVTETSSAIQAQESSPRSALPTSPHFADSRFLEEPVAFEVYSPDRLAGELIFMDSTLVFTAEDLSRAPAEVLGRSSHGTTYKAVLQSGHVLTVKWLRVGLVKHKKEFTKEIKRIGTIRNPNIISWRAFYWGPKEQERLIISDYVNGDSLALYLYESTPRRYSRLSVPQRLRIAIDLARCLQFLHQEKGLPHGNLKPTNIFLAGPDLSPKLVDYGLHRFMTPSGTAEQILNLGALGYRAPELANAAKPAPTFKADVYAFGVIVMEMLTRRSAGDIISGQSGAVDLTDWVQMCSREGRGTDCFDRDIAGLEESPRVMDELLAVSLRCVLPVNERPSMKTVCDDLCSITA

SEQ ID NO: 60129 - protein, 246 aa, Zea mays
  Coding DNA Sequence Number=SeqID_18350
MGEKKYAVKMTASRARLFCLLPPPHMEASPGAVVTVTGTRASAAAAVVGSPGMGRKKIISRDAEKERGALSGLTGGRGGDSTRLSSQKQTVPNQQSCHRWSGAEEWGEALLRSESCGKVIRQCISQQDDVFSISGVRLLELNPGGWVQGLTVNESLPEAHRQTTGTHVGREESERVGAATGISGSKRSDALAARAPPARRVPFRGGIGAAACFTEGYAAAHSSSYGVNRKRKMPSDSPLKEALPQD

SEQ ID NO: 60130 - protein, 398 aa, Zea mays
  Coding DNA Sequence Number=SeqID_18351
  Gene Ontology: Mol. function=nucleic acid binding
  Homolog annotation: Hit_ID=Q04218; Match level="QueryCoverage=39%, HitCoverage=32%, E-value=5e-07, Identity=27%"; Hit description=TNP1
MANREDGFDQFDDNMTNQGEGITQPGGKGDGVNQHRERGLNMGLGLQRMNRARRGKLPIVITEGRIRPVAPIVAAKFATECNIAVRNHVLVLKSWKEYEKHPGLFKLFTAKLSAKFDINTEDALVKNACFQMMRNALRQQRYKLKKQYFDPFPLHLVRKTSPIKSTSDEQWNDLVEHWKGPKNMATCEHNKGNRGKVKFHQTTGSRSYMVHVENLGDKYMDQEPDALDLFKECHYSKKKQGYTSTVQLAIVRQYNAFCNAYFKLSHETNYMYVDCILDSMEDKRSTPGEGEQPMSTTQVVADVLAENTKKNRFLQNVGIQNARPRSSVQNIEAQLEVERKANAELQSLVSIQRERMDVLLKQVHEAELVRIREQEEMKKKQDAMDAQLELMLSQIQPS

SEQ ID NO: 60131 - protein, 117 aa, Zea mays
  Coding DNA Sequence Number=SeqID_18352
MPMRTKATTRQTQAEGVISTWACGGAWPRRGADPKAVASSGEELHRAPRSPMLADTSHRYHGTWQSSWLIRRGSDNDGGESPRRPPFPLFYARDKHSRWGGFSIRSIEQTTNSYSGK

SEQ ID NO: 60132 - protein, 360 aa, Zea mays
  Coding DNA Sequence Number=SeqID_18353
  Homolog annotation: Hit_ID=Q00YB1; Match level="QueryCoverage=26%, HitCoverage=15%, E-value=7e-21, Identity=53%"; Hit description=[T] KOG0698 Serine/threonine protein phosphatase
  Pfam annotation: Domain name=PP2C; Domain location=127-343; Score =18.6; E_value=5e-07; Accession=PF00481.12; Description=Protein phosphatase 2C
MAKPGQVTPPGPLLQRCWCCEEFLGGRFGSRLLGFFLINPLLRDQHKEINNVQIASEIYEIIRRYLTHNPWFIGKVHVSKNRAKHLTDGGSFLVEWSARLRASQGSHRWPTHRRRWPELPGPRVQAAAVDDGSNSGQLMTVELNPMARGASLDVGEVVGVSNRTVGLRVALATFVGGAYLLRRAMAMALARLRHGGGRPSLEGARATLWPASRCRTRGPITCALVLAHAVTIPSQISGVPRIIQRLFVNWSSWILGLKKLDLRAVTRSIGDDDLKPAVTAQPEVIETALSADDEFLVMASDGLWDVVSNQDVLSIIKDTVKEPGMCSKRLATEAAERGSKDNITVIVVFLRPVSTAERIY

SEQ ID NO: 60133 - protein, 63 aa, Zea mays
  Coding DNA Sequence Number=SeqID_18354
MPQGSLCKGYVVYPWPFTSVVKIGSVQPRLERDHDSWVKRYIWVIIGLLLKLGFTNSDKYLTN

SEQ ID NO: 60134 - protein, 93 aa, Zea mays
  Coding DNA Sequence Number=SeqID_18355
MKEARNHYHTRGSSRGGGGTAAERDLVLQWGNRKRLRRVKVQRRDEAAATAAAEKAAISQRRAAVAAAQHHPTGDTHQHHRVLRNDSRLEGGE

SEQ ID NO: 60135 - protein, 127 aa, Zea mays
  Coding DNA Sequence Number=SeqID_18356
MTVCDPTLVIITPGQERETMTSKKLKEVIARVTEVTGGKWWCNESCGLRQIGQRRCQGAVKVRQVCKGGIDNNEGILRGGRRSGALGLCRPCCIGAFIRSVASRLEAEKKALERQVERLHSEATKKL

SEQ ID NO: 60136 - protein, 69 aa, Zea mays
  Coding DNA Sequence Number=SeqID_18357
MADGSHRQELRPRRTEDSAMVVDSDEKSGLPRNSNLNSVLTGFTEGRLRARCRCTPWSGLHCNIIAVAT

SEQ ID NO: 60137 - protein, 122 aa, Zea mays
  Coding DNA Sequence Number=SeqID_18358
MANTTVGITPAREHQRAQNAAERSRGGAKPTSVSNFAMTRTINGEIGVRGGCLPQARTLEHLEDDREALKSRVDGGGLQMHGKHSGERGSGEPEGLGANQGVSQVAGGAAELTEETDATRAQ

SEQ ID NO: 60138 - protein, 400 aa, Zea mays
  Coding DNA Sequence Number=SeqID_18359
  Gene Ontology: Mol. function=protein phosphatase type 2A regulator activity; Cellular component=protein phosphatase type 2A complex; Biological process=signal transduction
  Homolog annotation: Hit_ID=Q7XJ10; Match level="QueryCoverage=88%, HitCoverage=88%, E-value=5e-71, Identity=55%"; Hit description =Serine/threonine protein phosphatase 2A-like protein
  Pfam annotation: Domain name=B56; Domain location=42-396; Score =278.3; E_value=1.5e-80; Accession=PF01603.10; Description=Protein phosphatase 2A regulatory B subunit (B56 family)
MGAAAAEVVAPRPPSAKRKSTTLKFLFELEKPDGGLLPGTAKLPPPSPEPEADSLIDKIASCNRAFTFVDAAEREEERDAKRDRLVEVLGAVRSSGGKRQPLDHRVMVALVEMVGANLFRAMPPPAYPALPPDGADEEAPAVALAPSWPHLQVVYDILLSVVAASDARTLRNHVDRAFLSALLALIVNGFAVPLKEEHRMFLARVLLPLHRTRWAHTYHRQLAYCVLQFVRKEPGLADAVVTDILRHWPVTNCQKEVLLIEELEEIVELLEPVQFQRLAVPICSRIARCVSSYSSQVAERALYVWNNERFLELATASPDVAERILPAFVASVESNLERHWSKCVQQVTASVKSLLEQVAPDLYARCAADLATRRSEAEAAAAVRDARWRRLEAAAAAAAK

SEQ ID NO: 60139 - protein, 336 aa, Zea mays
  Coding DNA Sequence Number=SeqID_18360
  Gene Ontology: Mol. function=GTP binding; Cellular component =intracellular; Biological process=RNA-dependent DNA replication
  Homolog annotation: Hit_ID=Q7XJ09; Match level="QueryCoverage=98%, HitCoverage=62%, E-value=1e-100, Identity=59%"; Hit description =Chloroplast RNA processing 1-like protein
  Pfam annotation: Domain name=PPR; Domain location=136-170; Score =15.0; E_value=0.13; Accession=PF01535.11; Description=PPR repeat
  Pfam annotation: Domain name=PPR; Domain location=171-205; Score=4.0; E_value=2.5; Accession=PF01535.11; Description=PPR repeat
  Pfam annotation: Domain name=PPR; Domain location=207-240; Score=3.4; E_value=3; Accession=PF01535.11; Description=PPR repeat
  Pfam annotation: Domain name=PPR; Domain location=241-275; Score =48.8; E_value=1.8e-11; Accession=PF01535.11; Description=PPR repeat
  Pfam annotation: Domain name=PPR; Domain location=276-310; Score =39.5; E_value=1.1e-08; Accession=PF01535.11; Description=PPR repeat
  Pfam module annotation: Pfam domain module=PPR::PPR::PPR::PPR::PPR; Domain location=136-170::171-205::207-240::241-275::276-310
MSLLLKPKPHLSATGLIIFLRHLCEGSPSQPGQTGTDTSPPPLTRDDTKLVDALLAALLDHRRANPAAELPVPSLSNTLPSLSSAISDLLPSPPPPHLPLHLLLRLLALRRGVPLPEAVAFFHHVSPSLPADSLPDLYASMIVLLAKHRHFGLARHLLDEMRERAVPISRQLILALTRRYVRAEMPSEAADLFRRMEEYGAGAPDPATLASLLAALSKKRLASEAQALFDSCRTVFTPDVVLYTAVVHAWCRAGRLDEAERVFTEMQQSGIMPNVYTYTAVIDAMYRAGQVPRAQELLCQMIDSGCPPNTTTFNAIMRSHVKAGRSEQVLQIVMEV

SEQ ID NO: 60140 - protein, 228 aa, Zea mays
  Coding DNA Sequence Number=SeqID_18361
  Gene Ontology: Mol. function=phospholipase D activity; Cellular component=membrane; Biological process=phosphatidylcholine metabolic process
  Homolog annotation: Hit_ID=Q9C5Y0; Match level="QueryCoverage=94%, HitCoverage=25%, E-value=3e-48, Identity=47%"; Hit description =Phospholipase D delta
  Pfam annotation: Domain name=C2; Domain location=20-139; Score=71.1; E_value=3.4e-18; Accession=PF00168.20; Description=C2 domain
MASPAGGESPAKPVLLHGDLDLWILEARLLPNMDMFSEQVRRCLAVCRPPTSCGTNHPPAAARGGGGRQHHHRKIITRGPYVTLSVSGAVVARTAVIPNSQDPVWEERFAVPLAHRAAELEFQVKDNDTFGAQLIGTVTVPADCVVSGTEAEDWFPVKGTNGKPYKPDTALRLRFTFHPIANNPAYRHGIPGDPWPQGHRGVLLPAPPRWPSDAVPGRAHQGRGPARD

SEQ ID NO: 60141 - protein, 67 aa, Zea mays
  Coding DNA Sequence Number=SeqID_18362
  Gene Ontology: Mol. function=transferase activity
  Homolog annotation: Hit_ID=Q7XXN5; Match level="QueryCoverage=94%, HitCoverage=13%, E-value=2e-18, Identity=83%"; Hit description =Putative anthranilate N-benzoyltransferase
MSCRSTSWTSARAAQATSCCPTSPPCIEGMLFLVPSYIGDGSVDAFVPVFQFQQNLEAFKECCYAME

SEQ ID NO: 60142 - protein, 76 aa, Zea mays
  Coding DNA Sequence Number=SeqID_18363
MACLRVNTLLGSQEEVPVAVAEELQETPAEEIEPEAEVQECPDHRPSTFEKGKPRHIFPMIYNNWFIHYTCLYLLH

SEQ ID NO: 60143 - protein, 767 aa, Zea mays
  Coding DNA Sequence Number=SeqID_18364
  Gene Ontology: Mol. function=RNA-directed DNA polymerase activity; Cellular component=intracellular; Biological process=RNA-dependent DNA replication
  Homolog annotation: Hit_ID=UPI00004C1731; Match level="QueryCoverage =94%, HitCoverage=53%, E-value=0.0, Identity=82%"; Hit description =UPI00004C1731 related cluster
  Pfam annotation: Domain name=RnaseH; Domain location=334-461; Score =13.5; E_value=3.2e-06; Accession=PF00075.14; Description=RNase H
  Pfam annotation: Domain name=rve; Domain location=463-638; Score =96.0; E_value=1.2e-25; Accession=PF00665.16; Description=Integrase core domain
  Pfam module annotation: Pfam domain module=RnaseH::rve; Domain location=334-461::463-638
MKESDQLATSFITPFGMYCYVTMPFGLRNTGVTYQRCMNHVFDQHIGRTVEAYVDDIVVKTRKASDLLSNLEVTFRCLKAKGVKLNPEKCVFGVPRGMLLGFIVSERGIEANPVKIAAITSMGPIKDLKGVQRVMGCLAALSRFISRLGERGLPLYRLLRKAKSFTWTPKAEEAPGNLKALLTNAPILVPPAAGEALLIYVAATTQVVSAAIVVERREEGHALPIQRPVYFISEVLSETKIRYPQVQKLLYVVILTRRKLRHYFESHPETVVSSFPLGEIIQCREASGRIAKWAVEIMGEAISFTPRKAIKSQVLADFVAEWVDTQLPTAPIQPELWTMFFDGSLMKTGAGAGLLFISPLEKHLRYVLRLHFPVSNNVAEYEALVNGLRIAIKQGVRRLDSRGDSQLVIDQVMKNSHCRDLKMEAYCDEVRRLEDKFYGLELNHIARRYNETADELAKIASGRTTVPPDVFSRDLHQPSIKIDDTPEPEAPSAQPEKAPGGYTHLLVAIDKFSKWIEVRPLNSIRSEQAVAFFTNIVHRFGVPNSIITDNGTQFTGRKFLDFCEDHHIQVDWAAVAHHMTNGQVERANGIILQGLKPRIYNDLNKFGKRWMKELPSVVWSLRTTPSRATGFMPFFLVYGAEAILPTDLEYGSPRTKAYADQSNQASREDSLDQLEEARDKALLHSARYQQSLRRYHARGVRSRDLQVGDLVLRLRQDARGRHKLTPPWEGPFVIAEVLKPGTYKLANSQGKVYSNAWNIQQLRRFYP

SEQ ID NO: 60144 - protein, 91 aa, Zea mays
  Coding DNA Sequence Number=SeqID_18365
MEMEGAEENQGNPPQQAASGGAEHWSREAPVTVKKKVRRRRSWQISGELLPREPRRGVGVRLGRQLRAMAEEGASSRMNGAKLTRLGCCWL

SEQ ID NO: 60145 - protein, 406 aa, Zea mays
  Coding DNA Sequence Number=SeqID_18366
  Gene Ontology: Mol. function=transferase activity; Biological process= flavonoid biosynthetic process
  Homolog annotation: Hit_ID=Q7XXN4; Match level="QueryCoverage=99%, HitCoverage=100%, E-value=1e-145, Identity=64%"; Hit description =Putative anthranilate N-benzoyltransferase
  Pfam annotation: Domain name=Transferase; Domain location=1-405; Score=65.7; E_value=1.5e-16; Accession=PF02458.6; Description =Transferase family
MEVKVLSSKLVKPSYPAGAPRPDTTKHVPSSVFDKATYHTQTVTIYYISPPVPSPDAIERGYATALGAYRLFAGQVRPGPDGAPGVLLNDHGARLVEASVDARLADIAPTKPPPAVLRLHPDLDIVEVVQVQLTRFACGSLAVGFTANPAVADGHATSDFLVAWDRAARGLPVGPSPPVHFPPRHDPPRAGFEHRGVEYYRPAPSLAHGHVHGDTTQHSIVVHKAHFTKDFVAGLRARASEGRGRPFSRFETILAHVWRTMTRARGLGSNPLQISTIRISVDGRPRLAAAPAGYFGNLVLWAFPRATVGSLLGRPLKHAAQAIHDAVARVDGAYDFQSFVDFAGSGTVEKEGLETTAPAQGGRAYFPTEGMLLLVPSYIGDGSIDAIVPVFEHNLDAFKQCCYSME

SEQ ID NO: 60146 - protein, 149 aa, Zea mays
  Coding DNA Sequence Number=SeqID_18367
MHDLLLALELLGCSGWFLGQEGKVPGCSDAGTDFLPAGCSNGTAGGAEETASSTAAGADADAGAGGLASALENFLLPYYHQSVRYMVTTEVVPELLLRDGFRVGKGGAEHLLNGHRGWGWQLLLSCLLLGCLLLLLSTSSTSAPVLRHL

SEQ ID NO: 60147 - protein, 704 aa, Zea mays
  Coding DNA Sequence Number=SeqID_18368
  Gene Ontology: Mol. function=nucleotidyltransferase activity; Cellular component=ribosome; Biological process=metabolic process
  Homolog annotation: Hit_ID=Q1SFI4; Match level="QueryCoverage=77%, HitCoverage=86%, E-value=1e-102, Identity=37%"; Hit description =Photosynthetic reaction centre, H-chain, cytoplasmic
  Pfam annotation: Domain name=PRC; Domain location=190-283; Score =46.7; E_value=7.7e-11; Accession=PF05239.7; Description=PRC-barrel domain
  Pfam annotation: Domain name=RimM; Domain location=95-184; Score =73.6; E_value=6.3e-19; Accession=PF01782.9; Description=RimM N -terminal domain
  Pfam module annotation: Pfam domain module=PRC::RimM; Domain location= 190-283::95-184
  Subcellular localization annotation: CTP_CleavageSite=60; ConfidenceScore=5.64e-01
MAPPTSASARPLSLPLTVPLSCHRSHLLPAPNARLLTRRRVALAPTRPGATLLSSLSDAREEEEDESGFYEEDEQQEFEDEEEQGYDGENEELVEVGYVSGAHGVRGDVLVTPRTDFPELRLATPGTRWLRARAAGKQQVREFELVRGRAHTGKKSWIVSFDGVNNLDEARQIVGSAVLVKARDRPEIEDDEFYSLDLVGMRVIVKDTGKLVGTVGQVFNFGGGDLLQVIMGSSEGTAVDPDSENQDSISSREHVWIPFAEDIVPDVDMASREMRITPPKGLLELNSRSDKRSKKERRAMEWKDRKRFQRRVIAGKKVLSEMDQVHVLEGLVSGDKVQKASLAEQIGSIDFQLFRHAVHCVSKQIESSSMNLLANSSLSRKKVIKIPYKTLINLGDKAEHAFSTEFKNGLDILLKSKAAIVLVRNGSDSDTEFLSLLNSFSELMKVVENKVSPPLIVIAPAGHVESVRKCLVENDYFGFDTQKVWVLEEVELPVVSICSEGNRKKVLMKSPWEIIKKPTGSGAIFSLLLSNKILETLNEMGVQYTQICSSSNKPIIGHPLLFGAVASRGADVGIQVSKTGETLDDFDVILSIDQLNKMCRDVTQIRFSARSEQNVHVEHVDGQWVAVQPEVANSHRLHAEGSIYEGEYQPPTANSTGPRRIKNLLEDKVVLYSIQQRSLNSPIDLEYTTGSSIYKVSINDYLSI

SEQ ID NO: 60148 - protein, 131 aa, Zea mays
  Coding DNA Sequence Number=SeqID_18369
  Homolog annotation: Hit_ID=Q5JMH8; Match level="QueryCoverage=62%, HitCoverage=7%, E-value=1e-09, Identity=39%"; Hit description=DNA binding protein-like
MAQYFTLIWCSQMQCIYAEIPSDIVDEQNPLINVNKVYIIRRFRVIYAKSSYKVVDAPFMICFTKFTIIELCREPPTTFPQYVYRLTPYNEIDPFGPKAWRLLKSTRYIMDPLNQPLRLEMYSSQISVITL

SEQ ID NO: 60149 - protein, 272 aa, Zea mays
  Coding DNA Sequence Number=SeqID_18370
  Gene Ontology: Mol. function=magnesium ion binding; Cellular component=integral to membrane; Biological process=photosynthesis, light harvesting
  Homolog annotation: Hit_ID=P04782; Match level="QueryCoverage=79%, HitCoverage=94%, E-value=1e-103, Identity=75%"; Hit description =Chlorophyll a-b binding protein 25, chloroplast precursor
  Pfam annotation: Domain name=Chloroa_b-bind; Domain location=65-199; Score=177.7; E_value=2.8e-50; Accession=PF00504.12; Description =Chlorophyll A-B binding protein
  Subcellular localization annotation: CTP_CleavageSite=30; ConfidenceScore=5.57e-01
MASSTMALSSTAFAGKAVNVPSSSAFGEARVTMRKTAAKAKPAAASGSPWYGPDRVLYLGPLSGEPPSYLTGEFPGDYGWDTAGLSADPETFAKNRELEAGSQIFSEGGLDYLGNPSLIHAQSILAIWACQVVLMGAVEGYRIAGGPLGEVVDPLYPGGSFDPLGLADDPEAFAELKVKELKNGRLAMFSMFGFFVQAIVTGKGPLENLADHIADPVNNNAWAYATNFVPGKRRVPSAIKAKVAWLYGLSIRLDLLAYVTGHTPRGSKQAFA

SEQ ID NO: 60150 - protein, 181 aa, Zea mays
  Coding DNA Sequence Number=SeqID_18371
  Homolog annotation: Hit_ID=Q84XU8; Match level="QueryCoverage=83%, HitCoverage=72%, E-value=1e-52, Identity=68%"; Hit description=Cold acclimation protein COR413-TM1
  Pfam annotation: Domain name=WCOR413; Domain location=3-174; Score =190.4; E_value=4.2e-54; Accession=PF05562.2; Description=Cold acclimation protein WCOR413
  Subcellular localization annotation: CTP_CleavageSite=25; ConfidenceScore=5.53e-01
MSISMRLAIPAPAVTAAAPTRLRVRAAAAGNRGSLSVARAAVRAETGALRVLLVAKGTAIHKSFLVPFFALQAPCSIISWIKGDYGQWTAFLALLVRLFFFIPGELELPLSTMLLVSVAPYQFMDLRGTQGGAVLSLAIAAYLAFQHFTRVGGPGKAFEQGSIVATLAIICIMIVPLMLLF

SEQ ID NO: 60151 - protein, 186 aa, Zea mays
  Coding DNA Sequence Number=SeqID_18372
MARDEGGRRRRRRNSLFPHDGTELPTFFLCGVAPAFASGNVMPRPWRKGSRAGEARGCADCRAAPIRRQGRQGDDGWGRGEERTTEEQKRRPTCCGVIFTRTVQQLQQWVGGTNEYLDRPLDLTFSERWRCKRQGEILCSLIPRCSSISVRVNLARGDCGEIEVDIKNAERKRKEKRYAGDTRVYV

SEQ ID NO: 60152 - protein, 1535 aa, Zea mays
  Coding DNA Sequence Number=SeqID_18373
  Homolog annotation: Hit_ID=Q5JJP6; Match level="QueryCoverage=54%, HitCoverage=99%, E-value=0.0, Identity=59%"; Hit description =Adenylyl cyclase-like
  Pfam annotation: Domain name=GYF; Domain location=510-565; Score =40.7; E_value=5.1e-09; Accession=PF02213.6; Description=GYF domain
MAERKLDRPSALGKGGLSLGIEEDRVAAAMGFVDHSKDQHHLDNSIPLSPQWLYAKPADGKISLPHGSSLELAEKEVRMLEGTVDRKERRRNAFDADSGLRWLEEERETSLLGRRERKKDVDRDVDNRKIDRRSDNVSARDITDPRAAPASERWHDGSTRGLGNEGRRDGKWSSRWGPDDKEKDSRSDKKVDAEKDETHADKLTFTGRLLSESDSRDKWRPRHRQESHSVGTATHRAAPGFGSEKGRVKDSTNVGFAAGRGRGNPNSVASFNRPSSAGSIGAPAVHGKFAKTAVSFCYPRGKLLDIYRQKNMMSSFDDVHMKLDEIPSVTLSTAAKPLAFVAPDTVEEALLEDIRKGKVISSEGINGIGNKKERAKELEEPASGIDDDMGKASFAIAGLGQEGSSGLISVNDASYVEGTLPSGVSTSLLKISLEENAISNQHGITDTQEGLKTAEIKENADHALGTKLPDDSNTLFEVPSFEHLQEPTRPYQSNNMDIKVGGHANYPEELTLYYLDPQGGVQGPFLGADIISWYEDGYFGLELPVRLSQFPDDVPFRPLVEVMPHLAQKTQSRIPLPCDGNSESLESSQSKFESSVPSTSSGRTDQFSIWDSESNAVDPKRGDHEASIPSRSGWLSSPETGKDISNTSNRQQHIPESVNQDAEEVLYTGRPNSSMGQSLRDLENDRADFQSTPHDPHSVAGEANLLQHNVPRDSDLSPLGLLWSELEGRPKQPLSSNVLSVNERRNPKPTTPKDIPPVNMRQGPLSRMNEVSSVRDEWPANFGRLDNMNDANISGRIHQVEAEHHLNFDGHLLLQQIRREQQQQRQEQLMAHNNLEFSGAFPGQVFDPLNQHRQPMNQQIPDVEHLLRIQFELEQQQQRQLQQEQHQRQLQQQRQAQLLQRQQQQQQQQQQQMILEQLLQQQLQGSNFGPTSMVDQVLLREHVLNELHQQPHHLQRQHDAAIEQLIQAKFGHGLHREHHNDMLDVLSRSNQRQMLPLEQQLLLGLQHEQQLKSQQLANALRQHSGQEEERHLSGVWPMDAAAQFIRSGTSPNQIHSRFDLLENLQRSSSFDHHEHLDRSLSLHEQLHMGGQGIRSLERTGSLPGGGPGPNPDVINALTRHHGLSQLETHGDVYPLVQMPMLPSGVHPQQLRHQDQLPGSHIGRLERHWSDANGQLQNSLMESSHINQLQIEAEKERRNVEMNLSVDNPHAWGALMNKDRNTEQDLTDMIHKKLVLQSQQSRGFPDVSVPASFRRKDHFVQPVVESPLRSVDMSFEESLSERSLYAKSGQLAQEGSSNLGTLPNSIENTGKFNLRSGSGSMLEQKHFLGIDDVQSDFLETTGGRTSANQLVGSVNELTRGKRQGSSASLAGDDPNLADEGVSKWSDSGMSKGSSHSLLKRSTNQHTTTSQSVPTDLSAIRLKKAGLASSDENKMEAGFASVAQGMEGCVPSNKETGAYGMPSATNNPDASGQSFSEALKSSRKPPLQYDASESADCGPGGKGAKKKTKKGKQIDPSLLGFKVHSNRIMMGEIVRDD

SEQ ID NO: 60153 - protein, 695 aa, Zea mays
  Coding DNA Sequence Number=SeqID_18374
  Gene Ontology: Mol. function=protein dimerization activity; Cellular component=chromatin; Biological process=electron transport
  Homolog annotation: Hit_ID=Q2QMZ1; Match level="QueryCoverage=90%, HitCoverage=59%, E-value=1e-106, Identity=36%"; Hit description=HAT family dimerisation domain containing protein
  Pfam annotation: Domain name=DUF659; Domain location=285-438; Score =118.8; E_value=1.5e-32; Accession=PF04937.6; Description=Protein of unknown function (DUF 659)
  Pfam annotation: Domain name=zf-C2HC_plant; Domain location=48-100; Score=41.6; E_value=2.6e-09; Accession=PF07567.3; Description =Protein of unknown function, DUF1544
  Pfam module annotation: Pfam domain module=DUF659::zf-C2HC_plant; Domain location=285-438::48-100
MDCHGRGKGNEKAILDSGESSSAAGGLSKTYVVTKEGKRIELKGTIKDPWSHGTKRGKLGWKCGYCNASHASGGATRLREHLCGLQGNVKPCFNVPRDVKNILLEEVALSKKKKRDTTENRLYIQKALVEHDYRTIIARLNEEEQLEMAMRESLRDVGLTYDGSSRGSGIVIGAASGSRVSNSVAGNYGQTSGSRSGSSTKQSPLRSFYPGPSSSKAPFDIDLARSRAPSQPRVDIMLCRDSKLKLWKALSKWFHANDIPGRKADCPYFRAAMKLAQQLGEVPLPKGKDIDGQLLDMNYNDLEAQMESFKEDWSRYGVTIMCGSWTGPTMMCIINFMIFCNGRMFFHKSVNATGEVQNAEFIYDCIKEVVVDDVGAKFVVQIVTDNGSNYKKACKQLIAEHPHITWQPCAAHTVNLMLKDIGKFDDVANVVDSAKRICRFFYKHNRLHAMMREKIGGELIRWNATRFGTVFMCLQSFWDRQDQLKAWMISAEWRNSQWRNEEDHSFAYDCLTDRIWWDDMELVLNAVGPIFFVLRYADQQKNATVSGFLPKMIQAYNDISAKLKKSERGKGGLLKRTTEVISKRIRYLLNETLMLAGAALDPQELYRSNLAKKSSCQLAVTLAIKKLATSTKEVAAAIDQFSRFIEKKGLFEDPEAKWSALNGKPDAGSRHGEPTPLRPRSTRKRKPTLKSITEL

SEQ ID NO: 60154 - protein, 40 aa, Zea mays
  Coding DNA Sequence Number=SeqID_18375
MEKGEKLSLASKNWGQNSGVVDEVILDPFELQAQNSLGKI

SEQ ID NO: 60155 - protein, 143 aa, Zea mays
  Coding DNA Sequence Number=SeqID_18376
MEFLDQILPSLGFLVLRLGQQDWGKDGVFRAGSLPEHYDGANEGGPEGGVLEGGKGKDMSQLGGDWGKRMGVERCEVLEPGAFLNITMAHCGANLWKAQGRGRHRRPQTARGKRKAVAWEGERDQKERRQDNVGECSVADGCG

SEQ ID NO: 60156 - protein, 108 aa, Zea mays
  Coding DNA Sequence Number=SeqID_18377
MAAGAGRRTAGPGGQGGGRNRPWGKGERGWGREERGRGELTGEGRDGEGRPAAGAAEGGAFDQADEDFDRDIYKVEDPVVKESAGALYDRMWVLYGREVVRERATPSQ

SEQ ID NO: 60157 - protein, 64 aa, Zea mays
  Coding DNA Sequence Number=SeqID_18378
MVFSNGAYEEALFSAAVCQLQADRPLKKPTLLAIEDLTSQFQLFYYVFAFNITVKIDRRTKDQV

SEQ ID NO: 60158 - protein, 62 aa, Zea mays
  Coding DNA Sequence Number=SeqID_18379
  Homolog annotation: Hit_ID=Q43704; Match level="QueryCoverage=50%, HitCoverage=5%, E-value=4e-11, Identity=96%"; Hit description=DNA replication licensing factor MCM3 homolog
MEEQGLLIKRDMLKKMMVMLMQPFLSSMIECSMSYRAIQSCGGISVYGRATGLRSMQNLEFL

SEQ ID NO: 60159 - protein, 93 aa, Zea mays
  Coding DNA Sequence Number=SeqID_18380
MMVRHVRGAAPPQTDTGVVSGSAPSITEWAIEIRKRAYLGQTLGWSAVWHDVNFLYILCLFVSWRVEEPVTEDPGAQQIEVAEQELIEGKLCP

SEQ ID NO: 60160 - protein, 156 aa, Zea mays
  Coding DNA Sequence Number=SeqID_18381
MAAVREEARMRAAASLLGSGHQGPALCRGGGLLGLAAASGAIGSSASPDLGPWPQKEVSASPDPRARPQPRPRKVVSASPDPRAQPRPRPREESHPRPTPASALGGVSASPDLGLGPTTPQGGPLGVETPTNFVLGSLSLKNIINVGFQGVKPILS

SEQ ID NO: 60161 - protein, 761 aa, Zea mays
  Coding DNA Sequence Number=SeqID_18382
  Gene Ontology: Mol. function=protein binding; Cellular component =nucleus
  Homolog annotation: Hit_ID=Q10LJ1; Match level="QueryCoverage=98%, HitCoverage=92%, E-value=0.0, Identity=47%"; Hit description =Expressed protein
MESESLDFEDNGDHQPSSEASLASDVVYDDSLVCPCIGSEHQAEIPNLATEDECRKLMASSHNDSIFHGYGYPVVVGLALPITWASPSEVDKTEEVLQTQKCSEFGTKGSTGDVHSQQRETKQLSPLPYSPVALWSDLEAEVFLLGLYIFGKNLNLLSRFLGTKTVGDVLAYYYGKFYRRDTYKRWSDCRKAKTRKCILGERIFQGWRQQELISRLKSKIPKEAHDSLIEVFKSFSDSQTSLNEFVFSLKSTVGAETFVEVVGVEDIIKFLNGDFRRSKTRSNDIFWEAVWPRLLAKGWHSEQPKDVSTTKSCLVFLVPGIKKFSRSKLTKGTHYFDSVSDVLKRVAADPVLLELKVDAINNGLTAEENGSITDVKLNQDSPLDGYQELPKFTIIDTSLVEGEEPFNIRELRNLPADANITFLLSQHSSNMVSYSSSEEEAANDRLSDDQEDCGRVKAEAKEIEMVSAGSLQNMVTANGHSSNVNDKIDLTGIYGIKTKPERRKYLSPVSKRRRLNSCSNEQASRRSFSFSKGGGFEKQKSKPPLISSKPAAVEVGDTFQSKTISSCSTKEKPSEHTADALNSLIDDEQNARMVMEVEAVAEVHSKVIAVQPKFVKERAEFIGPVDLNKLETLHDDKASRSIDTTSLGNLGSMKVDEAPSSSDKNMACDPSGAAGRPVSEAPDPALQVNARRHGTRNRPPTAKALEAVAFGLLGSGKRKGDLKNRATSRPSQRARKSAKDLVPVASSGDAKASCIDAEEQR

SEQ ID NO: 60162 - protein, 149 aa, Zea mays
  Coding DNA Sequence Number=SeqID_18383
MDKFTKFGTPDLLHRKGSKFVHRWLAIRTGLVCHQAVYAERMQNGQLSGSDPDQSGGASDLQSSTASSRFNCHLMMWRVRCTTEPCTIHLTCQNGYLLKLIVRGSVLHQTDTIHGPSFSTYNGKEDPKTGSTIASSSSLGSIHSPEHLF

SEQ ID NO: 60163 - protein, 109 aa, Zea mays
  Coding DNA Sequence Number=SeqID_18384
MTLPRWPTVSGITAEFAWTEAEHPDEVGAIPSARAITTRIPGGALGVPVKGINPTSWPHATVTQANRMRDQASAIVVPRASAANAEREIFLASGTRARGFGPCRSYIVD

SEQ ID NO: 60164 - protein, 187 aa, Zea mays
  Coding DNA Sequence Number=SeqID_18385
  Subcellular localization annotation: CTP_CleavageSite=58; ConfidenceScore=5.03e-01
YSSPEANPGGIQSYNSPEAKARQNRQSRLARSQPPTGDTITTHPRPNPGWTVSHDSPEAILGWDRQSRLARGQPGVGEVATSRPWPSSGGTGSHHSPEANPGGIRSHDSLEAILERERLSRIAQGQARMGDAVTTCPRPTSGGRHNHDSSEAKPGQETQSRLARGHLWARVRAAATTDCDNVFCVES

SEQ ID NO: 60165 - protein, 185 aa, Zea mays
  Coding DNA Sequence Number=SeqID_18386
MAAVHEERKPIRTPTDLAAAIHAAADADIDAVAALALSAASDVPLPTHSLALLLRRLFTTRSIAATRGLLDKLHPSGEDGCPRPNPALRGALLALADAVCRRGPPASQLPCDGRPSRRARPLHPPIVRACLSGPLKRGIHLLGIFLTCGIRWRGGTESEKPGSRSGQEGAEDLHLCIDSSLSLVL

SEQ ID NO: 60166 - protein, 161 aa, Zea mays
  Coding DNA Sequence Number=SeqID_18387
MARCSPARNHAFWCTTTYVYTWDSVFATPQNTRQVHGCRHKDGGASERAVAHFVGLPSQSRQIECHARDAGWVRGGAWGGGMGEHRDDDAAASRGQRQGRRGWLSRLGERVGHVVDADYGSGVSKMETPPMDRRRCARIEGPSATKHGPNSSPFAVLDRFS

SEQ ID NO: 60167 - protein, 55 aa, Zea mays
  Coding DNA Sequence Number=SeqID_18388
MAASMASSWGRSIRETVLETVASWWYKLPNIIFVDIMNMVCGCVDKTFSDRLQIG

SEQ ID NO: 60168 - protein, 140 aa, Zea mays
  Coding DNA Sequence Number=SeqID_18389
MAQQTCAVRCAYPTRRGYKSMPVVCSQARLPLAIAINPIGNTPLEFPEPSIASSNSAAIGEFTPSSIEERERIELAGDLRVRCWCVRSEFGETEGGSPARALHGGPISSVVVWASLCRELTHRLGNPSRRPLRGRLGLHY

SEQ ID NO: 60169 - protein, 124 aa, Zea mays
  Coding DNA Sequence Number=SeqID_18390
  Homolog annotation: Hit_ID=Q8SA97; Match level="QueryCoverage=99%, HitCoverage=19%, E-value=3e-08, Identity=45%"; Hit description =Ornithine carbamoyltransferase
MAPPVDVAGPRPRLGDVEVSLRSWSSPCSVAEAESEPLGRARRRPLAEARAEFESRGRAKRSSSSSGAEPKSEPWVGRSRVRRLPGLCPSPSPGSGGAEFAVFRGLARVRALGRAERSSLSSGA

SEQ ID NO: 60170 - protein, 507 aa, Zea mays
  Coding DNA Sequence Number=SeqID_18391
  Homolog annotation: Hit_ID=Q5U1N0; Match level="QueryCoverage=45%, HitCoverage=69%, E-value=1e-60, Identity=57%"; Hit description=Class III peroxidase 63 precursor
  Pfam annotation: Domain name=peroxidase; Domain location=56-244; Score=163.1; E_value=7e-46; Accession=PF00141.13; Description =Peroxidase
  Subcellular localization annotation: CTP_CleavageSite=17; ConfidenceScore=5.28e-01
MSGRVFVLAAAFGVLLAAAAVSSRPVLTPLGTSRPAAGDLSVYFHADSCPQLETIVRSSVDAALQQNVRLTAGLLRLLFHDCFPQGCDASILLDNGERGLPPNVGLQQEAVQLVEDIRGKVHAACGPTVSCADITVLATRDAVSLSGGPSFTVPLGRLDSAAPASSNDVFTLPPPTATVDELLTAFGSKNLSDPADLVALSGAHTVGEGAVQLVWRRGGPGHRRRDAVRDGDVLGPRERRHAAGPGLPDARRVRQPLLRGADAEEKTRGTSMIKMSQLRGPQGERRRDPPEYKLIKRGKDPKSLGLIEAGVNIVMEPIKRPSFGFNQGAKWQPKALWSGSTGLSGAPEDSNSNSPPSGISRGTRAIIHRTVRCTPDSVRCAKKERPQELASFGKLQRLVRYNSPDCPVCTGLSGATPEQRLVGANGYLRRIKCARSARRSQARPYWHTGQGTVRVRDVGRPFIDNIEAKAELRRGRSLPETRTEPAPGFTDVCDTVEGMASRGIRGE

SEQ ID NO: 60171 - protein, 140 aa, Zea mays
  Coding DNA Sequence Number=SeqID_18392
MAQQTCAVRCAYPTRRGYKSMPVVCSQARLPLAIAINPIGDTPLEFPEPSIASSNSAAIGEFTPSSIEERERIELAGDLRVRCWCVRSEFGETEGGSPARALHGDPISSVVVWASLCRELTHRLGNPSRRPLRGRLGLHY

SEQ ID NO: 60172 - protein, 159 aa, Zea mays
  Coding DNA Sequence Number=SeqID_18393
  Gene Ontology: Mol. function=oxidoreductase activity; Cellular component=vacuole; Biological process=response to oxidative stress
  Homolog annotation: Hit_ID=Q5U1N1; Match level="QueryCoverage=93%, HitCoverage=45%, E-value=2e-33, Identity=51%"; Hit description=Class III peroxidase 62 precursor
  Pfam annotation: Domain name=peroxidase; Domain location=2-102; Score= -94.4; E_value=0.042; Accession=PF00141.13; Description=Peroxidase
MVAKIQERTVRGLGDPADLVALSGGHTVGKASCGFIRRGNDDFARRIAAICSGKQSLDVITPDAFDNRYFVALRSTQGVLLSDQGLNGDQRTSRFVAAFASNQGAFFDQFAKSMVKLGSIRAAAPGEIRRNCFRPNGGRAAADISALVGGDDEGYAASA

SEQ ID NO: 60173 - protein, 205 aa, Zea mays
  Coding DNA Sequence Number=SeqID_18394
  Subcellular localization annotation: CTP_CleavageSite=26; ConfidenceScore=5.63e-01
MASTLRWLGSSVGPLPLHSSLRFSSCASMPGHGAMVVAACPCSPAMPVGPGSSVCRLYSAPTAVVRSPWRTRASSRLCSYASLPCSRFPVIETVRGNEFCSMDLGNTSSTAGFAVDQSPPRLGQTIAKLTVWTIPYRFAIVSFACNTDTLRVYELESCPDLHRRWRHRAGRRRHRTQGDGRLVRPRPLDAQRAHQIWSRVYLLLR

SEQ ID NO: 60174 - protein, 205 aa, Zea mays
  Coding DNA Sequence Number=SeqID_18395
  Subcellular localization annotation: CTP_CleavageSite=26; ConfidenceScore=5.64e-01
MASTLRWLGSSVGPLPLHSSLRFSSCASMPGHGAMVVAACPCSPAMPVGPGSSVCRLCSAPTAVVRSPWRTRASSRLCSYASLPCSRFPVIETVRGNEFCSMDLGNTSSTAGFAVDQSPPRLGQTIAKLTVWTIPYRFAIVSFACNTDTLRVYELESCPDLHRRWRHRAGRRRHRTQGDGRLVRPRPLDAQRAHQIWSRVYLLLR

SEQ ID NO: 60175 - protein, 205 aa, Zea mays
  Coding DNA Sequence Number=SeqID_18396
  Subcellular localization annotation: CTP_CleavageSite=72; ConfidenceScore=5.63e-01
MASTLRWLGSSVGPLPLHSSLRFSSCASMPGHGAMVVAACPCSPAMPVGPGSSVCRLCSAPTEVVRSPWRTRASSRLCSYASLPCSRFPVIETVRGNEFCSMDLGNTSSTAGFAVDQSPPRLGQTIAKLTVWTIPYRFAIVSFACNTDTLRVYELESCPDLHRRWRHRAGRRRHRTQGDGRLVRPRPLDAQRAHQIWSRVYLLLR

SEQ ID NO: 60176 - protein, 187 aa, Zea mays
  Coding DNA Sequence Number=SeqID_18397
  Gene Ontology: Mol. function=phosphotransferase activity, alcohol group as acceptor; Cellular component=cytoplasm; Biological process =carbohydrate metabolic process
  Homolog annotation: Hit_ID=Q7Y152; Match level="QueryCoverage=59%, HitCoverage=17%, E-value=3e-21, Identity=51%"; Hit description =Putative galactose kinase
MCATRQSRWNCGYDPIRLICWLDEAHLCLARLGDCFHAIYGAPPYVNSSPSLACACAFELRLRLTVVMRRLVVAAGRVNLIREHIDYEGYSVLPMAIGQDMIIAIRRANDRYVWATDVDDKYLLCIYPADSNKVLHALPLSIYIDWYYNMVYHDTLFKYGCTVAIKCFGRFACPNSRQFLVRLPCSM

SEQ ID NO: 60177 - protein, 118 aa, Zea mays
  Coding DNA Sequence Number=SeqID_18398
MMVPRLRADHIVLHNENEKRRPGDHDAHTDNMTSPRTTRKLGKNIGADVLKQENNGVMLPKSRAEALKMGDDRRRDMYDGFNSDTLGHSDALVKVVDEFVARAFAGEPRVTKCPCTRC

SEQ ID NO: 60178 - protein, 177 aa, Zea mays
  Coding DNA Sequence Number=SeqID_18399
MSGAAPDCPESRESYDISHVAQEVVEAKAELLRTQLTESNDRIIDKFLDYVGARGSSLVEHLDNVLCHIRDIVDFGIHRGTVVALLVGELWSGYGLRDVVSPPLSLSDEGVDNMLEGFDEALELEALSLYLCPDKTTRFVCAHGRNCDLRLLDISDCVCEVVEFEVHRGVVVALTIT

SEQ ID NO: 60179 - protein, 414 aa, Zea mays
  Coding DNA Sequence Number=SeqID_18400
  Gene Ontology: Biological process=regulation of progression through cell cycle
  Homolog annotation: Hit_ID=Q9FFF9; Match level="QueryCoverage=84%, HitCoverage=35%, E-value=6e-51, Identity=51%"; Hit description =Meiotic check point regulator-like protein
MVSSSSSLLNARDLNRPSKEYGLTYNIPFQANILETDNKANGAIISSHLILKHPFEEPQVFLATDIDGMPIISFLLHEQKILLAVRIQVDDATEEAFGDIKPHMSWNIPAFAAAPVVVTRPRVRVGVLPFTDILVLSSDNDLLLYSGKQCLCRYTLPNELGKGFFSNHELNSDISDTYSDLKITSIADAVEGRINVTCSNGLPSVDLIAILSIYSFPDAQMFVAQKSFLFFVASGSARNTEELTVLAMVAEKFGHRQLDLLPVGVSLVLRHALDKCRDSPPDDWPATAYVLVGREDLATAKMGTVRKENLLWNNDNLTSMSVPYMLHLQPVIIPTTAPDIPASEVLNSDDSDSVYKSVEDGMEHIFTSTTQLRFGHDLRLNEVRRLLCSARPVPIQTPTNPSVSDQDLHQILSY

SEQ ID NO: 60180 - protein, 431 aa, Zea mays
  Coding DNA Sequence Number=SeqID_18401
  Gene Ontology: Mol. function=AMP deaminase activity; Biological process=purine ribonucleoside monophosphate biosynthetic process
  Homolog annotation: Hit_ID=Q1SKM8; Match level="QueryCoverage=46%, HitCoverage=28%, E-value=1e-103, Identity=78%"; Hit description =Adenosine/AMP deaminase active site
  Pfam annotation: Domain name=A_deaminase; Domain location=77-378; Score=187.7; E_value=2.9e-53; Accession=PF00962.12; Description =AdenosineAMP deaminase
MLEQEIMDCRFEDQEMRLAPRNTCSQRWTGACGAADPIGVDDRLRSQRGLKKKIVIEGRHVVDRGTIVVGDLRLSVNRRGAWFAVRHASPLHNVDDVLALVKEEALWRRSTVTSRKWWRRSRSFITNSRAGWRSCAGGGREHDVVDVEKEAGRVDLLSTMMEEGRWGCGDVIPRLYNVYKEMGIVTSFQNLLDNIFVPLFEVTIDPASHPQLHVFLKQVVGLDLVDDESKPERRPTKHMPTPEQWTNVFNPAFSYYAYYCYANLFTLNKLRESKGMTTIKFRPHAGEIGLAMSPLSNNSLFLDYHRNPFPTFFQRGLNVSLSTDDPLQIHLTKEPLVEEYSIAASLWKLSSCDLCEIARNSVYQSGFSHALKGLFGEKGHLSGQGLPHSKFLLPSEGRSTLTLVRCIHSGLDGGDGGEPARGPQRTPWETK

SEQ ID NO: 60181 - protein, 369 aa, Zea mays
  Coding DNA Sequence Number=SeqID_18402
  Gene Ontology: Mol. function=AMP deaminase activity; Cellular component=integral to membrane; Biological process=purine ribonucleoside monophosphate biosynthetic process
  Homolog annotation: Hit_ID=Q84NP7; Match level="QueryCoverage=76%, HitCoverage=34%, E-value=1e-111, Identity=69%"; Hit description =Probable AMP deaminase
MSAESWYHLIQKKGNTGNWGRNSQQHSHSNTHNILDPFSPFQIEGEHKGNAIVENGAAKPLAAANLIRSRSKSNNLHAVQPDPVAADILRKEPQQESFVKLLTTPKEIPTADEIEVFKILQKCLELRDSYLFREEVAPWEKEVINDPCTPKPNPNPFTYVPEPKSEHVFQTVDGVIHVYADKDCTESIYPVADATTFFTDLHYILRVTAAGNTRTVCHNRLNLLEHKFKFHLMLNADREFLAQKTAPHRDFYNVRKVDTHVHHSACMNQKHLLRFIKSKLRKEPDEVVIFRDGTYMTLKEVFESLDLTGVLYVATLEAYEVEMDVYMFDLSALVVNKACAKAILLMWAQLCNSYKIHNEAMYLDVVEEA

SEQ ID NO: 60182 - protein, 102 aa, Zea mays
  Coding DNA Sequence Number=SeqID_18403
  Subcellular localization annotation: CTP_CleavageSite=40; ConfidenceScore=5.44e-01
MVSSLLSSPCPSCQPSPLPSASPSCRSWAVAPLSWHWAAVAAAGADVDTRPTRGLPDGAQIGAAASQAGAATSLPSNAGTLHFPSVDGATAYKLARGLPDGA

SEQ ID NO: 60183 - protein, 121 aa, Zea mays
  Coding DNA Sequence Number=SeqID_18404
MASRLATLPCRAVRAVPIELAAPAPAPAPTGDADNGATLSSSTREAQQPCCIRSIPIPSGGSGIASNDERGRKRRADMSSYVSLSYRDSPPDRQILLGNHRTIVSHLSLSSLHPVLTRFAL

SEQ ID NO: 60184 - protein, 1136 aa, Zea mays
  Coding DNA Sequence Number=SeqID_18405
  Gene Ontology: Mol. function=protein dimerization activity; Cellular component=nucleus; Biological process=regulation of transcription, DNA-dependent
  Homolog annotation: Hit_ID=Q6Z2W3; Match level="QueryCoverage=92%, HitCoverage=96%, E-value=0.0, Identity=69%"; Hit description =Putative auxin response factor 7a
  Pfam annotation: Domain name=AUX_IAA; Domain location=875-1051; Score= -104.8; E_value=0.056; Accession=PF02309.7; Description=AUXIAA family
  Pfam annotation: Domain name=Auxin_resp; Domain location=225-302; Score=118.9; E_value=1.4e-32; Accession=PF06507.4; Description=Auxin response factor
  Pfam annotation: Domain name=B3; Domain location=147-252; Score=86.5; E_value=8.2e-23; Accession=PF02362.12; Description=B3 DNA binding domain
  Pfam module annotation: Pfam domain module=AUX_IAA::Auxin_resp::B3; Domain location=875-1051::225-302::147-252
MKQSPASSGVTAAPVVPAPAPAAASTGAAPPCEGERKAPAINADLWYACAGPLVSLPPVGSLVVYFPQGHSEQVAASMQKDIDAHVPSYPNLPSKLICLLHSVTLHADPDTDEVYAQMTLQPVNTYGKEALQLSELALKHARPQMEFFCKTLTASDTSTHGGFSVPRRAAEKILPPLDFGMQPPAQELQARDIHDNVWTFRHIFRGQPKRHLLTTGWSLFVGGKRLFAGDSVIFVRASPTEFVIPFAKFQKALYSNQISLGMRFRMMFETEELGMRRYMGTITGITDLDPVRWKNSQWRNLQVGWDESAAGERRNRVSMWEIEPIAAPFFICPQPFFGVKRPRQIDDESSEMENLFKRAMPWLGEEICIKDAQTHNTTMPGLSLVQWMNMNRPQSSTLNTGIQSEYLRSLSNPAMQNLGAAELARQLYVQNHLLQQNSVQLNASKLPQQVQPINELAKGSLSCNQLDVIINQQELKQEVGNQQRQQQPVNQAIPLSQAQTNLVQAQVIIQNQMQQQQQQQQQSPTRCQKGTSVQQLLLSQQQQDQNFQLQQQQQLLLQQLQQQNQQQQQQQQNQQQLNKLPAQLVNLAGQQAQLSDQELQLQLLQKLQQQSLVSQPTVTLSPLQVIQEQQKLLLDMQQLSSSHSLAQQRILPQQDSDVSLQASQAPPPMKQEQQKPSQKQFVLADVSDVVYPQISSTNVLSKAGTQLMTPGATQSVLTEEIPSCSTSPSTATGNHLAYPIIGRNEHCKVTIEKVPQSSSLMSIPTAGEAVTTPIMAKELSKLNHNLKENVTTSKSPIVGTGHENLLNIVPSTDNLETASSATSLWPTQTDGLLHQGFPTNFNQQQMFKDALPDVEIQEVDPTNNAFFGINSDGPLGFPMETEGLLVSAINPVKCQPNLSTDVEINYRIQKDAQQEISTSMVSQSFGQSDIAFNSIDSAINDGVMLNRNSCPPAPPQRMRTFTKVYKRGAVGRSIDIGRFSGYEELKHAVARMFGIEGQLEDRQRIGWKLVYTDHEDDVLLLGDDPWEEFVNCVKCIRILSPQEVQQMSLDGDLGNNVLSNQACSSSDGGNAWKPRRDQNPEIRDENYSCKKQPVSSHLQNYRHGKGKQMQDAVDVLAFIVGRGNAPQIRARRMKLT

SEQ ID NO: 60185 - protein, 65 aa, Zea mays
  Coding DNA Sequence Number=SeqID_18406
MATHPNPLTTVAPPDVRAATAPHEARGSSGVHDTRHSEALGKERFAERQTLGEDDSRQRVVSGRL

SEQ ID NO: 60186 - protein, 93 aa, Zea mays
  Coding DNA Sequence Number=SeqID_18407
MALAALSTNELLQQVKGTVGEANYTTAVPMRPDQGYVSLDAGLPNHPAPVLEDATSRTMCRLATKKKKKKDADEKRAHQKRVACDTLEKRRRA

SEQ ID NO: 60187 - protein, 103 aa, Zea mays
  Coding DNA Sequence Number=SeqID_18408
MDKKMSWISGLTKGTNHVGAALVDRQEQSAGCLFALEPAEGGQASPELERAPDVHGKGSALGISVDWGEGYRQRARRRRLLLARREHAGLLAVKAKRCAEADR

SEQ ID NO: 60188 - protein, 192 aa, Zea mays
  Coding DNA Sequence Number=SeqID_18409
  Gene Ontology: Mol. function=nucleic acid binding; Cellular component= intracellular; Biological process=chromatin modification
  Homolog annotation: Hit_ID=Q7XFT9; Match level="QueryCoverage=54%, HitCoverage=33%, E-value=6e-27, Identity=60%"; Hit description =Expressed protein
MARDLEDLGAPCKFFIWLAVLNHCWTADRLARRDWLYLMPCTGYMVSSVLILVINQGKKHKKNLEKLQDSITRKPIIKPPSNVIGPSMPPVAVSNCVVPSVQPKKKSSSAATREDLEVKKRRVLEAGAAQGEVKICQVCNVVVNSQKVYEFHIAGQKHQALSHFARRLSSGLMLVRKFLWNENSQHSYLQLC

SEQ ID NO: 60189 - protein, 104 aa, Zea mays
  Coding DNA Sequence Number=SeqID_18410
MTIDPSSRCAKERGPEAHGRHVSVSMEKIAEVSIIQSVQKPTHKQQPSVLLPGQFTVDGTKERESFSFLYPSAKAVAAHILTVALLNRSNQLKLNQPWELNHPK

SEQ ID NO: 60190 - protein, 348 aa, Zea mays
  Coding DNA Sequence Number=SeqID_18411
  Gene Ontology: Mol. function=oxidoreductase activity; Cellular component=proton-transporting two-sector ATPase complex; Biological process=flavonoid biosynthetic process
  Homolog annotation: Hit_ID=Q10SI2; Match level="QueryCoverage=98%, HitCoverage=98%, E-value=1e-127, Identity=64%"; Hit description =Oxidoreductase, 2OG-Fe oxygenase family protein, expressed
  Pfam annotation: Domain name=2OG-FeII_Oxy; Domain location=166-296; Score=114.2; E_value=3.9e-31; Accession=PF03171.10; Description=2OG -Fe(II) oxygenase superfamily
MAEHLISTADHDRLPDSYVRPETQRPRLREVVPDAEIPVVDLADPDREAVVARVAEACRTHGFFQLTAAMMSVAYEFFRLPAEEKAKLYSDDPAKKMRLSTSFNVRKGDGAQLAGTTSRLHCHPLEQRTVSAYCSAVRELGFRLYVAISEGLGLDGAYIKEALGEQEQHMAVNFYPRCPAPELTYGLPAHTDPNALTILLMDQQVAGLQVLKDGRWIAVNPRPGALVVNIGDQLQVTCSCLALPLFPPSHLLSAPGLHYCTAPAQALSNGRYRSVWHRAVVNADRPRMSVASFLCPCNDARIGPAARLLTDGTPAVYRDYTYAEYYAKFWSRNLDQEHCLELFRTPTS

SEQ ID NO: 60191 - protein, 125 aa, Zea mays
  Coding DNA Sequence Number=SeqID_18412
MGKGFLMGIDIFHGYEFGTTKPSGFIPIAISTMKVESETVPSQPLPQPQPQSQTGLPWHLYEQATLKKFRTNSPNAQGQGQGLSVRESGATAAAGTVLGETGTASLSRVVSILQQRLVTASLGGA

SEQ ID NO: 60192 - protein, 669 aa, Zea mays
  Coding DNA Sequence Number=SeqID_18413
  Gene Ontology: Mol. function=transmembrane receptor activity; Cellular component=integral to membrane; Biological process=defense response to bacterium
  Homolog annotation: Hit_ID=Q6Z2C9; Match level="QueryCoverage=98%, HitCoverage=98%, E-value=0.0, Identity=74%"; Hit description =Endosomal protein-like
  Pfam annotation: Domain name=EMP70; Domain location=60-627; Score =693.1; E_value=2.1e-205; Accession=PF02990.7; Description =Endomembrane protein 70
MVSLCASTTTIYAFLVILFIHSGHSPTAAFYLPGSYPQRYRPGDTFAAKVNSLTSPSSKLPYPYYSLPFCAPQHGVRHAAESLGELLLGDRIETSPYRFSMLNNTASPLFLCRTDPLSPGTAELIKSRIDDAYQVNILLDTLPVMRYVKNPVAPDVLLRSTGFPVGVRADDGEYYVYNHIKLTVLVNKQNTTTRVETLMATADGADLISFTGGKEGCGYTVVGFEVVPCSVEYDAAAVKNKTMYDEITSKAATGCDPSVVSMRVQDNSPLVYSYEVAFIESSVEWPSRWDAYLEMGGAKVHWFSILNSMVVVSFLAAIVLVILLRTVRRDLAQYEELGGSESGAHADELAGWKLVAGDVFREPSHPVLLCVLVGDGVRILGMGVVTIVFAALGFMSPACRGALVTGMLCLYLVLGVAAGYTSVGVWKTVRQGEAAGWKSVAWRASFAFPGVGFTVFTVLNCVLWYNGSTGAVPLLLFVVILLLWFFVSVPLTLAGGLLASRGRHIEFPVRANKIARQVPAAQCSPWVFVAVAGTLPFGTLFIELFFIMSSLWLGRVYYVFGFLLVVLALLVTVCAEVSVVLTYMGLCVEDWRWWWRAFFASGSVALYTLGYAVYYLVFELHSLAGPVSAALYVGYSLLMALAVMLATGAVGLGASFCFVHYLFSTVKLD

SEQ ID NO: 60193 - protein, 173 aa, Zea mays
  Coding DNA Sequence Number=SeqID_18414
  Homolog annotation: Hit_ID=Q69QB2; Match level="QueryCoverage=35%, HitCoverage=14%, E-value=8e-15, Identity=73%"; Hit description =Putative RING-H2 zinc finger protein
MDDASRSGALLDADQNGTRDDNVRVMNDGHRSRPPELRAPGAVALAQARAAQALLAGRGDHLPAHEFRQPERELCSSSASSLSSSARSSARPAERLLPRELAPARSSIVSSQATLLSPLASLSLLGSLAGAPAPPPPCSSFSHGRAPLPALSCLLCSPRALLAVAASLAQLGL

SEQ ID NO: 60194 - protein, 185 aa, Zea mays
  Coding DNA Sequence Number=SeqID_18415
MEKNHQESWKKWKAPLRLVDPRSDAKALGWVWAISGNVAKPVEERASTKATAATSLDTWALSEEKDAADQAKTKAQAAQAKAKPPRSELPNWSWKQPPFDESGGEVGTRFLGHFEAFDQSNDEFNQGVFQVEDDVLKCSAGTLYDRMWGPHGRGVIRERAGRALAQAMRDEEVEDLVDMETSMAT

SEQ ID NO: 60195 - protein, 204 aa, Zea mays
  Coding DNA Sequence Number=SeqID_18416
MALILMEDETWGGSNGRSESSITRDGRNGSARVGSIARIAADGRVLRVGSVCTVAARGQGGLAAWRAGARRAVQVARTARHRGRRGGARLAAWRTALLASRRASRRGPGRSAWSRVLALQGREQGVGALAARPSGGCVAQEREKQGEREERKGERKRRWSERERWKGGAHAQKGEKGDFPLAAAAAARDWGARGLEGGRLASWA

SEQ ID NO: 60196 - protein, 86 aa, Zea mays
  Coding DNA Sequence Number=SeqID_18417
MAGHYASSREHGELAQDTGRTTRARARKVALTGRKRGSGAAPPRTCAPREGRGGPAGAAAPRRASRPGLPRLYGAGVLGGVPGSGQ

SEQ ID NO: 60197 - protein, 66 aa, Zea mays
  Coding DNA Sequence Number=SeqID_18418
MGIGCLRDGNWNKDYSVIPCVKRLNVLSTYREIWFFGGHGCWSDLVVHLATGLDSRVGPYLGRGGA

SEQ ID NO: 60198 - protein, 213 aa, Zea mays
  Coding DNA Sequence Number=SeqID_18419
  Homolog annotation: Hit_ID=P93802; Match level="QueryCoverage=21%, HitCoverage=5%, E-value=2e-11, Identity=65%"; Hit description=MURAZC
MGTGMDINFYPRVRSRADIGSNRGYGCGRIFAISDPNPIRCHPYSRVDACPLRAVRISVDIFVPCISLAPPWILLAVDSDPDAYIGESVGMESGGTTAAFMDSSFGTETLMLTAMDSHVGRNDASKMYSQLGLAEEDNAEESRREEAFRGVTRDFEQSEHVMFLEESLIDQACEDYLPDEKSVMYDKTNPSMQPGILFPNMKELRIAMKEVLT

SEQ ID NO: 60199 - protein, 155 aa, Zea mays
  Coding DNA Sequence Number=SeqID_18420
  Homolog annotation: Hit_ID=Q8GRU0; Match level="QueryCoverage=66%, HitCoverage=15%, E-value=1e-33, Identity=72%"; Hit description =Pentatricopeptide (PPR) repeat-containing protein-like
MSTAAVLPSPASTRHPAGGGALTADRAAALLAGCASASRAAEIHAAAVRASVDQDKAVAFRLQRAYAASGRLDLAVALLRRTPDPTAVFYTSAIHAHSSRGLHRAALALLSEMLLSHHGLLPTAHTLSASLPACGGLAVGRALHGYAVKLALSGE

SEQ ID NO: 60200 - protein, 194 aa, Zea mays
  Coding DNA Sequence Number=SeqID_18421
  Homolog annotation: Hit_ID=Q6ZDJ2; Match level="QueryCoverage=68%, HitCoverage=73%, E-value=3e-44, Identity=58%"; Hit description =Disease resistance response protein-like
  Pfam annotation: Domain name=Dirigent; Domain location=16-173; Score =36.4; E_value=4.3e-09; Accession=PF03018.5; Description=Dirigent -like protein
MGTPSSRQLLLVAAVCLVVVAVDTAAAAAAAAAAAAMRGRRRVHLRVYMHDVIRGPGQTAIQLVWGVGPPHATMPGRSFGDTAAIDDRHLHAQLAAGGAVLVVDVTLALTAGPYNGSTIVVAGRDRVQDETRELAVVGGTGDLRGASGYVLWRTAKVWSEVHMALEIDVHASVPLPLPDDDDDDNDLVLGSRDE

SEQ ID NO: 60201 - protein, 238 aa, Zea mays
  Coding DNA Sequence Number=SeqID_18422
  Homolog annotation: Hit_ID=Q8H3W6; Match level="QueryCoverage=97%, HitCoverage=48%, E-value=3e-64, Identity=55%"; Hit description=WD-40 repeat protein-like
  Pfam annotation: Domain name=WD40; Domain location=159-197; Score =15.4; E_value=0.21; Accession=PF00400.22; Description=WD domain, G -beta repeat
  Pfam annotation: Domain name=WD40; Domain location=81-119; Score=1.9; E_value=22; Accession=PF00400.22; Description=WD domain, G-beta repeat
  Pfam module annotation: Pfam domain module=WD40::WD40; Domain location=159-197::81-119
MVATLGSGESRASLYIMDLSEAVDLAIGPWTTYRVHSLDRTMWTADCSSDGTHAAFVLVIVMAVLQFKGSDLGAGLIDLETRGSSWLCRSKSDILSLKFVHSGKVVLCGLRNGSIAPVDVRQKQHNQPTGVASSSNARRTVPMLPTRHGGKQRNQASKDKFSRVISMSSAVCSLVSLSSDENYFLGSSMDGSIKLFDLRLIQKGGIQSYEGHVNSHTLLPLAVDPSETLLMSALGDAL

SEQ ID NO: 60202 - protein, 1363 aa, Zea mays
  Coding DNA Sequence Number=SeqID_18423
  Gene Ontology: Mol. function=protein serine/threonine kinase activity; Cellular component=integral to membrane; Biological process=protein amino acid phosphorylation
  Homolog annotation: Hit_ID=Q9FN37; Match level="QueryCoverage=56%, HitCoverage=92%, E-value=0.0, Identity=41%"; Hit description =Putative receptor protein kinase
  Pfam annotation: Domain name=FNIP; Domain location=332-377; Score =15.4; E_value=0.012; Accession=PF05725.3; Description=FNIP Repeat
  Pfam annotation: Domain name=LRR_1; Domain location=119-141; Score =12.8; E_value=1.1; Accession=PF00560.23; Description=Leucine Rich Repeat
  Pfam annotation: Domain name=LRR_1; Domain location=143-164; Score =10.3; E_value=3.4; Accession=PF00560.23; Description=Leucine Rich Repeat
  Pfam annotation: Domain name=LRR_1; Domain location=169-192; Score =9.4; E_value=5; Accession=PF00560.23; Description=Leucine Rich Repeat
  Pfam annotation: Domain name=LRR_1; Domain location=194-216; Score =3.7; E_value=57; Accession=PF00560.23; Description=Leucine Rich Repeat
  Pfam annotation: Domain name=LRR_1; Domain location=218-240; Score =17.2; E_value=0.06; Accession=PF00560.23; Description=Leucine Rich Repeat
  Pfam annotation: Domain name=LRR_1; Domain location=242-264; Score =15.4; E_value=0.21; Accession=PF00560.23; Description=Leucine Rich Repeat
  Pfam annotation: Domain name=LRR_1; Domain location=326-348; Score =18.8; E_value=0.02; Accession=PF00560.23; Description=Leucine Rich Repeat
  Pfam annotation: Domain name=LRR_1; Domain location=350-372; Score =20.6; E_value=0.0057; Accession=PF00560.23; Description=Leucine Rich Repeat
  Pfam annotation: Domain name=LRR_1; Domain location=374-396; Score =5.5; E_value=26; Accession=PF00560.23; Description=Leucine Rich Repeat
  Pfam annotation: Domain name=LRR_1; Domain location=46-68; Score=4.2; E_value=46; Accession=PF00560.23; Description=Leucine Rich Repeat
  Pfam annotation: Domain name=LRR_1; Domain location=70-93; Score =15.9; E_value=0.15; Accession=PF00560.23; Description=Leucine Rich Repeat
  Pfam annotation: Domain name=LRR_1; Domain location=95-117; Score =8.9; E_value=6.2; Accession=PF00560.23; Description=Leucine Rich Repeat
  Pfam annotation: Domain name=Pkinase; Domain location=517-790; Score =167.7; E_value=2.9e-47; Accession=PF00069.15; Description=Protein kinase domain
  Pfam annotation: Domain name=Pkinase_Tyr; Domain location=517-789; Score=112.0; E_value=1.7e-30; Accession=PF07714.7; Description =Protein tyrosine kinase
  Pfam module annotation: Pfam domain module=FNIP::LRR_1::LRR_1::LRR _1::LRR_1::LRR_1::LRR_1::LRR_1::LRR_1::LRR_1::LRR_1::LRR_1::LRR _1::Pkinase::Pkinase_Tyr; Domain location=332-377::119-141::143
  Pfam module annotation: Domain location=218-240::242-264::326 -348::350-372::374-396::46-68::70-93::95-117::517-790::517-789
  Subcellular localization annotation: CTP_CleavageSite=15; ConfidenceScore=5.39e-01
ALPRRQPLHRQPSPLASPGSKTSPYWICPGTASPATSPDAFGGLTSLQNMAAHSNAFSGQLPPSLSRLSSLRALDLRNNSLSGPIALFNFSGMTSLASVDLATNQLNGTLPVSLAGCRELKSLSLARNRLTGQLPQDYSRLASLSMLSLSNNSLHNISGALGVLGACKNLTTLILTKNFVGEELPDDGIGGFGGLEVLALGDCALRGRVPKWLAQCKKLEVLDLSWNQLVGVIPSWIGKFEYLSYLDLSNNTLVGEVPKSLTQLKSLVAVTRSPGMAFTSMPLYVKHNRSTSGRQYNQLSNFPPSLILNNNGLNGTIWPEFGSLRELHVLDLSNNFISGSIPDSLSRMENLEVLDLSSNNLSGVIPSSLTELTFLSKFSVAHNHLVGQIPSGGQFLTFSNSSFEGNPALCRSSSCNHLILSSGTPNDTDIKPAPSMRNKKNKILGVAICIGLALAVFLAVILVNMSKREVSAIEHEEDTEGSCHELYGSYSKPVLFFQNSAVKELTVSDLVRSTNNFDQANIIGCGGFGLVYKAYLPDGTKAAVKRLSGDCGQMEREFRAEVEALSQAQHKNLVTLKGYCRYGDDRLLIYSYMENGSLDYWLHERSDGGYVLTWESRLRIAQGSARGLAYLHKVCEPNIIHRDVKSSNILLNENFEACLADFGLARLIQPYDTHVTTDLVGTLGYIPPEYSQAVIATPKGDVFSFGVVLLELLTGRRPVDVSRSKGSRDLISWVLQMKSERKEEQIFDSLIWSKAHEKQLLSVLETACKCISADPRQRPSIEQVTNASLGGIDMREEQSREKGNLSKFRQCRLQVPYRRTGARLMKAKASAAAAEDDAEPKKIRSSRSKHRRRRHSRSSSRSESPPRKRSKKNSKRIPDKKSKRSKGSRGGSLRRRHHSLSHSRSLSSSPSSVARRSSSSCSSSSASERSVSPPPRSRSRDVRRKKGRGRGRERDRKGRKLRRSASSSSISASSGSSRSKSRKRMTVGGTKDRATTTRDKMEKGYTDRRSCRSVMNVDEHVDGDEDRLAIAKVVDNDIDRHKKNLESESSPSKNANTTEEKVPASGGNSDAQDLELILRQKALENFRKFRAAATMGGKTDSGAAGKEASIDDSVHNAGMEVADATHSQSQETSLGARYSAGSPRSQNFGNGANRSWKQDNGAGMSCGGSPGLLEPAETGGPTQLKGRAEESTRLASQFLSPRDARNGRSVMQRLAPPPGSSASVNQMLGSSAGLNHVDGAPRVRSVVSIPARERLDGSTHTTPLSPSEDSSPVESGGKVGLPLNDTNKAEGTNGENRKTSEASASDGSVLSPTEDKSQASIEGKDSFQKKTFSRMHDGETVEVSYKVYIPKRTPALARRKLQR

SEQ ID NO: 60203 - protein, 340 aa, Zea mays
  Coding DNA Sequence Number=SeqID_18424
  Gene Ontology: Mol. function=protein binding; Cellular component =nucleus; Biological process=mRNA polyadenylation
  Homolog annotation: Hit_ID=Q84Z07; Match level="QueryCoverage=95%, HitCoverage=99%, E-value=1e-112, Identity=61%"; Hit description =Putative WD repeat protein
  Pfam annotation: Domain name=WD40; Domain location=19-58; Score=26.8; E_value=7.8e-05; Accession=PF00400.22; Description=WD domain, G-beta repeat
  Pfam annotation: Domain name=WD40; Domain location=241-279; Score =11.4; E_value=1.7; Accession=PF00400.22; Description=WD domain, G -beta repeat
  Pfam module annotation: Pfam domain module=WD40::WD40; Domain location=19-58::241-279
MTSPPRVSMEITDEVVKSMKIGLVFQGYNGRICSMDFHSKATNYLVTASDDESIRLYDTQDAVCLNTINSKKYGVGLVCFTDNPSIVLYSSNNGWDGLSASHFALEKKTFSHVRLIVPFSYGTIGLKNRRLSTQGRCYWICNGNLLTSFHSIFKSKGLLRAQRRPTVSYDAQGMVFAVAYGGRIKMFDIRKFGMGPFATFSVGTDDSEAHVVQFSGDGRRILLTTKAGRVHVLDSFEGNSIASFRAKPILTNSTLEASFCPEGNHIVSGSGDGSVYAWNVESGKVACWESTDVKPPRVRWSPGSLMFVTGTSELSCWVPDLSKLESFTISHTNTRSSSSL

SEQ ID NO: 60204 - protein, 454 aa, Zea mays
  Coding DNA Sequence Number=SeqID_18425
  Homolog annotation: Hit_ID=Q8GRU0; Match level="QueryCoverage=48%, HitCoverage=34%, E-value=9e-94, Identity=74%"; Hit description =Pentatricopeptide (PPR) repeat-containing protein-like
  Pfam annotation: Domain name=C2; Domain location=294-374; Score=98.9; E_value=1.5e-26; Accession=PF00168.20; Description=C2 domain
GALPFAWWTFWDKKNIKDVFDKVRSMKAKPDAAMWASLLGSCRLHKNLALGQRVVDYLVANGLANSGTYVLLSNMYAAAGKWREVGRVRSMKRASGVQKEPGCSAVEVGRRVVEFVAGDRSHPRSAEIYAKLEEVNSIARARGHVPHTELVLHDLDDAAKERALAVHSEKLALAFGLISTPPRTGIKIVKNLRACADCHAVLKLVSEATGRKIVFRDRNRFHHFVDGSCSCGDYWDPYLLGRWKQKLQSVRDERSRLILSIELGAFFVPRSVFICNLKLTGTFEWIMDGLVGLLKVRVVRGINLAYRDARGSDPYVVLRLGKKVKLKTSVKKRSVNPIWHEELTLTVTDPSLALKLEVFDKDTFSRDDPMGDAEIDVAPLVEAANASPEASLRNGAIILSVRPSATNCLADESHVCWRNGKFAQDMILRLRNVESGEIQLQLQWVSIPPAAASR

SEQ ID NO: 60205 - protein, 222 aa, Zea mays
  Coding DNA Sequence Number=SeqID_18426
  Gene Ontology: Mol. function=transferase activity, transferring nitrogenous groups; Cellular component=mitochondrion; Biological process=biosynthetic process
  Homolog annotation: Hit_ID=Q84UX4; Match level="QueryCoverage=93%, HitCoverage=42%, E-value=1e-108, Identity=92%"; Hit description =Alanine aminotransferase
MARKPLDYEELNENVKRVQYAVRGELYLRASELQKEGKKIIFTNVGNPHALGQKPLTFPRQVVALCQAPFLLDDPHVGLMFPADAIARAKHYLAMAPGGLGAYSDSRGIPGIRKEVADFIHKRDGYPSDPELIYLTDGASKGVMQILNTIIRNEMDGILVPVPQYPLYSATISLYGGSLVPYYLEEEANWSLDFVNIRQTVAEARSKGISKVIPIKMAAVYH

SEQ ID NO: 60206 - protein, 46 aa, Zea mays
  Coding DNA Sequence Number=SeqID_18427
MEAPLEQLFLYSTLNMGGGGSFSFEIKACDMRIQPEGNMDGRRSYG

SEQ ID NO: 60207 - protein, 444 aa, Zea mays
  Coding DNA Sequence Number=SeqID_18428
  Gene Ontology: Mol. function=acyl-[acyl-carrier-protein] desaturase activity; Cellular component=chloroplast; Biological process=fatty acid metabolic process
  Homolog annotation: Hit_ID=Q84MF1; Match level="QueryCoverage=69%, HitCoverage=75%, E-value=1e-123, Identity=70%"; Hit description =Putative stearoyl-acyl-carrier protein desaturase
  Pfam annotation: Domain name=FA_desaturase_2; Domain location=119 -444; Score=500.5; E_value=1.9e-147; Accession=PF03405.5; Description= Fatty acid desaturase
  Subcellular localization annotation: CTP_CleavageSite=46; ConfidenceScore=5.04e-01
MNEGQRNLSGGRPVKTASACNVQTLPSSSGTSYAQVFLIFIGRRVYESKVGDVRLRYINHYPQRKPDRATKANSAVNTKEADHAGAHDDDGVGAIAAHVGEAMLLEQQQEDERLYGVAGQEELMMMHRLADDGWVDEHMLPLLTPVEEAWQPADLLPSFSVSADEQRSQVADLQARAAAVPDDLLVCLVGNMVTEEGLPTYMTMGNRVTGASDATGCDDHGWARWLRGWTAEENRHGDLLNRYLYLCGRVDMRRVETTVHHLLRRGMRTMLRPSSAYHSLIYGSFQERATFVSHARTARLAGLHGDACLAKLCGVIAADERRHEAAYTRASDRAFEEDPDGMVRALAAVMRAKVTMPGELMADGRDDRLFDHFSAVAQRSGVYTAADYADMVEHFVRRWKVAELDAGLSGEGRRAQDYVCGLPRKIRRMEELAQDRAAQMEAQS

SEQ ID NO: 60208 - protein, 502 aa, Zea mays
  Coding DNA Sequence Number=SeqID_18429
  Gene Ontology: Mol. function=lipid binding; Cellular component =integral to membrane
  Homolog annotation: Hit_ID=Q655F0; Match level="QueryCoverage=86%, HitCoverage=77%, E-value=0.0, Identity=75%"; Hit description =Putative CLB1 protein
  Pfam annotation: Domain name=C2; Domain location=258-342; Score =106.4; E_value=8.4e-29; Accession=PF00168.20; Description=C2 domain
  Pfam annotation: Domain name=C2; Domain location=414-500; Score=56.9; E_value=6.9e-14; Accession=PF00168.20; Description=C2 domain
  Pfam module annotation: Pfam domain module=C2::C2; Domain location =258-342::414-500
MALPASRRESPSGWASYVLCGGWDRSRGETRADGRDGCSTQAPQATAWAASRVCMEHDPVIKPLRDLDSETLQATIPHIPLWVKSPDYERIDWMNKFIFDMWPFLDKAICKHINRATRPIFDQYVGQYGIESIEFGELTLGTLPPTFQGIKVYEMLEKELVIEPVIRWASTSNVTVNVKVQSFEVTVQLEDLHIMLTPRVILKSLVPSFPCFANLCVSLMEKDQLSKQISNLYHWPKVIQIPILDGASGATKKPVGILHVKVIRALNLLKMDFLGKSDPYVKMRLSGERLPSKKTSVKMSNLNPEWNEHFRFIVKDPDTQVLELHMFDWEKVKMHDKLGMQVIPLRLLTPYESKLFTLDLVRSMNPNDPQNKKNRGKLIVELTFDPLREDNMSSDAEGNASVRRDADGGGGGVLLVSVENAEDVEGKRHTNPYAEVLFRGERKKTKVIRKTREPRWSEEFQFMVDEPPVEDKIHIQVKSKRRGLPFRNKASHAALIFAVCHN

SEQ ID NO: 60209 - protein, 282 aa, Zea mays
  Coding DNA Sequence Number=SeqID_18430
  Gene Ontology: Mol. function=ATP binding; Cellular component =chromosome; Biological process=DNA metabolic process
  Homolog annotation: Hit_ID=Q8GU53; Match level="QueryCoverage=87%, HitCoverage=25%, E-value=1e-112, Identity=78%"; Hit description=SMC5 protein
MASRCLQPLAQFAALDAAPGSHVQLLLISGRRITQEHRRRLSIAKQNAESIAMITKDLEKEFCAMPTTLEELETAIQDTESEANSMLFLNQNVLQEYQNRQHEIESISNKLKDDKGEHEICCSEIETVKGKWLPTLRILVSKINDTFSRNFQEMAVAGEVSLDEHGIDFDHYGILIKERSVSTILYLVSLQDLTNCPFRVVDEINQGMDPINERKMFQQLVRAASQINTPQCFLLTPKLLPDLEYSDACSILNIMNGPWIEEPAKAWSSGDCWRTVVSAAGH

SEQ ID NO: 60210 - protein, 57 aa, Zea mays
  Coding DNA Sequence Number=SeqID_18431
MDKVLALPEIYKKDYILQMLSGRPCDPLTLYTMHLTSFKAVKVDNVSNIQPVSLYSA

SEQ ID NO: 60211 - protein, 131 aa, Zea mays
  Coding DNA Sequence Number=SeqID_18432
  Gene Ontology: Mol. function=cytochrome-c oxidase activity; Cellular component=mitochondrial respiratory chain; Biological process =electron transport
  Homolog annotation: Hit_ID=Q6J4I2; Match level="QueryCoverage=46%, HitCoverage=100%, E-value=4e-17, Identity=63%"; Hit description =Putative COX VIIa-like protein
  Pfam annotation: Domain name=COX7a; Domain location=73-126; Score =96.3; E_value=9.3e-26; Accession=PF02238.6; Description=Cytochrome c oxidase subunit VIIa
MVDEHPRRHELGDDGHPGIDHIAGNGHHGEAAKEATADVNHVPVPCLEPLLEERLLAPLCCQRGMTEAPFLPRERLFKQQHYFQNLTKHTYLKGRYDVITSVAIPLALAASSMFMIGRGVYNMSHGVGKKE

SEQ ID NO: 60212 - protein, 163 aa, Zea mays
  Coding DNA Sequence Number=SeqID_18433
  Gene Ontology: Mol. function=hydrogen ion transporting ATP synthase activity, rotational mechanism; Cellular component=proton -transporting two-sector ATPase complex; Biological process=ATP synthesis coupled proton transport
  Homolog annotation: Hit_ID=Q8H3D7; Match level="QueryCoverage=93%, HitCoverage=32%, E-value=7e-49, Identity=63%"; Hit description=Leaf senescence related protein-like
  Pfam annotation: Domain name=DUF231; Domain location=1-150; Score =116.7; E_value=6.6e-32; Accession=PF03005.6; Description=Arabidopsis proteins of unknown function
MSVEDAYERALNTLQKWVQKEVNTTKTLVVLRTYSPAHVRASNGGGGGCVRETAPELNTSRIALHRWPGLLNPSPALIEAAKKRQLATMHVLNVTLMTAQRRDGHPSVYNVRLPSPAAAQEQVTTRAADCSHWCLPGVPDAWNELLYALILHRTRTTSLGGSD

SEQ ID NO: 60213 - protein, 313 aa, Zea mays
  Coding DNA Sequence Number=SeqID_18434
  Gene Ontology: Mol. function=hydrogen ion transporting ATP synthase activity, rotational mechanism; Cellular component=proton -transporting two-sector ATPase complex; Biological process =intracellular signaling cascade
  Homolog annotation: Hit_ID=Q8H3D7; Match level="QueryCoverage=70%, HitCoverage=44%, E-value=5e-63, Identity=58%"; Hit description=Leaf senescence related protein-like
MEMASARRRAKPPQAVGGGGDQLALWAACVLLSSLSLLVAAAFSTGFGGAARLTLEAGPDRDREAAGALVTRATGAGSGRYCDEDDDLIDSMSVDGEWVLLRGAAERLYGPGQCPFVDEGFRCRENGRPDGDYAEWAWRPRRCALPRFLTAKWSWSSPKHMHASYIFDVCMRIRFDARRLLEMLRNRRLVFVGDSIGRNQWESMLCMLASAVADDRDKQASPGGASIYEENGSPITKRKGFLSFRFRDYNCTVEHYRSPYLVRRGRPPRHSPKRVATALRLGSMDAMAPRWKDADVLVFNTGHWWNHERLQQL

SEQ ID NO: 60214 - protein, 324 aa, Zea mays
  Coding DNA Sequence Number=SeqID_18435
  Gene Ontology: Mol. function=protein serine/threonine phosphatase activity; Cellular component=protein serine/threonine phosphatase complex; Biological process=protein amino acid dephosphorylation
  Homolog annotation: Hit_ID=Q6K3D4; Match level="QueryCoverage=65%, HitCoverage=19%, E-value=4e-67, Identity=57%"; Hit description =Putative PKG-Ib
  Pfam annotation: Domain name=PP2C; Domain location=2-202; Score= -10.7; E_value=2.5e-05; Accession=PF00481.12; Description=Protein phosphatase 2C
MLGANAEMHAAPEVDDSMSGTTAVAALVSGGALHVANVGDSRAVAGVWRAGRVVAEDLSWDQTPFRADERERVRACGARVMSVEQVEGMRDPEAERWAPDEGDPPRVWARDGLYPGTAFTRSLGDLAAEAIGVIAEPEVKSVEITPSHLFFVVASDGVFEFLSSQEVVDRVATYQDPRDACSAIAAESYKLWLEHENRTDDITIIIVHIRDMESVGPAGSDKADYGSVGASIAVHAIQSENIRCFQARAKRAASCITTGANLASNGRGYWIGLCSKASHLQPPDESGEWKLNDKRRPRNNPPPSSIFGGTIIVIERPLSFAESY

SEQ ID NO: 60215 - protein, 351 aa, Zea mays
  Coding DNA Sequence Number=SeqID_18436
  Gene Ontology: Mol. function=oxidoreductase activity; Cellular component=integral to membrane; Biological process=electron transport
  Homolog annotation: Hit_ID=Q8LIF2; Match level="QueryCoverage=99%, HitCoverage=66%, E-value=1e-123, Identity=66%"; Hit description =Putative cytochrome P450
MTTAWCWPWPWQATLLAAAAWLCLHAAVARLMEALWWRPRRLERHFARHGVRGPGYRLYLGSSIELSRLMEDASSRPAPRDEPHRVLPRVLAFHHHWDKLYGPMHLIWFGTTPRLVVSSPELIREVLLSRSQHFDRYEAHPLIRQFEGLGLSNIHGDEWARRRKILAPAFHAENLKLLAPFVAGTVQRMLEERVLLPGGPGEVELDVADWYRRLPQEVITVATFGRNNSDEGSAVFRLQAEHASYATEAHSKVFFPGYRFLPTRRNRRVWQLDREIRRLLAKLVAGLQSGGSGDHRHQGRDHGRAGGGMRDFMSFMGPGHGGGRDHRGIQELLLRRGRRRSPVCSPGPPSR

SEQ ID NO: 60216 - protein, 311 aa, Zea mays
  Coding DNA Sequence Number=SeqID_18437
  Gene Ontology: Mol. function=transferase activity, transferring hexosyl groups; Biological process=carbohydrate biosynthetic process
  Homolog annotation: Hit_ID=Q10L41; Match level="QueryCoverage=83%, HitCoverage=87%, E-value=1e-85, Identity=55%"; Hit description =Galactinol synthase, putative, expressed
  Pfam annotation: Domain name=Glyco_transf_8; Domain location=73-285; Score=146.2; E_value=8.5e-41; Accession=PF01501.10; Description =Glycosyl transferase family 8
  Subcellular localization annotation: CTP_CleavageSite=33; ConfidenceScore=5.12e-01
MARACCRMAAAPAAALLLLLVAAASGIRVDVVRISSSSSAPPQPPSPPAFREAPAFRNGDECPPRGSPDGHVDVAMTLDANYLRGTMAAVFSILQHTACPENVAFHFLAAAADPDSDSDPDPLAAIRATFPYLDPSVHRFDPSRVRGRISRSVRHALDQPLNYARIYLADTLPAVVRRVIYLDSDVVVVDDVRKLWSVDLGERHVVAAPEYCHANFTKSGSGSTHLGSLPPFLLVLAGDIRPVDHRWNQHGLGGDNVEGRCRSLHPGPISLLHWSGKGKPWLRLDSRKPCTVDYLWAPYDLYKAAATALEE

SEQ ID NO: 60217 - protein, 79 aa, Zea mays
  Coding DNA Sequence Number=SeqID_18438
MAERPHCVLALPWKLPQRPQSHNCRPTDTRSTQMPIEVIVRPKNGPTMDVEQVLMLRQTIGVRVGMKHPVLEKQRPCQY

SEQ ID NO: 60218 - protein, 40 aa, Zea mays
  Coding DNA Sequence Number=SeqID_18439
  Homolog annotation: Hit_ID=Q6K3D4; Match level="QueryCoverage=78%, HitCoverage=2%, E-value=2e-07, Identity=71%"; Hit description =Putative PKG-Ib
MALYICERRLPRIKILEMPAQQSLQSHTNYGWSTKIGQMI

SEQ ID NO: 60219 - protein, 89 aa, Zea mays
  Coding DNA Sequence Number=SeqID_18440
MGLSVVIQTYWRSIERAGLDLSDDSEEASSEEVEDSPDSEEWSGGVDDGSSGDDDGKGSSDGDDEGGEGYGDGKDDNNDDKDGSIMLMA

SEQ ID NO: 60220 - protein, 105 aa, Zea mays
  Coding DNA Sequence Number=SeqID_18441
MQGNTWYSSIRDHKACSFLSPFISRGGVTDERPTIGIDGCLEEDGDGLFPPPAATEEGKSVADKGPLPQLWWQRRWWSRLGQPQDAHHLGVECKKSHASWIVLDK

SEQ ID NO: 60221 - protein, 86 aa, Zea mays
  Coding DNA Sequence Number=SeqID_18442
MARLLRRGCAGELAGTPHRLRQASHAGHGLTAGIGEASMRRGHAAQQRSGERFIHKKEVQIKWIHIRQYIKLKIHAFNMMQQPLFP

SEQ ID NO: 60222 - protein, 168 aa, Zea mays
  Coding DNA Sequence Number=SeqID_18443
MADGCEQQPRASREGVTATTQQQHRMRIMAVSRTAGASSNKQAVSLGTGEAARKDCDEGSTISDDEQIWRVATKVISKVTTRTGAQRGGFKRARWWRDTLLAASAAAGEHVLKKSGGDRQRLALRAGVREAGRRHEGMTVWTGRHDGEEGRLEIKHDGCDGGFLWIKE

SEQ ID NO: 60223 - protein, 112 aa, Zea mays
  Coding DNA Sequence Number=SeqID_18444
MEARRASRYRVHGRRSRRPRNPKPGVKKKTCKIKVDQVKKSYGDLCKGSSQKKTNWSKEVAPVWEHRTVRVHRTVSAAQLALGEQTVLGKQLGGAATINHRNVRCAPECTVR

SEQ ID NO: 60224 - protein, 39 aa, Zea mays
  Coding DNA Sequence Number=SeqID_18445
MPDRCRGSIDVGADVGDGHHSATGARELRREGRDQPITV

SEQ ID NO: 60225 - protein, 146 aa, Zea mays
  Coding DNA Sequence Number=SeqID_18446
MAAATWYAHLNHHLYQRMLPARHGWPYRICSLLLASSAGLLAEPPAFSRSALWYSSSPSPSPSPTSLLAHCHCGALAPRILIAGLQFSSITDVQHASVSCSPSLGRELFAPARAHSTVARPLRLAELICQLHHRTFLVFFSNTESL

SEQ ID NO: 60226 - protein, 80 aa, Zea mays
  Coding DNA Sequence Number=SeqID_18447
MPSSGTACNRWHTIHVGRLQCDTPRRHQVLDDFARQLDGAFQRVRYMHMQEAPVVFDHEVFPSRLAPNRDSSIGIVNKLQ

SEQ ID NO: 60227 - protein, 587 aa, Zea mays
  Coding DNA Sequence Number=SeqID_18448
  Gene Ontology: Mol. function=transcription regulator activity; Cellular component=nucleus; Biological process=regulation of transcription
  Homolog annotation: Hit_ID=Q41875; Match level="QueryCoverage=99%, HitCoverage=99%, E-value=1e-139, Identity=81%"; Hit description=IN1
  Pfam annotation: Domain name=HLH; Domain location=370-419; Score =53.3; E_value=8.3e-13; Accession=PF00010.16; Description=Helix-loop -helix DNA-binding domain
  Subcellular localization annotation: CTP_CleavageSite=66; ConfidenceScore=5.25e-01
MAAGGSGGEAAQKALQSVAQSTGWTYSLLWRLCPRQGYAFFLPAAPSPSQLSSLLKRCLTNRSDHACMHGPAHQRAGLGGGLLQRRHQDAQDDDDDSASAGGRGGRLGRGDGAAPQPQLKELYDSLAAGEAAYDGGGGVGDPQQQHQQQVAVVPPPRRPVAALAPEDLTETEWFYLMCASYCFPPAVGLPGEAFVRRAHVWLCGANKADSKVFSRAILARTVACIPVDDGVLEIGTTEKTKTGISLNLGDEHNSEMEDDDDGRIDLENNTENDSTRRHLPQDASASSNIAKTYLALSKNSPFSKWNWKRKGISSMLIPEGTQQRMLKSVLLGAPSSSSHRTSSSAPETRGDDGEGTSRSRRGPVPSQTELSASHVLKERRRREKLNEGFAMLRSLVPFVTKMDRASILGDTIEYVKQLRRRIQELESRARLVGSNQKTTMAQPPPPAASTEERGRRQTSGGYLARAGTCSRAAEASGNSNLGEEPPAAAASDTDTEVQVSIIGSDALLELRCPHREGLLLRVMQALHQELRLEITYVQASSAGDVLLAKLRAKVKEVHGRRSSTTEVKRAIHLIVSSDWNWICEKNP

SEQ ID NO: 60228 - protein, 118 aa, Zea mays
  Coding DNA Sequence Number=SeqID_18449
MGIYRPIRGRWSKVGLRARLLVDLCRTDQRVAFADILEAFAPATLRLTWPSEGSVSEAQRRAIMCHAFTVDLGDRSWDTFVAETEKGAEELVGSVNEQEIEKGAKLHGGSVCINSVFS

SEQ ID NO: 60229 - protein, 376 aa, Zea mays
  Coding DNA Sequence Number=SeqID_18450
  Gene Ontology: Mol. function=protein serine/threonine phosphatase activity; Cellular component=protein serine/threonine phosphatase complex; Biological process=protein amino acid dephosphorylation
  Homolog annotation: Hit_ID=O49973; Match level="QueryCoverage=66%, HitCoverage=40%, E-value=1e-120, Identity=88%"; Hit description =Kinase associated protein phosphatase
  Pfam annotation: Domain name=FHA; Domain location=236-312; Score =61.7; E_value=2.3e-15; Accession=PF00498.16; Description=FHA domain
  Subcellular localization annotation: CTP_CleavageSite=39; ConfidenceScore=5.33e-01
MAVPPLLLVAVAVAALSILVLVVFAFRRCRRRRQRHPLQAAAVAPTPVAVQVVDAAYVAINRYELAIRALVIVKNSFVHTSRAITLDRILVFLEVSVGEPSKIQTNRSNTSPRSHAIADTGRIYPAECCVTQGETHVINVENDTSEEFQLGSTLRRTPPPKWPTPDQKHRRRVSGDDNHNGSVPLKDNTYRWHLYAHFIQSFVRSADSRLDLEVIAGPSHGISCSRQSSRPSMLPITLGRVPPSDLVLKDSEVSGKHAQINWNGKTLKWELVDMGSLNGTFLNSQAVHHPSAGSRHWGEPAELAHGDIITLGTSSKLSVGLSESEKRKFWEDLDSMVRAVPTNEKLFIEDLNGHIGSTHEGYEMAHRGFGYGSRNQ

SEQ ID NO: 60230 - protein, 173 aa, Zea mays
  Coding DNA Sequence Number=SeqID_18451
MSVDESHNLKGKELEKEVEKPKDNDGDLTKSSSKSHKKKDGEKKKLNNVIAKDHKPRSTRACLKYGKTSYFISNCTYNDEDREEDKKGENKREKKKFHKKGGKFHIVKEWDSNESSSNSDDEGITTLAIKSSLFPKADHKCPMDKESKKKVINEKDELLGKQGDLLIDETLNK

SEQ ID NO: 60231 - protein, 244 aa, Zea mays
  Coding DNA Sequence Number=SeqID_18452
  Homolog annotation: Hit_ID=Q6YSE8; Match level="QueryCoverage=13%, HitCoverage=10%, E-value=1e-08, Identity=85%"; Hit description =Putative membrane protein
  Subcellular localization annotation: CTP_CleavageSite=44; ConfidenceScore=5.71e-01
MRSYASSSSLDSESVSPSSPHARPPSTSSTALESLVPARVQPVCTSLRWCGPERSRPARRARDLKKRGSGHTAARSHNVEQAVDREQCSAIVLPTTHSCRAYHSPLCSSQAVSLEVAATATGAGAKPSRVGVRAPAAGAQQSGEWWAPHVALDHLAQRKDIDTTKIVIFGRSLGGVVGAVLAKNIRRRCKSPPCRHKCSQEEDVLQVLEGFEEEAHGDHKEAMQCSQFPTAQFSLPPYLCLLVF

SEQ ID NO: 60232 - protein, 161 aa, Zea mays
  Coding DNA Sequence Number=SeqID_18453
MELTDPEERRAKMRELLTKYKLVTMEADLHARQCNSVRQSQYPHLPVGRRVRRGGDLGRCARGEEGDEGCGRERRVASRGRRGRRPSRRGWNRAWLGWRRLGVDPMMAVPMAWGGEWGGGEGGVRRGEDETVAEPCTIVFVDTYTTILRSSIDTHSCDYYT

SEQ ID NO: 60233 - protein, 282 aa, Zea mays
  Coding DNA Sequence Number=SeqID_18454
  Gene Ontology: Mol. function=protein serine/threonine phosphatase activity; Cellular component=protein serine/threonine phosphatase complex; Biological process=protein amino acid dephosphorylation
  Homolog annotation: Hit_ID=O49973; Match level="QueryCoverage=99%, HitCoverage=45%, E-value=1e-139, Identity=95%"; Hit description =Kinase associated protein phosphatase
  Pfam annotation: Domain name=PP2C; Domain location=1-242; Score =117.9; E_value=3e-32; Accession=PF00481.12; Description=Protein phosphatase 2C
MVARRSGKKLPMEDISFCQCPLQGVEHFGLFGIFDGHGGDGAAKAVSKILPEHLGYILSHPETKERVQSYSDASDVLRYAFTLTEDTIDHQYEGCTGTALLIWFDQNKDCFAQCANLGDSACVMSVNGKTIDMTEDHRVTSATERARIARTGQPLRDGEARLSGLNLARMFGDKFLKEQDPRFSSEPYVSQAVRITKACTAFAVIASDGLWDVISTKRAVQLVVEWPSLSSLGCLPLPQSAGKGEEELRRRHLSGGQSSQPCAGRSSESANQGQHIRNIRRF

SEQ ID NO: 60234 - protein, 410 aa, Zea mays
  Coding DNA Sequence Number=SeqID_18455
  Gene Ontology: Mol. function=protein dimerization activity; Cellular component=nucleus; Biological process=regulation of transcription, DNA-dependent
  Homolog annotation: Hit_ID=Q9SM11; Match level="QueryCoverage=99%, HitCoverage=100%, E-value=1e-121, Identity=59%"; Hit description=Em binding protein-1a
  Pfam annotation: Domain name=MFMR; Domain location=1-173; Score=-3.8; E_value=5.5e-07; Accession=PF07777.2; Description=G-box binding protein MFMR
  Pfam annotation: Domain name=bZIP_1; Domain location=259-345; Score =67.7; E_value=3.8e-17; Accession=PF00170.11; Description=bZIP transcription factor
  Pfam annotation: Domain name=bZIP_2; Domain location=259-335; Score =14.7; E_value=0.023; Accession=PF07716.5; Description=Basic region leucine zipper
  Pfam module annotation: Pfam domain module=MFMR::bZIP_1::bZIP_2; Domain location=1-173::259-345::259-335
MASSSDEQSKPPEPPAAAAVVTAAAPPQTHAEWVASLQAYYAAAGHPYAWPAQHLMGAAAAGAHFGTPVPFPVYHPGAAAAYYAHASMAAASTCALPSELGFDLEAFLGVPYPTCEAVPAVALPTVPEGKGKGKGGGASPEKGSSGAPSGEDASRSDDSGSDESSETRDDDTDHKDSSAPKKRKSGNTSAEGEPSQATVVRYAAVESPYPAKGRSASKLPVSAPGRAALPSATPNLNIGMDIWNASPALAVPAVQGEDEREIKRERRKQSNRESARRSRLRKQLVAMMPQNLEKTKTKDCEWCFPQECEELARKVADLTTENSALRAELDNLKKACQDMEAENSRLLGGVADAQVPSVTTTLGMSIEPPKLQLQLQQHHDEEGQLHKKSSNNSNGNCAGGSHKPEANTTR

SEQ ID NO: 60235 - protein, 63 aa, Zea mays
  Coding DNA Sequence Number=SeqID_18456
MAGGSVLVLGGIPVKVQNSKGFVSGTLRYLWPKLGLSEGAEPRHFLCFVLSKCGVPMPSSDMG

SEQ ID NO: 60236 - protein, 250 aa, Zea mays
  Coding DNA Sequence Number=SeqID_18457
MGNGSGTGDPGPRDRERGSARVKKSGADRLAPAGRERDRERARERGTAADRRDGFTYPADGANTCFSFDYLPREGFPSILWEVLSTPRYPAPPLYTPGWRSLHSETVKFKADDTTEVAALKALTTFCGYHPLEMMMHPLRLFPAKKRDDPMWCDRVCHAKDVWPMHPNQVGRITVQCMSALYHLQALQSDAMTHFTGLAQTAKTTLDSREVFVVNLSSELEEKDLQIEQMGNRTQDWSNGWKSRTRPLKS

SEQ ID NO: 60237 - protein, 188 aa, Zea mays
  Coding DNA Sequence Number=SeqID_18458
MGEGGERRGRCREAQEPRLLTPERGRGRPGLPGVMARVVATARPQVGDDSDKKGPASAIGGPRRLHFIVLQCLYPLPDNVNYHLLHLGCANFLRIPRAAMCGFKDRVGVIPTISKRRAGARALVGARGVANGAHIGSKLRPDEPKGFVSGTPSYLWPKMGLSEGAEPRHFLCFVLSKCGVPMPSSDMG

SEQ ID NO: 60238 - protein, 100 aa, Zea mays
  Coding DNA Sequence Number=SeqID_18459
MTKDFAKTAKFPPYEDMEILKIELFLTKVVMFLVLVVLGFVLFDVAHLFGCFIDLLLELRVTNHFLLVLLDLLMGHFKVVDFLIKLIFSRIWAIGPLKVA

SEQ ID NO: 60239 - protein, 111 aa, Zea mays
  Coding DNA Sequence Number=SeqID_18460
MGGSAAMWAVWGTAETSEGGHDGRARGGEGRPDTRAAATGDRASGAEDGRRRCCAWRGRAGAAGMAHRRGGAAARRRLEAAAARGDREATAQPGRKAKMSQRGFARVLIKG

SEQ ID NO: 60240 - protein, 110 aa, Zea mays
  Coding DNA Sequence Number=SeqID_18461
MWMDKYCLTSKKSISYKFSPHNTGGADKQQQQQQRWQLAHRWCCRKNCGFIAFENKSPTLAPTSGELTSTVELMASFNNQAEVALATKPVLPITGGLCSEPANKKEKKEA

SEQ ID NO: 60241 - protein, 91 aa, Zea mays
  Coding DNA Sequence Number=SeqID_18462
MKMMYNDDADRRTTKDEGLNIESFVKKPQSMMMDGMMICTMGQSYSEQPAKLIVYGNAAEGHRQAQQQCDIREESEARTINSTMPESRHIY

SEQ ID NO: 60242 - protein, 100 aa, Zea mays
  Coding DNA Sequence Number=SeqID_18463
MEGSNGGIEVPLRGRRTDVAMLRSARCWTQGLGVGSWRLVAGHLGATASWRLRAGYRARCSIEPRGEAEGRARWWLGRSGALGAVQSAAGLGAGRAGIFI

SEQ ID NO: 60243 - protein, 202 aa, Zea mays
  Coding DNA Sequence Number=SeqID_18464
MAPPVDVVGPCPRLGDVEAPPRSRSSLSSVAEVESEPLGRARRRPSAEARAESEPWGRAKRSSSSSGAEPESEPWVGRSGVRRLPGLSPSRSPGSGGAEFAVFRGLARVRALGSGGAEFAVFRGLARVRALGRAKRSFLWCLRPGLAACQHHSVEWHSSRSGTGGAVLLSGRSVEWRSDCGHFGSVDWRTRSQDKGVRPPLH

SEQ ID NO: 60244 - protein, 160 aa, Zea mays
  Coding DNA Sequence Number=SeqID_18465
MAAIDRDRPWTAVATDSSVSIGVGVVETGGEMVVDGPGTVEGDGGGGWLVNGGSLDIADTRLIRFLFLPGTSLKLYWCTAGGWRGTGREGRRDAVFTAWENRLAQVPASTGKTARIAHNNLLDELIIGCLMGMKDNFTFSCHKKILCHFILNEAVVNLGF

SEQ ID NO: 60245 - protein, 261 aa, Zea mays
  Coding DNA Sequence Number=SeqID_18466
  Gene Ontology: Mol. function=carboxyl- and carbamoyltransferase activity; Cellular component=ornithine carbamoyltransferase complex; Biological process=amino acid metabolic process
  Homolog annotation: Hit_ID=Q6QP54; Match level="QueryCoverage=37%, HitCoverage=37%, E-value=9e-15, Identity=61%"; Hit description =Putative kinase
VKMGLPIDVAGLRPRSGDVEAPPKPRSSLSPWVGRGGGRSVEARAESEPWGRAKRSSSSSGAEPESEPLGRAKRSSSSSGAEPESEPWVGRSGVRRLLGLSPSPSPGSGRADPSPSPGSGGAEFAVFWDLARVLSPRSGRAEFAVFRDLARVRALGSGRAELPMVPLAGPDWPVSLTLSSGTAVGVAQVALSFCQAGQWSGEVTALYADGGYQLRIRSLEEYVLIPEQGVVHEEDQEQASETAIEDLPAAPAIEGKPRFYA

SEQ ID NO: 60246 - protein, 53 aa, Zea mays
  Coding DNA Sequence Number=SeqID_18467
MPVWPCVGRRLPGTSAPATNLRSLRRRTVPLVHPWPFIPYGASQFALSTIDSI

SEQ ID NO: 60247 - protein, 71 aa, Zea mays
  Coding DNA Sequence Number=SeqID_18468
MGDCGRSLGVLVGESSELAGGMAEELHRAAATAICAVSLGNRVASGLAWALAWVAVLSPTESGGRRWADCR

SEQ ID NO: 60248 - protein, 136 aa, Zea mays
  Coding DNA Sequence Number=SeqID_18469
MARTSLVRARAGGPPSPMANLATPPQLRWLVLAELFQGVALPAPWLKPELTPWARPFSTAFCSRELFSPAHRSFSMGMPSLLASKPQQQRSRPPAVPCALLFPWKSAGAMSPSSRLLLLLSSPQNSNRNELAVNLA

SEQ ID NO: 60249 - protein, 170 aa, Zea mays
  Coding DNA Sequence Number=SeqID_18470
MAYCALEMKEFMVEMLTWRVTHGVDEAKPKAEDVMVMLQNFKVRMRRTEFIQGTSNPMQMIIDELLGKEVWLHVAVVINGNKQGIMVSPPSPLTKETPANMRLDVIYGLDRVSSGSGGIKGDLRETLLDRNEVDRHNRLHGRLAVVLLVVERHLEACAYGDDNVFLTSYL

SEQ ID NO: 60250 - protein, 1807 aa, Zea mays
  Coding DNA Sequence Number=SeqID_18471
  Gene Ontology: Mol. function=heat shock protein binding; Cellular component=integral to membrane; Biological process=protein folding
  Homolog annotation: Hit_ID=Q2QUQ6; Match level="QueryCoverage=18%, HitCoverage=34%, E-value=5e-57, Identity=37%"; Hit description =Expressed protein
  Pfam annotation: Domain name=DUF1723; Domain location=108-157; Score =80.6; E_value=4.8e-21; Accession=PF08330.1; Description=Protein of unknown function (DUF1723)
MASDDGDKDILLLVHQVPLDMEDVPAPRLAHLLAPLHRAPPPPPPPPFRSPPPPQAAASAEHRLSFRGWLGIPRHWDDWVAKLRPLHARLWRRLGIHDAVLASTLRFKRDASAILHLASFWSPATATFAFPWGEATVTLQDVALLAGFPALGAPATAPLPPQWRPDEAALNGVRLGFNRSACKKAHHSAWVKHFLTDDNADTVFEHAAFLALWLTRFVLPGHPESTMRQAVFPIAVRLARGDRVALAPAVLASIYRDLREIKAFLIATGRRRHHRQRRYDLLLIRLLATLHSSALDVGALPCPQASKGCNFVWQPYVSSMEHTGWVHSSDLAEDDELASLAQFLHPCELVGMDCIEQYLPHRVARQFGLDQDVPADVHRANQDWAIAWQTYQLEASAPVEWKTSKRKVKKTPAAMEAEAEKERKMKKARVSPTYTDKKRKLEELYDAKLSDWLPTARNEISDTTSDMESEEALLPNVGTTNDDIVLLMPRKQTTTAPVRALMDNDMILALGERGNFMVDEPPDIQSEPEAVVPATLDEEIVKIPEVISLDIPDKPEEGATAVMEEQKEATSVSDRSEEASALVIGEVEEKVAIEGAICVTGMNPSGNNSATVMEADERNAVPKEFGRAAKEVIEAVPQSQHEVNAGVINNSHDVVALPEEAHPVQPTNNSGGCPVVSCIMEDSKVAGDSGKIDYEYFCDFVEEQREIPCVQEISGENSRMGEKEREETSHESPQLEIVECVQDIVLRETDYDVNQKIVYPAVEDVATSDSMSTSLLGVPEPENAELNKHPYLAIKDEEDIPMEAARGEVAEMEQISTSAKGGAEEHGDFSELDHMGRADAKLHLHLNSEVPEKIDEIECKEVAGTMRLTGRYSDQKLGDVPEVGYTEDENIRGLVVNTSDRKPSEVSQVEPAKLEHSKDLVKEETDKSENIPGLECIGLEETRGDLMEECANTKSDNVPELENTGLGGTHGPIEDTDGRLKEIHDVNAELDKHNVHESDIDRSEDIMQIDPLTQDKATWLAKEETEDKTTKVQEVKYEQLRNEPPIQEDSKEKPCADSKDLSENVVVQSKEVDKLKQAGEGCQALMEKDMENASGAFVLEQTEDGHRKSLIETSINNDSEITLVEQLDGQSESLTRTGTVEIHGETIKAQDNEFYKDVVEDSNDSTNEKDVVEDSNESINAKMPCSSATVQLKEDKMEVFHEGKMEEPCAQDAELSNQREPSSDATAMEIEAVALEQDSRIICKNMEATTVEGSHTLDSGLSSDLAKVNETHAAREIKNQEVLDVDMKVAMSVCGEYQINSIGMEDVKSTKGSQNQECLDQKEDHIMEERVECEVREGSGVSYEEACELGGGRVKASGVAVDVSGPVLNKEACNTEEATPAAVPFPGGDGAGIELAKGGLTMIHCDELVLQLQAREDKKRHGVGHVNEKRVLEETSMIDTGELKSDSTVMEISMAGLRQGTLNQCASSSEKEEAVQEKHDQGLVDENTNRGSADNDALECGGVNPDVAITMFHETILTTEAVNIAGSKISSENQQKEAPFEVHSITEVEGSESNESSRKEPEGALALPQEPGNLVKVKQESLENETEMSIFRENDKVSGKDQASAEFIIDPSNTDERRENDIGRPDESAKGCERLTSDSINTVHSKFGKSSNEEDKRTQNTRSTDPKDIKESLGRIRAEPSNRVHTTSVGYYSQHAAHDPISSCKEIKVPLRDGARDSGRDRALELVVTSPREETPRWRQEQYALQILEDVQNSRIAERSRMEMEIRVLKAQVSSMERQVMNLDHFSEVKSRSSLNQQMVHLHKPYF

SEQ ID NO: 60251 - protein, 217 aa, Zea mays
  Coding DNA Sequence Number=SeqID_18472
  Gene Ontology: Mol. function=DNA binding
  Homolog annotation: Hit_ID=Q2QW42; Match level="QueryCoverage=84%, HitCoverage=97%, E-value=3e-68, Identity=67%"; Hit description =Expressed protein
MSYMRGDLLTRMRKLVKGLARPEPRWLKALERAPPVTFPRPEGKIKTLVLPEDVYVTKFNRIHPDSLYHDAIKISGFDPPPARVFAWRVLELKEQGVDEDVAMAVADNEYRTEKKAKKKAYKELKEIARSEGRKPPPNPYPSAIKEIQAEEKKYVMDRLHNPKVIEIANKMKEERDRMLRDRAADGLWNAMLIGMCFCQQAGKLRRVLLAPESSAYS

SEQ ID NO: 60252 - protein, 993 aa, Zea mays
  Coding DNA Sequence Number=SeqID_18473
  Gene Ontology: Mol. function=protein binding; Cellular component =integral to membrane; Biological process=defense response to fungus
  Homolog annotation: Hit_ID=Q6QM04; Match level="QueryCoverage=78%, HitCoverage=95%, E-value=0.0, Identity=41%"; Hit description=LRR protein WM1.2
  Pfam annotation: Domain name=LRRNT_2; Domain location=41-80; Score =57.0; E_value=6.2e-14; Accession=PF08263.3; Description=Leucine rich repeat N-terminal domain
  Pfam annotation: Domain name=LRR_1; Domain location=126-151; Score =7.0; E_value=14; Accession=PF00560.23; Description=Leucine Rich Repeat
  Pfam annotation: Domain name=LRR_1; Domain location=153-175; Score =13.8; E_value=0.64; Accession=PF00560.23; Description=Leucine Rich Repeat
  Pfam annotation: Domain name=LRR_1; Domain location=177-203; Score =4.4; E_value=42; Accession=PF00560.23; Description=Leucine Rich Repeat
  Pfam annotation: Domain name=LRR_1; Domain location=232-254; Score =14.2; E_value=0.48; Accession=PF00560.23; Description=Leucine Rich Repeat
  Pfam annotation: Domain name=LRR_1; Domain location=256-278; Score =11.3; E_value=2.2; Accession=PF00560.23; Description=Leucine Rich Repeat
  Pfam annotation: Domain name=LRR_1; Domain location=280-303; Score =15.4; E_value=0.2; Accession=PF00560.23; Description=Leucine Rich Repeat
  Pfam annotation: Domain name=LRR_1; Domain location=305-328; Score =9.1; E_value=5.6; Accession=PF00560.23; Description=Leucine Rich Repeat
  Pfam annotation: Domain name=LRR_1; Domain location=354-376; Score =10.8; E_value=2.8; Accession=PF00560.23; Description=Leucine Rich Repeat
  Pfam annotation: Domain name=LRR_1; Domain location=378-400; Score =4.3; E_value=45; Accession=PF00560.23; Description=Leucine Rich Repeat
  Pfam annotation: Domain name=LRR_1; Domain location=401-420; Score =3.0; E_value=77; Accession=PF00560.23; Description=Leucine Rich Repeat
  Pfam annotation: Domain name=LRR_1; Domain location=422-444; Score =9.9; E_value=4; Accession=PF00560.23; Description=Leucine Rich Repeat
  Pfam annotation: Domain name=LRR_1; Domain location=445-467; Score =8.6; E_value=7; Accession=PF00560.23; Description=Leucine Rich Repeat
  Pfam annotation: Domain name=LRR_1; Domain location=469-490; Score =14.4; E_value=0.42; Accession=PF00560.23; Description=Leucine Rich Repeat
  Pfam annotation: Domain name=LRR_1; Domain location=492-514; Score =0.5; E_value=2.3e+02; Accession=PF00560.23; Description=Leucine Rich Repeat
  Pfam annotation: Domain name=LRR_1; Domain location=516-538; Score =11.4; E_value=2.1; Accession=PF00560.23; Description=Leucine Rich Repeat
  Pfam annotation: Domain name=LRR_1; Domain location=540-562; Score =18.0; E_value=0.034; Accession=PF00560.23; Description=Leucine Rich Repeat
  Pfam annotation: Domain name=LRR_1; Domain location=564-586; Score =16.7; E_value=0.085; Accession=PF00560.23; Description=Leucine Rich Repeat
  Pfam annotation: Domain name=LRR_1; Domain location=628-650; Score =11.3; E_value=2.2; Accession=PF00560.23; Description=Leucine Rich Repeat
  Pfam annotation: Domain name=LRR_1; Domain location=652-674; Score =8.0; E_value=9.1; Accession=PF00560.23; Description=Leucine Rich Repeat
  Pfam annotation: Domain name=LRR_1; Domain location=676-698; Score =13.3; E_value=0.91; Accession=PF00560.23; Description=Leucine Rich Repeat
  Pfam annotation: Domain name=LRR_1; Domain location=700-721; Score =11.2; E_value=2.3; Accession=PF00560.23; Description=Leucine Rich Repeat
  Pfam module annotation: Pfam domain module=LRRNT_2::LRR_1::LRR_1::LRR_ 1::LRR_1::LRR_1::LRR_1::LRR_1::LRR_1::LRR_1::LRR_1::LRR_1::LRR_1: LRR_ 1::LRR_1::LRR_1::LRR_1::LRR_1::LRR_1::LRR_1::LRR_1::LRR_1;
  Pfam module annotation: Domain location=41-80::126-151::153-175::177 -203::232-254::256-278::280-303::305-328::354-376::378-400::401 -420::422-444::445-467::469-490::492-514::516-538::540-562::564
MSNPLPMLTLTIICATLWLTSGAGGTGTDTGGDNSSGGGCIPSERAALLSFKKGITSDNTSRLGSWHGQDCCRWRGVTCSNLTGNVLMLHLAYPMNPDDDLYYTDVCDDYTTLFGEISRSLLFLRHLEHMDLSWNCLIGPKGRMPSFLGSMKNLRYLNLSGVPFKGSVPPQLGNLSRLQYLDLGSSYLGYGIYSKDITWLTNLPLLQYLGMGSVNLSGIAGHWPHILNMLPSLRELHLEYNSFTGTLTSSIGHFRSLSILELNNNNLRGSVPTEIGTLTNLTSLDLSNNNFGGVITEEHFVGLMNLKKIHLSFNNLSVVLDADWIQPFRLESAGFASCHLGPMFPVWLRQQLVYITTLDISSTGLVGNIPDWFWSFSRAGSLDMSYNQLNGNLPTDMSGMAFLELNLGSNNLTGQMPPFPRNIVLLDISNNSFSGIMPHKIEAPLLQTLVMSSNQIGGTIPKSICKLKNLSFLDLSNNLLEGEIPQCSDIERLEYCLLGNNSLSGTFPAFLRNCTSMVVLDLAWNNLSGRLPSWIWELKDLQFLRLSHNSFSGNIPSGITNLSFLQYLDLSGNYFFGVIPRHLSNLTGMTMKGYYPFDIFDKTVSKFDDIWLVMTKGQQLKYSREIAYFVSIDLSGNYLTGEIPLGITSLDALMNLNLSSNQLGGKIPNNIGAMRLLASLDLSINKLSGEIPWSLSNLTSLSYMNLSYNNLSGRIPSGRQLDTLNVDNPSLMYIGNSGLCGPLQNNCSGNGSFTPGYHRGNRQKFEPASFYFSLVLGLVVGLWTVFCALLFINTWRVAYLGLLDKVYDKIYVFVAVKWATAGSTNYPMLMKSNCNDWSLLLMKINLETRYLWNAINPGDVELHVACLWNAILGDPEDRAKVVENAGLAGWPCRNMLPLLVPSARARSPGGTMGLQRLCDDRTNARGWADPTQSDHDGDVDMRARGSGGIRCGRGTALADTRPSGSGVDIRGLRRADDKFAVGGRTWRRHRQHI

SEQ ID NO: 60253 - protein, 1133 aa, Zea mays
  Coding DNA Sequence Number=SeqID_18474
  Gene Ontology: Mol. function=protein kinase activity; Cellular component=integral to membrane; Biological process=protein amino acid phosphorylation
  Homolog annotation: Hit_ID=Q2R0X3; Match level="QueryCoverage=97%, HitCoverage=97%, E-value=0.0, Identity=43%"; Hit description=Leucine Rich Repeat family protein
  Pfam annotation: Domain name=LRRNT_2; Domain location=40-81; Score =55.0; E_value=2.6e-13; Accession=PF08263.3; Description=Leucine rich repeat N-terminal domain
  Pfam annotation: Domain name=LRR_1; Domain location=112-134; Score =17.4; E_value=0.051; Accession=PF00560.23; Description=Leucine Rich Repeat
  Pfam annotation: Domain name=LRR_1; Domain location=136-158; Score =12.7; E_value=1.2; Accession=PF00560.23; Description=Leucine Rich Repeat
  Pfam annotation: Domain name=LRR_1; Domain location=161-183; Score =15.0; E_value=0.28; Accession=PF00560.23; Description=Leucine Rich Repeat
  Pfam annotation: Domain name=LRR_1; Domain location=185-208; Score =7.9; E_value=9.5; Accession=PF00560.23; Description=Leucine Rich Repeat
  Pfam annotation: Domain name=LRR_1; Domain location=211-232; Score =11.1; E_value=2.4; Accession=PF00560.23; Description=Leucine Rich Repeat
  Pfam annotation: Domain name=LRR_1; Domain location=234-256; Score =11.2; E_value=2.3; Accession=PF00560.23; Description=Leucine Rich Repeat
  Pfam annotation: Domain name=LRR_1; Domain location=258-280; Score =8.9; E_value=6.3; Accession=PF00560.23; Description=Leucine Rich Repeat
  Pfam annotation: Domain name=LRR_1; Domain location=282-303; Score =13.0; E_value=1; Accession=PF00560.23; Description=Leucine Rich Repeat
  Pfam annotation: Domain name=LRR_1; Domain location=305-327; Score =12.5; E_value=1.3; Accession=PF00560.23; Description=Leucine Rich Repeat
  Pfam annotation: Domain name=LRR_1; Domain location=329-351; Score =10.1; E_value=3.7; Accession=PF00560.23; Description=Leucine Rich Repeat
  Pfam annotation: Domain name=LRR_1; Domain location=353-375; Score =12.4; E_value=1.4; Accession=PF00560.23; Description=Leucine Rich Repeat
  Pfam annotation: Domain name=LRR_1; Domain location=377-400; Score =2.3; E_value=1e+02; Accession=PF00560.23; Description=Leucine Rich Repeat
  Pfam annotation: Domain name=LRR_1; Domain location=402-424; Score =10.9; E_value=2.6; Accession=PF00560.23; Description=Leucine Rich Repeat
  Pfam annotation: Domain name=LRR_1; Domain location=426-447; Score =15.0; E_value=0.28; Accession=PF00560.23; Description=Leucine Rich Repeat
  Pfam annotation: Domain name=LRR_1; Domain location=449-474; Score =3.3; E_value=68; Accession=PF00560.23; Description=Leucine Rich Repeat
  Pfam annotation: Domain name=LRR_1; Domain location=476-498; Score =14.2; E_value=0.47; Accession=PF00560.23; Description=Leucine Rich Repeat
  Pfam annotation: Domain name=LRR_1; Domain location=501-523; Score =14.8; E_value=0.31; Accession=PF00560.23; Description=Leucine Rich Repeat
  Pfam annotation: Domain name=LRR_1; Domain location=525-547; Score =12.5; E_value=1.3; Accession=PF00560.23; Description=Leucine Rich Repeat
  Pfam annotation: Domain name=LRR_1; Domain location=549-571; Score =9.1; E_value=5.6; Accession=PF00560.23; Description=Leucine Rich Repeat
  Pfam annotation: Domain name=LRR_1; Domain location=573-595; Score =10.7; E_value=2.9; Accession=PF00560.23; Description=Leucine Rich Repeat
  Pfam annotation: Domain name=LRR_1; Domain location=597-619; Score =5.6; E_value=26; Accession=PF00560.23; Description=Leucine Rich Repeat
  Pfam annotation: Domain name=LRR_1; Domain location=622-644; Score =5.0; E_value=33; Accession=PF00560.23; Description=Leucine Rich Repeat
  Pfam annotation: Domain name=LRR_1; Domain location=646-668; Score =10.4; E_value=3.2; Accession=PF00560.23; Description=Leucine Rich Repeat
  Pfam annotation: Domain name=LRR_1; Domain location=670-692; Score =7.1; E_value=14; Accession=PF00560.23; Description=Leucine Rich Repeat
  Pfam annotation: Domain name=LRR_1; Domain location=694-716; Score =10.5; E_value=3.1; Accession=PF00560.23; Description=Leucine Rich Repeat
  Pfam annotation: Domain name=LRR_1; Domain location=718-741; Score =13.4; E_value=0.8; Accession=PF00560.23; Description=Leucine Rich Repeat
  Pfam annotation: Domain name=Pkinase; Domain location=833-1122; Score= 98.4; E_value=2.2e-26; Accession=PF00069.15; Description=Protein kinase domain
  Pfam annotation: Domain name=Pkinase_Tyr; Domain location=833-1122; Score=-0.8; E_value=2e-12; Accession=PF07714.7; Description=Protein tyrosine kinase
  Pfam module annotation: Pfam domain module=LRRNT_2::LRR_1::LRR_1::LRR_ 1::LRR_1::LRR_1::LRR_1::LRR_1::LRR_1::LRR_1::LRR_1::LRR_1::LRR_1: LRR_
  Pfam module annotation: Pfam domain module=LRR_1::LRR_1::Pkinase::Pkin ase_Tyr; Domain location=40-81::112-134::136-158::161-183::185 -208::211-232::234-256::258-280::282-303::305-327::329-351::353
  Pfam module annotation: Domain location=426-447::449-474::476 -498::501-523::525-547::549-571::573-595::597-619::622-644::646 -668::670-692::694-716::718-741::833-1122::833-1122
  Subcellular localization annotation: CTP_CleavageSite=79; ConfidenceScore=5.23e-01
MDPSPRQCHAHTLLLLLCTSVLVFLSNNSAFSSAQPGNRSEADRQALLCFKSGISDDPRRVLTSWSADSLSFCGWRGVSCSSSLPLRVLSLELRSVRLHGTLLHNCMANLTSLVRLDLSGNHISGTIPEEVATLPGLQTLMLAGNILSGSIPPSLGVASPSLRYVNLAGNNLSGVIPDSLPKAPSLRVLNLSMNILAGMIPVTIFNSNSSKLVTVDLQLNHLTGPIPSLQNPTSLQFLGLTGNVLSGRVPPSLGNVSSLNTILLAENNLSGPIPEALGHILNLNILDLSENMLSGNVPRFQKATSLQLLGLNGNILSGRIPASLGNVSSLNTIRLAYNTLSGPIPEALGHILNLNILDLSENMLSGNVPAAIYNVSSFRYLHLGNNLLDGQILPNTGHSLPNLMSLIMRGNRFTGVVPSSLANMSKLQEIDLSRNLLNGSVPSLGSLSNLSRLILGSNMLQAEDWVFLTSLTNCSQLSMLSIDGNSLEGSLPESVGNLSRNLERLNFRGNWISGTIPAAIGNLVNLTLLAMDHNMLSGSIPSTIGNLKNLVVLALSTNRLSGEMPSTIGDLPQLNQLYMDDNLLSGNIPASLGQCKRLNMLNLSVNNLDGSIPSEILNISSLSLGLDLSNNNLNGTIPPQIGNLINLGLLNVSSNRLSGEIPTELGQCVLLSYLQMESNMFSGIIPQSLSELKGIEQMDLSENNLSGQIPEFFESFRTLYHLDLSHNKLVGPIPTSGIFTNPNAVMLDDNLGLCQQSTIFALPICPTTSSVTKRKNDARLLLIVAPPATIALLSFLCVLATVTKGIATQPPESFRETMKKVSYGDILKATNWFSPVNKISSSHTASVYVGRFEFDTDLVAIKVFHLDEQGSLNGFFNECEVLKQTRHRNLIQAITLCSTVDFENNEFKALVYEFMANGSLDMWIHPSLHQGRRRRVLSLGQRISIAADVASALDYLHNQLIPPLIHCDLKPSNVLLDYDMTSRLGDFGSAKFLSSSLTSSSPEGFVGASGTIGYIAPEYGMGCKISTDADVYGFGVLLLELLTAKRPTDEIFGNDLSLHKYVDIAFPDKIDEILDPQMQNEGEVVCNLRMQNYLIPLVEIGLMCSMESPKDRPGMQAVCAKIIAIQEAFIQTF

SEQ ID NO: 60254 - protein, 436 aa, Zea mays
  Coding DNA Sequence Number=SeqID_18475
  Gene Ontology: Mol. function=protein binding; Cellular component =integral to membrane; Biological process=defense response to fungus
  Homolog annotation: Hit_ID=Q6QM07; Match level="QueryCoverage=93%, HitCoverage=91%, E-value=2e-80, Identity=36%"; Hit description=LRR protein WM1.7
  Pfam annotation: Domain name=LRRNT_2; Domain location=33-72; Score =55.4; E_value=1.8e-13; Accession=PF08263.3; Description=Leucine rich repeat N-terminal domain
  Pfam annotation: Domain name=LRR_1; Domain location=118-143; Score =7.8; E_value=10; Accession=PF00560.23; Description=Leucine Rich Repeat
  Pfam annotation: Domain name=LRR_1; Domain location=145-167; Score =13.8; E_value=0.64; Accession=PF00560.23; Description=Leucine Rich Repeat
  Pfam annotation: Domain name=LRR_1; Domain location=169-195; Score =4.5; E_value=42; Accession=PF00560.23; Description=Leucine Rich Repeat
  Pfam annotation: Domain name=LRR_1; Domain location=266-288; Score =15.0; E_value=0.28; Accession=PF00560.23; Description=Leucine Rich Repeat
  Pfam annotation: Domain name=LRR_1; Domain location=290-313; Score =16.5; E_value=0.098; Accession=PF00560.23; Description=Leucine Rich Repeat
  Pfam annotation: Domain name=LRR_1; Domain location=315-338; Score =10.9; E_value=2.6; Accession=PF00560.23; Description=Leucine Rich Repeat
  Pfam annotation: Domain name=LRR_1; Domain location=364-386; Score =11.8; E_value=1.8; Accession=PF00560.23; Description=Leucine Rich Repeat
  Pfam annotation: Domain name=LRR_1; Domain location=388-410; Score =7.8; E_value=9.7; Accession=PF00560.23; Description=Leucine Rich Repeat
  Pfam module annotation: Pfam domain module=LRRNT_2::LRR_1::LRR_1::LRR_ 1::LRR_1::LRR_1::LRR_1::LRR_1::LRR_1; Domain location=33-72::118 -143::145-167::169-195::266-288::290-313::315-338::364-386::388-4
MTNPLIMLLLTIICATLGLTAGAPQPLGGIVCIPSERAALLSFKKGITRDKTNRLGSWHGQDCCRWRGVTCSNRTGNVLMLNLAYPSYPYDDSYDRDVCGDSRTLFGEISPSLLLLRQLEHIDLSWNCLLGPNGRMPSFLGSMKNLRYLNLSGVPFKGSVPPQLGNLSRLQYLDLGNSYLAYGIYSKDITWLTNLPLLQYLGMRYVNLSGIAGDWPHILNMIPSLRFDKYRHSRVDGQITTVHKGKQKLTVTGAPSGPSSIGYFRSLRILDLSYNNLRGSVPTEIGTLTNLTYLDLSNNNLGGVITEEHFVGLMNLKEIDLSFNNLSVVVDADWIQPFRLESAGFASCHLGPLFPVWLRQQLLHITKLDISSTGLVGNIPDWFWSFSKAASLDMSYNQLNGNLPTDMSGMGLSRAKPRFKQPHRTNATISKKTSGS

SEQ ID NO: 60255 - protein, 182 aa, Zea mays
  Coding DNA Sequence Number=SeqID_18476
MEWYGRCYFEEPLTCEEGPEGSRGCVWWAQDLYWFRHNVPTSSHRWLALSTPLMIKTRSRGYKQPREEGDAPKSLFWGGSGALEAIRLSGEPTASAPKLGSVISAQSTGDVWPEPTITRPHRSVWCAPDSVRWAKGTAGATTGFAKQGKKSHTVYVRWCTGMSDAPTDIRQELPFKWSSNGS

SEQ ID NO: 60256 - protein, 52 aa, Zea mays
  Coding DNA Sequence Number=SeqID_18477
MASSFLLIVQASLLHRGDCCTPANLCGSVPRNSPLLTWTLHPLGAVSPYFKE

SEQ ID NO: 60257 - protein, 192 aa, Zea mays
  Coding DNA Sequence Number=SeqID_18478
  Homolog annotation: Hit_ID=Q00SZ3; Match level="QueryCoverage=53%, HitCoverage=33%, E-value=4e-26, Identity=53%"; Hit description =Homology to unknown gene
MAAENEEKETACAGALYQLHLVKASTARAFVPRDLRLVEAFGYTLGGMFLARYHDSPAGEFDELVVIAGIVWNPPTSCAWAARVLVNSVEACRHGRKEVGLPSHVATFSSKNEAASLGDRPLARPNSFLNMLGIGSTAFEQGNGREIEVSESKGGSSTRHLCNISLPFTGNSLLIHLGTVCLPSISYIIELK

SEQ ID NO: 60258 - protein, 141 aa, Zea mays
  Coding DNA Sequence Number=SeqID_18479
MQILIYLENAGMQYQTQAAQMQILASGQVHAIRPRFTCLLFVGTRDPMGDPYPHGYGMGVNPYPSVYMGDPMGLFLYRGFGYENKKLCRGPLILNTVLNLPTGPQRRPPCPQDQWATRLVGFRQHQIPQRIYSNMRKNRFF

SEQ ID NO: 60259 - protein, 88 aa, Zea mays
  Coding DNA Sequence Number=SeqID_18480
MASWSSEVDRQWGGGGWPAAALRWLLASPGSLSQETGGAVAAGSRLTLGDCDCTGGLGVGNLLLDPEANFGFSDIDLPSLSQPQQLLQ

SEQ ID NO: 60260 - protein, 243 aa, Zea mays
  Coding DNA Sequence Number=SeqID_18481
  Homolog annotation: Hit_ID=Q8SA97; Match level="QueryCoverage=31%, HitCoverage=12%, E-value=1e-10, Identity=55%"; Hit description =Ornithine carbamoyltransferase
  Subcellular localization annotation: CTP_CleavageSite=89; ConfidenceScore=5.22e-01
MAPPVDVAGPRPGLGDMEAPPRSRSSPSSVAEAGSEPPGRARRSSSSFGAEPNSEPWVGRSGVHRLLGLSPSPSPGSGGAEFAVFRGARVRIKVSGHLCIKCSCDLVGVASWRRQGLGRAGNAFAAGGGPQLYADGGYQLRIRSLEGPDFRSLALVKKLSPDLRPLQPLKRPASTPPMTTTRDSSDEKDQATYYTMSKTAKSSFNRSTRQRSALEPTMAQPPAPAPTSTPTPLPPQASAPCGG

SEQ ID NO: 60261 - protein, 271 aa, Zea mays
  Coding DNA Sequence Number=SeqID_18482
  Gene Ontology: Mol. function=pyroglutamyl-peptidase I activity; Biological process=proteolysis
  Homolog annotation: Hit_ID=Q8GVF6; Match level="QueryCoverage=74%, HitCoverage=92%, E-value=1e-106, Identity=93%"; Hit description =Pyrrolidone carboxyl peptidase-like protein
  Pfam annotation: Domain name=Peptidase_C15; Domain location=11-234; Score=-63.9; E_value=9.3e-08; Accession=PF01470.8; Description =Pyroglutamyl peptidase
MGSEGPSVVTVHVTGFKKFHGVAENPTEKIVTNLKSFLEKRGLPKNLVLGSCTVLETAGEGALATLYKVLESAVADRGTGSSAQGQVIWIHFGVNSGAIRFALENQAVNEATFRCPDELGWKPQRVPIVPSDGSISRTRETTLPVNELTKSLRKIGYDVVPSGDAGRFVCNYVYYHSLRFAEQHGIKSLFVHVPLFLTIDEEVVFGNREGKKERSLAIDDDLAPEGVFGNWEGGKRGNCCIESDGVSACTPSIKCCKHAWEIIGDLDLNKI

SEQ ID NO: 60262 - protein, 61 aa, Zea mays
  Coding DNA Sequence Number=SeqID_18483
MDIMVDQFEHCASAKIFQDARTTWTKELRKATPQKKTLRRSRKSKKGGVAPGVCGANGHLL

SEQ ID NO: 60263 - protein, 179 aa, Zea mays
  Coding DNA Sequence Number=SeqID_18484
MAELGSRPHRGLRRPASPIVARGTTSGTQSKRQGFPMRDPARGDFKGLGNPAIAVGYPTPEPAPPPTPPPSSPATKLVAGFIGNYNQVYIRFRRYNSKMRIHLNFTWAIYKVKIHKQSVGASFQEVVGGVGGVDWGRGGEDEDNCTGALELDNLERVSFVMAVQNTHLISSAREKGHPI

SEQ ID NO: 60264 - protein, 183 aa, Zea mays
  Coding DNA Sequence Number=SeqID_18485
VTFRGTNWTRFWTLLQKEDRPQIKCQMNCTKCQKLVNCTNWQKTVMCTKLAIWVNFQGGGVVHSMYAISCLVLVHSKCGKLSGGYGLLLRSPRFATCFLSRSSSGASGIARIGDRCSWGKTKATGQIRHGGTIHGGGGGGLGFSETGGARGEWGWMRVDGTASAIRGNNKKSLIASGDQWVAA

SEQ ID NO: 60265 - protein, 64 aa, Zea mays
  Coding DNA Sequence Number=SeqID_18486
  Homolog annotation: Hit_ID=O24587; Match level="QueryCoverage=55%, HitCoverage=3%, E-value=6e-08, Identity=77%"; Hit description=Pol
MALQESILLAYVAHHSFKLYQIDVKSAFLNEPIKEEVGKADPTCRCLKIGVPTTAGPSQNPKTP

SEQ ID NO: 60266 - protein, 148 aa, Zea mays
  Coding DNA Sequence Number=SeqID_18487
  Gene Ontology: Mol. function=DNA binding; Cellular component =cytoplasm; Biological process=DNA integration
  Homolog annotation: Hit_ID=O24587; Match level="QueryCoverage=94%, HitCoverage=13%, E-value=6e-59, Identity=80%"; Hit description=Pol
  Pfam annotation: Domain name=rve; Domain location=18-146; Score=67.0; E_value=6e-17; Accession=PF00665.16; Description=Integrase core domain
MTNRETSGTTHPNKNVMTTSRSLEPLHMDLFGPIAYLRIRGSKYGLVIVNNYSRFTLVFFLHDKSETQETLKRFLRRAQNEFELKVEKISSDNGSEIKNLQVDEYLEEEGIKHEFFAPYTPWQNGVVERKDRTLIDISRTQLGEYKTP

SEQ ID NO: 60267 - protein, 365 aa, Zea mays
  Coding DNA Sequence Number=SeqID_18488
  Gene Ontology: Mol. function=oxidoreductase activity; Biological process=metabolic process
  Homolog annotation: Hit_ID=Q0GJJ2; Match level="QueryCoverage=98%, HitCoverage=99%, E-value=1e-118, Identity=60%"; Hit description=11 -beta-hydroxysteroid dehydrogenase-like protein
  Pfam annotation: Domain name=adh_short; Domain location=50-234; Score= -24.9; E_value=0.00024; Accession=PF00106.15; Description=short chain dehydrogenase
MAPDLVNGVLNWVGTPAMVASLLLFYPPYYLFKTCYSFLSWLFPEDLAGKVVLITGASSGIGEVLFVVSCSAPTTVTDHIQIIRLSSSLTDLSLQQLAYQYALNRASLALVARRESSLRHVADRALELGARDVVVLPGDVSTPDDCDRFVRTAISHYDRLDHLVCNAGVASVGAFEEIPDVTSYSSQLVTSPKSPETVCFLSRLIYMVLICAFVRSAANAALINFFETLRTELGNQVGITVVTPGWVESEMSRGKFLKEHGQVEVDQEMRDAQIGLFPVEYAKNCAKAMVQAARQGERYLTVPAWFGAMYLWRLFAPEVVEACYRLLYMHGHGARQADAPSRTMAEAGGKQLLYPTSLRSDEIKE

SEQ ID NO: 60268 - protein, 167 aa, Zea mays
  Coding DNA Sequence Number=SeqID_18489
MAGKRPRIHGQRGENGGGKTSGGPEQLRGRCILGTNLEELDQAKSAGHRASTVDHRGRAPAKAKLDEHRGTGGALKRELGAWVGVVAEKSSDVRECARAGPRENETKDVEIEEIRQLYTHLSKEDKVLLMKIPSRNKEEGETLLRLEETLIKTNNSLEKMTKDHEEL

SEQ ID NO: 60269 - protein, 666 aa, Zea mays
  Coding DNA Sequence Number=SeqID_18490
  Gene Ontology: Mol. function=RNA-directed DNA polymerase activity; Cellular component=intracellular; Biological process=RNA-dependent DNA replication
  Homolog annotation: Hit_ID=Q8S463; Match level="QueryCoverage=99%, HitCoverage=34%, E-value=0.0, Identity=87%"; Hit description =Putative prpol
  Pfam annotation: Domain name=RnaseH; Domain location=334-461; Score =6.6; E_value=1.4e-05; Accession=PF00075.14; Description=RNase H
MKESDQLATSFITPFDMYCYVTMPFGLRNAGATYQRCMNHVFGEHIGRTVEAYVDDIVVKTRKASDLLSDLEVTFRCLKVKGVKLNPEKCVFGVPRGMLLGFIVSERGIEANPEKIAAITSMGPIKDLKGVQRVMGCLAALSRFISRLGERGLPLYRLLRKAECFTWTPEAEEALGNLKALLTNAPILVPPAAGEALLIYVAATTQVVSAAILVERREEGHALPVQRPVYFISEVLSETKICYPQVQKLLYAVILTRRKLRHYFESHPVTVVSSFPLGEIIQCREASGRIAKWAVEIMGEAISFAPRKAIKSQVLADFVAEWVDTQLPTVPIQPELWTMFFDGSLMKTGAGVGLLFVSPLGKHLRYVLRLHFPTSNNVAEYEALVNGLRIAIELGVRRLDARGDSQLVIDQVMKNSHCRDPKMEAYCDEVWRLEDKFYGLELNHIAWRYNETADELAKIASGRTTVPPDVFSRDLHQPSVKIDDTSEPEAPSAQPEAPSAQSEAPSARPEAPSAWPEAPSVQPEIPSAPEGEALRVEEERSGVTPNQNWQTPYLQYLHRGELPLDRAEARRLAWRAKSFVLVGDGKELYHRSPSGILQRCISIAEGQELLQEIHSGACGHHAAPRALVGKAFRQGFYWPTAVADATRIVRTCEGCQFYARQTRLPA

SEQ ID NO: 60270 - protein, 71 aa, Zea mays
  Coding DNA Sequence Number=SeqID_18491
MSDGKVSIPHAISMVIKSLGKVIGNPMLMEDNTQHYIYTLKQQDIDLLQECKGERLQVVEIPRKRDKKRKA

SEQ ID NO: 60271 - protein, 196 aa, Zea mays
  Coding DNA Sequence Number=SeqID_18492
MDFRSSRPVQGRHRGAWAKELVSSSVRSISTTSALVARPRREVDVVEGEEAGGGEEERGGVIEGGHGLPESLVKQARARSFYKSTVVGGRGDDVERGQGHGVAPCGRLQRLRHRESRHRRGGEGRGREGEALNPGRVRRVFSDPVTAARDRGSRGSGCEQGEQGRWVRTGEQGWRLTRGGRGGGGGTNVGVGGRTV

SEQ ID NO: 60272 - protein, 91 aa, Zea mays
  Coding DNA Sequence Number=SeqID_18493
MAVQRRSGRRREASESVSERDMKVEGGKSGWALNEMEWALLPTCPSARTKSEPEQGTTTTCPGTCHLAIAVCLGYRCARDKMGARSVAHFG

SEQ ID NO: 60273 - protein, 185 aa, Zea mays
  Coding DNA Sequence Number=SeqID_18494
  Pfam annotation: Domain name=DUF1644; Domain location=15-85; Score= -69.2; E_value=0.027; Accession=PF07800.3; Description=Protein of unknown function (DUF1644)
MGSGNLIVKKVVKHSSFDLDIQLDKSWMEDTRPVPSVLRDLNLHMNCLPMGDVIGWIVIGEARQHLNQKKRCCEEDCCSSVDVLSTIHAQVPNGIVLGDYVIEYGDDDNGEDYEVFRGVRTNWWSCKSDVERIFKEVFEDLSDKNTGILDINSRHVATLMVYNSIIRQLVGPHKDPPYMNTITEK

SEQ ID NO: 60274 - protein, 97 aa, Zea mays
  Coding DNA Sequence Number=SeqID_18495
  Gene Ontology: Mol. function=transferase activity, transferring glycosyl groups; Cellular component=integral to Golgi membrane; Biological process=protein amino acid glycosylation
  Homolog annotation: Hit_ID=Q2WBH6; Match level="QueryCoverage=70%, HitCoverage=14%, E-value=6e-10, Identity=53%"; Hit description =Sialyltransferase like protein
MMRAHLLAAAQRRPTVALLLGLALAFCLAVLSIQSSFYAAPGAPGRRLDLDADDVRDLVGFQSRVQQCVVHMDSPTDLGISDRLSFIAQNFCAHCYL

SEQ ID NO: 60275 - protein, 531 aa, Zea mays
  Coding DNA Sequence Number=SeqID_18496
  Gene Ontology: Mol. function=6-phosphofructokinase activity; Cellular component=6-phosphofructokinase complex; Biological process=glycolysis
  Homolog annotation: Hit_ID=Q5VMJ5; Match level="QueryCoverage=95%, HitCoverage=95%, E-value=0.0, Identity=75%"; Hit description =Putative pyrophosphate-dependent phosphofructo-1-kinase
  Pfam annotation: Domain name=PFK; Domain location=135-384; Score= -6.5; E_value=1.3e-12; Accession=PF00365.10; Description =Phosphofructokinase
MAPPPAPPADWTPDLRPVASVPVPITVPSPRDHTHHHHHLVDRRDTPRGRAWEPERNRRGEAMDGAAVVKLMSGEAGYVLEDVPHVSDYLPDLPTYPNPLQDNPAYSVVKQYFVNPDDTVCQKVYFEPDEVHACIVTCGGLCPGLNTVIREIVCGLSDMYGVTKILGIQGGYRGFYARNTITLTPKIVNDIHKRGGTVLGSSRGGHDTVKIVDSIQDRGINQVYVIGGDGTQRGAGVIFEEVRRRGLKVSVAGIPKTIDNDIPVIDKSFGFDTAVEEAQRAINAAHVEAVSAENGIGLVKLMGRHSGFIAHYATLASRDVDCCLIPESPFYLEGEGGLFRYIERRLKDNGHMVIVVAEGAGQKLIAETMQSIGKDASGNQLLLDVGLWLSQKINEYFKKNKMTINLKYIDPTYMIRAIPSNASDNVYCTLLAHSVVHGAMAGYTGFTIGQVNGRHCYIPFYRITEKQNRVSITDRMWARLLSSTNQPSFLCNKVIEEAKKEQERAAQLLDGSPSHRKVDDEVAASNLGRTK

SEQ ID NO: 60276 - protein, 153 aa, Zea mays
  Coding DNA Sequence Number=SeqID_18497
MASWLYTIVKGDERLYNDDDGRRPVVDDDGPEDAVTVMTNKKEKVPPMTTMEGTTMMMDKAKRRALVKEPVMVVMASWLYTIIKGDERVYNDDDGRRSVANDDGPEDVVPVMGMSTVMTDKKEKVPPMTTMEGTTTMMDKTCNSNLNYPKKFN

SEQ ID NO: 60277 - protein, 221 aa, Zea mays
  Coding DNA Sequence Number=SeqID_18498
  Gene Ontology: Mol. function=small conjugating protein ligase activity; Cellular component=cytosol; Biological process=protein modification process
  Homolog annotation: Hit_ID=P35132; Match level="QueryCoverage=72%, HitCoverage=97%, E-value=2e-75, Identity=85%"; Hit description=SUMO -conjugating enzyme UBC9
  Pfam annotation: Domain name=UQ_con; Domain location=5-158; Score =251.7; E_value=1.5e-72; Accession=PF00179.16; Description=Ubiquitin -conjugating enzyme
MASKRIQKELKDLQKDPPTSCSAGPVGEDIFHWQATIMGPSDSPYSGGVFLVTIHFPPDYPFKPPKVAFRTKVFHPNINSNGSICLDILKDQWSPALTISKVWELPTYQHPQSGRFQVLLSICSLLTDPNPDDPLVPEIAHMYKTDRNKYENTARTWTQRRGHVCVRRIGRKGDPEQVKWNYLPCGQATKFGPSGSPICRWSVGLQYRLPVIILVTAEVQR

SEQ ID NO: 60278 - protein, 97 aa, Zea mays
  Coding DNA Sequence Number=SeqID_18499
  Gene Ontology: Mol. function=2-polyprenyl-6-methoxy-1, 4-benzoquinone methyltransferase activity; Cellular component=mitochondrion; Biological process=ubiquinone biosynthetic process
  Homolog annotation: Hit_ID=O49354; Match level="QueryCoverage=84%, HitCoverage=34%, E-value=8e-29, Identity=60%"; Hit description =Hexaprenyldihydroxybenzoate methyltransferase, mitochondrial precursor
VIEHVANPLEFCESLSALTIPNGATVISTINRSMRAYATAIVATEYILRWVEEMAGFVYNPLSGEWSLSDDISVNYIAFGVKKGEASSTNDREANLS

SEQ ID NO: 60279 - protein, 51 aa, Zea mays
  Coding DNA Sequence Number=SeqID_18500
MAHYQQGRRQQVDEYGNLVPGGHGVQGQQLGESARGYGVAALAATQSASSR

SEQ ID NO: 60280 - protein, 321 aa, Zea mays
  Coding DNA Sequence Number=SeqID_18501
MKLVDYDGATAKRIRLDNGAARNFYGFEQQGGERSEEFWRRELGTDTAAKQTRPSSENKQRGRAGVWTEPSWSCDDNLGEHSKEARHGQKLQGDGRPTQGQGESRGWVELRPWNQARRGVGRSRGTATTDPAIGGIAWASLRQNAGQRGGKNSTGTMGMTWDWETPWCGAGKELRLGTARAMGGRETSGRAGEGHREVEEKGCLVEKSSAREQQPVMERPRLGRAPGRAAMAGFLQKGRWRLELAAAERMKTRPDFSWLHKQMRTTADDRQEKTEGEIERLLQGLLAQKSEQGRRRDKARRRKKNQQRAYRKISPMSSACA

SEQ ID NO: 60281 - protein, 122 aa, Zea mays
  Coding DNA Sequence Number=SeqID_18502
  Gene Ontology: Mol. function=metal ion binding; Cellular component =nucleus; Biological process=regulation of transcription, DNA -dependent
  Homolog annotation: Hit_ID=Q8LHP0; Match level="QueryCoverage=56%, HitCoverage=57%, E-value=1e-17, Identity=67%"; Hit description =Transcription elongation factor 1 homolog
MPRDPRPLRPSLYLSLALGDSWVTVVAAALLQVPRSSQVPLPPLRRRRAPASDMKNLIGEASCRICQENFSTTINECVKNFITSKLKLDRTLYIALTEPIDIYSEWIDECERVNTVEGDDDA

SEQ ID NO: 60282 - protein, 49 aa, Zea mays
  Coding DNA Sequence Number=SeqID_18503
MRREGRVNVVSIDTTEQLADILTKALARERFCELRDKLRLVKIKQRCKA

SEQ ID NO: 60283 - protein, 323 aa, Zea mays
  Coding DNA Sequence Number=SeqID_18504
  Homolog annotation: Hit_ID=Q6QP54; Match level="QueryCoverage=22%, HitCoverage=31%, E-value=2e-08, Identity=56%"; Hit description =Putative kinase
  Pfam annotation: Domain name=Dehydrin; Domain location=18-228; Score =69.2; E_value=1.3e-17; Accession=PF00257.10; Description=Dehydrin
MAQYTWVRLPVLARTCATGMLDTGVLGGGGHAATGMPAGHGTRPGATGVAGTGGAFPHAAEHKTGGGILSPLRQQLQLQQLGAFRCSIAIFSSAYIHSHTMHSSEDDGMGGRRKKGLKEKIKEKMLGGHREGQGQATATGAYGGTGYVAGLTTGGPHEKKGVVEKIKEKIPGGHKDYDQHQHTTAATGGGGGYGGTTDTTYGTTTEGTHEKKGFMEKIKEKLPGLGHSLGSGRRRTPPRPTLGLGLSLGLRTTTNSAPPDPRARTQPRLRTTMDSASPDPRARTQPRPRKTGSASPDLRGRTQPRPRKTDSTSTSEEPPPRPT

SEQ ID NO: 60284 - protein, 205 aa, Zea mays
  Coding DNA Sequence Number=SeqID_18505
  Gene Ontology: Mol. function=transferase activity; Cellular component= intracellular; Biological process=metabolic process
  Homolog annotation: Hit_ID=Q10K51; Match level="QueryCoverage=99%, HitCoverage=69%, E-value=1e-50, Identity=33%"; Hit description =Pentatricopeptide, putative
  Pfam annotation: Domain name=PPR; Domain location=102-136; Score =20.1; E_value=0.008; Accession=PF01535.11; Description=PPR repeat
  Pfam annotation: Domain name=PPR; Domain location=31-65; Score=38.2; E_value=2.8e-08; Accession=PF01535.11; Description=PPR repeat
  Pfam annotation: Domain name=PPR; Domain location=66-100; Score=14.6; E_value=0.14; Accession=PF01535.11; Description=PPR repeat
  Pfam module annotation: Pfam domain module=PPR::PPR::PPR; Domain location=102-136::31-65::66-100
MIKGCAMHDLLEQGAQLHAQLFNEIGYRTEIAWNAVINVYAQHGHGWGAIQAFDRMTSSGIRPNHITFVCLLTACSHAGLVDEGLGYFHSMKDAHGIEPKAEHYSCIIDMYGRAGRLDEAEKFISEMPVKPSAYAWCSLLGACRMQGNKELGEVAAQNLMKLDPNNTGIHISLSGIYTSLGQWEDVKAVKKSMKDISIKKLPGFS

SEQ ID NO: 60285 - protein, 74 aa, Zea mays
  Coding DNA Sequence Number=SeqID_18506
MWGPVFYCLCGGTSSTVSSMAMCGHVFVVSTQQHEGHNSMLLEQQCHQQHRACRVQVEDRERSEKPPNQFKMYP

SEQ ID NO: 60286 - protein, 581 aa, Zea mays
  Coding DNA Sequence Number=SeqID_18507
  Gene Ontology: Mol. function=oxidoreductase activity; Cellular component=cytoplasm; Biological process=gibberellin metabolic process
  Homolog annotation: Hit_ID=Q673G3; Match level="QueryCoverage=56%, HitCoverage=90%, E-value=1e-122, Identity=72%"; Hit description=GA 2- oxidase 4
  Pfam annotation: Domain name=2OG-FeII_Oxy; Domain location=280-388; Score=120.9; E_value=3.6e-33; Accession=PF03171.10; Description=2OG -Fe(II) oxygenase superfamily
  Subcellular localization annotation: CTP_CleavageSite=4; ConfidenceScore=5.03e-01
MPPRAETVGATPSLAATLTPDTKNPSTETLSEMNSTRTLIAPPSDPTAPADRVGTRRRYLPPGGPCVGRRYCHHPRIKLGSAALDPNQKARPRGIKSSETRAMQKYRQRKPGDASSFPGVPAVDLSSPGAALAVVDACERFGFFKVVNHGVPAGVVDRLEAEAVRFFASPQAAKDACGCGPASPLGYGNRRIGRNGDMGWLEYLLLALDGNASVSKGLPCPVILAAVRQPINQSMHAVDAVNQYVASVRGLATSVLEAVAEGLGVAPRDALSGMVADAASDQVFRINHYPACPLLQRLPDSCGVTGFGEHTDPQLVSVLRSNGTPGLQLALHGDDGRWVPVPPDRDAFFVIVGDSLQVLTNGRLKSVRHRVVANSLKPRVSMIYFAGPAPAQRIAPLPQLLGHGKQSLYRDFTWGDYKKAAYRSRLGDNRLDPFRIYGLVDRSTSRVLGACFVAEGSLRRSTFERSEYNQTQREAFENKSPTLAPTSGELTSTFELMDLFNNQVVAPSTTKLVLPIIGGSSLEPANKKQKKEAWRRVQHVGVQGPFIKSKWSHIPITFSQEDLQLKDYPHNDVMVISCVIK

SEQ ID NO: 60287 - protein, 148 aa, Zea mays
  Coding DNA Sequence Number=SeqID_18508
  Gene Ontology: Mol. function=transcriptional repressor activity; Biological process=regulation of nitrogen utilization
  Homolog annotation: Hit_ID=Q10L97; Match level="QueryCoverage=99%, HitCoverage=49%, E-value=3e-50, Identity=64%"; Hit description=NAD dependent epimerase/dehydratase family protein, expressed
MVVGGRKLKGTMLVKRAVEEFYIKSRVLLRDPEKGIGHYLGKQDESVLQGVTHVICCTGTTAFPSKRWDGENTPERVDWNGIRNLVSALPQTIKRLVLVSSIGVTKYNEIPWSIMNLFGVLKYKKMGEDFVRNSGIPFTIIMYSGLED

SEQ ID NO: 60288 - protein, 91 aa, Zea mays
  Coding DNA Sequence Number=SeqID_18509
MTPRLLEEAGGGDTLRLVDMFGSLLYIKMFMGWIQVLESKDKRSTNLSKSARSYKIEVHINFPLGKVINDKPITILYTLPLEDEKAHIENN

SEQ ID NO: 60289 - protein, 318 aa, Zea mays
  Coding DNA Sequence Number=SeqID_18510
  Gene Ontology: Mol. function=protein binding; Cellular component =integral to membrane
  Homolog annotation: Hit_ID=Q2R9D4; Match level="QueryCoverage=87%, HitCoverage=61%, E-value=7e-65, Identity=48%"; Hit description=Non -imprinted in Prader-Willi/Angelman syndrome region protein, putative, expressed
  Pfam annotation: Domain name=DUF803; Domain location=12-313; Score =331.9; E_value=1.1e-96; Accession=PF05653.4; Description=Protein of unknown function (DUF803)
  Pfam annotation: Domain name=TPT; Domain location=19-181; Score= -34.4; E_value=0.057; Accession=PF03151.7; Description=Triose -phosphate Transporter family
  Pfam module annotation: Pfam domain module=DUF803::TPT; Domain location=12-313::19-181
  Subcellular localization annotation: CTP_CleavageSite=46; ConfidenceScore=5.18e-01
MGGGGGSSGPELSTDNMKGIVLALLSSGFIGASFIIKKKGLRRAAVASGVRAGRPPSCPSRTVDRGSWGRPVFWSKEMSTLVGLERFLNSGDGMRRCRRVLIPHGAPVVFLSEGFPLSVIVGEIANFVAYAFAPAVLVTPLGALSIIVSAVLAHFILNERLHALGVLGCVMCIAGSVVIVIHAPQEQEITSVKEIWNMATQPAFLLYVASVIVIVFVLVFYFSPLYGQSNVLIYTAICSLMGSLSVMSVKALGTSLKLTFEGTNQLIYPETWFFMLVVATCVLTQMNYLNKLQKWYVDREELTECNLRVEPLQIYQQK

SEQ ID NO: 60290 - protein, 231 aa, Zea mays
  Coding DNA Sequence Number=SeqID_18511
  Homolog annotation: Hit_ID=Q8L5E8; Match level="QueryCoverage=24%, HitCoverage=25%, E-value=3e-28, Identity=96%"; Hit description=Dof zinc finger protein
  Pfam annotation: Domain name=zf-Dof; Domain location=70-132; Score =127.0; E_value=5.2e-35; Accession=PF02701.6; Description=Dof domain, zinc finger
MLPPHVEMPTTRAAGIKLFGKVITTHYQQQQQPPQPVRHAGAAPASSGRGSGGGPGPDLLEEVARARAAAAEARLPCPRCLSRDTKFCYFNNYNVNQPRHFCRACHRYWTAGGAIRNVPVGSGRRKNRPVLLPPPPPPPHAATATTTGSSATISADDSNDRRRSASGSPPPVFTSAFTAPYYLGSPAQFATSSPAYAAGAAGPPGTAGQCLWLVAATTTTDRSAATETALF

SEQ ID NO: 60291 - protein, 513 aa, Zea mays
  Coding DNA Sequence Number=SeqID_18512
  Pfam annotation: Domain name=DUF688; Domain location=7-508; Score= -169.2; E_value=1.3e-05; Accession=PF05097.3; Description=Protein of unknown function (DUF688)
  Subcellular localization annotation: CTP_CleavageSite=94; ConfidenceScore=5.02e-01
MGMPDANRRINLAAPLLSVRRHGGAETAPTGTRLPAYKQAGAATSSEPPGRTTTSAVAVAVPFGWERRPGHPKSVRTRRQPPPPPLTTIVDDPSPATRPSDDTLSRDDAASCVTANCSATTGLSDAASAGAGTGSSEPRARARGGAMMDRFLPAAHAVAAAGSPQNAFRRKAARTAPAAADRRLYLLPAQPQRRVPLHHIAACHLPPPVPPAPMSSPRGKNDDYDGASSDARSTPGFVSRTRRCGLLSVRCVRSALRRRAGRPFRSNGGARSRREKKPLLPHTGDDHGMQCWEEVYIKSLLRSGRGSLMGPAAAVASELDRTVCELYSRRRHGQAAVRPKASHLGLLLVLDRSNEACGHAASPPARKFSITGGGDTALLLRGGAATKGSLRLPNGGEKRLGRDDDAAAADAAAGGGGYGFPLLLDDKEGGSAGREMALSSPQPLLPLPLPKSPTESWLARALPSVSTRPPTTSFLGLHVQPRKHAPLPCCSIDSSRDVHHDRQRQIRVHDLHK

SEQ ID NO: 60292 - protein, 292 aa, Zea mays
  Coding DNA Sequence Number=SeqID_18513
MIQSLLSCHNVVQCEHCLLNNNGGKSDCRDVNGAAPRTRTRQTKYSPFPVHARGEKFSLYLSLSGIRGSDGEKSPPTAHLEFRNNIGSASNPLKNPAQHNKSTAYYNSEHTTVNIQPDSRISTSAGTRLPGSRAAEVEQICSRCRRDRAALQQGPSTGAAEHQEDEQGTVVRGSDGGLEEEWMTSARPEEEEQGTAGRGSTGRSPSSSTRRWTASPARRARSSRRTSRSAARARSEEDERPRKDDEQGPGDGLPVDGRTERTAQRTKAAATRKATAKQKLGLAGVGPIDWNG

SEQ ID NO: 60293 - protein, 255 aa, Zea mays
  Coding DNA Sequence Number=SeqID_18514
PEGGVCLSVSVAEPEPRGRAKAEVVRPRPGRSPSPWGRARRSFVVFPGLSPSLEPWGRAERSSPSSRVLARVRALGSGGAEFAVFRVLARVRALGSGGAEFAVFRVLARVRALGSGGAEFAVFPGLSPSPSPGVGRSGVRRLPGLSPSPSPGVGRSGVRRLPGLSPSPSPGVGRSGVRRLPGLSPSPSPGVGRSGAALSFCQTGQWSGGVTAVTSALPGARVRIELYADGGYQLRIRRLEESLVGGIKDLTNLYI

SEQ ID NO: 60294 - protein, 654 aa, Zea mays
  Coding DNA Sequence Number=SeqID_18515
  Gene Ontology: Cellular component=endoplasmic reticulum
  Homolog annotation: Hit_ID=Q0R3Z8; Match level="QueryCoverage=42%, HitCoverage=76%, E-value=1e-08, Identity=25%"; Hit description =Putative alpha 1,3-xylosyltransferase
  Subcellular localization annotation: CTP_CleavageSite=48; ConfidenceScore=5.40e-01
MLCLSSPPSRARQHGGSRGIVPAGGSGATPRVTIFSAPRPPPEGSPARQELAARSWLALPWNVSVVLLGAGPESVALAARLGHRVTADAAIDFAFTGTPFFHSMVARAQAAADTDVCVLVDAEIVLLPEIVNALDRFSKVDGDWFLVSLSRNVTDPRYQLADSGSHWVQADGKEVSFTEEIPAEWSSSEGSDRGLIMAWNNPSSALHAGVLPSFLYGRGAQNWWLAHEVLSSEMRLFFDASSLVLGLYPESISAMQHVMASSKNGRLPSVSWEYGVNHHLAAVYGSYCCRSPARRFPMLHRVVKQSEDYMLSKVDTLVSSDFFISKQGNAHGVDSLRKKQNVSLSGYLHGCSSETSAPDLPYSLSMLLDLVADENGSVVLGVAGKSYRDMLMSWACRLRRLRVTNFLVCALDHETYEFSILQGLPVFRDPLSPTNVSFDDCHFGTKCFQQVTKVKSRIVLEILRLGYNVLLSDVDVYWFGNPMPLLYSLGLATFGAQSDEYNETGPINLPRRLNSGFYFARSDNATIIAMEMIVKHAASSGLSEQPSFYDVLCGENGTNRIGEDRCLEPNTNLTVVFLDRDLFPNGAYKGLWEKRDVRATCKELGCFIIHNNWINKRRKKVHRQMVSGLWDYDPTSRQCLQEWSAQNDGAIPFV

SEQ ID NO: 60295 - protein, 183 aa, Zea mays
  Coding DNA Sequence Number=SeqID_18516
MNCKEYAKITDDAHALCCLCCTVRSLSNCFAPNRASGRRGSWIRGTTAGTVRQARVATGDGIDGGARAREERRWSAVQRGKLDSAAPATASTEGPGLGKRGDGDGAQSDVVRQARFGVDNGIDGGGRAGEERRWSAVETWRRRTIGTSPTYASSSPRVISGIGGSHARSEEAMRCGVCAGESG

SEQ ID NO: 60296 - protein, 297 aa, Zea mays
  Coding DNA Sequence Number=SeqID_18517
  Gene Ontology: Mol. function=prolyl aminopeptidase activity; Cellular component=cytoplasm; Biological process=aromatic compound metabolic process
  Homolog annotation: Hit_ID=P93732; Match level="QueryCoverage=96%, HitCoverage=95%, E-value=1e-117, Identity=66%"; Hit description =Proline iminopeptidase
  Pfam annotation: Domain name=Abhydrolase_1; Domain location=65-289; Score=60.1; E_value=7.1e-15; Accession=PF00561.10; Description =alphabeta hydrolase fold
MDPSSEPLYAQVEPYDSGFLKVSDVHTIYYEQSGNPQGHAAVFLHGGPGAGTSPGNRRFFDPQFYRIVLFDQRGAGRSTPHACLEQNTTWDLVADIEKLREHLGIPEWQAIIFFFNNTDYSLFSAGTQCCQTIQEHPDKVTGLVLRGIFLLRKKEFDWFYEGGAAAIFPDAWEPFRDFIPEDERNCFVDAYNKRLTSSDPIVQAFARIENHYFVNKGFLPSDSFLLDNVDKIRHIKGFIVQGRYDVCCPMMSAWDLHKAWPEAEFKVVADAGHSANEVGIAAELRSATDKLRDLLRK

SEQ ID NO: 60297 - protein, 70 aa, Zea mays
  Coding DNA Sequence Number=SeqID_18518
  Subcellular localization annotation: CTP_CleavageSite=11; ConfidenceScore=5.23e-01
MAVTAAKATVTAAARVAAATAARAAAGRFGGSGRVIIGDVGAFRSDSQAITGRVGVLEITTERLLVMSAF

SEQ ID NO: 60298 - protein, 64 aa, Zea mays
  Coding DNA Sequence Number=SeqID_18519
MNAVVTSHLPVCLYSAAAFENKSPTVPKSLILPQATPVLCDDPGLRMAILATLPTLDESSVVVR

SEQ ID NO: 60299 - protein, 68 aa, Zea mays
  Coding DNA Sequence Number=SeqID_18520
MEKPPLCLRPASDLWSSSVAGTQGSRLCIGRAGPNIGAASIAHRSKWFAAVPPCVVARAYDCAIRDNS

SEQ ID NO: 60300 - protein, 65 aa, Zea mays
  Coding DNA Sequence Number=SeqID_18521
MADFMLTFSSIQKLDGMKKAFLQEEFKGQGFHVTVYNNYVDNPGLRVLARWKPGIEGGKVTMKHK

SEQ ID NO: 60301 - protein, 131 aa, Zea mays
  Coding DNA Sequence Number=SeqID_18522
MFKPVRREAKSVALMFLECTKVVSRIHILERGKEVAEAQVVSFDELMSGWMKKEEKLLASLKGWRFQGSGALRSPYRWEVRPRRSLGSQGPNPSLSKGHQIEVSAAFDHPEELQVIGSWEVALGLKDYDHP

SEQ ID NO: 60302 - protein, 130 aa, Zea mays
  Coding DNA Sequence Number=SeqID_18523
  Subcellular localization annotation: CTP_CleavageSite=37; ConfidenceScore=5.08e-01
MHVGSSASPGSTCGPLERPKFLSDDPTTPRSRYPTLRPGAATTLGLVRFYPNPYGLRGIDGVSIPTSGFTQNKAPNCTELLTGAACAPRSHTLGMGSITIATGSFKVTIDRLAMSLWPSSSPWSEYESTI

SEQ ID NO: 60303 - protein, 225 aa, Zea mays
  Coding DNA Sequence Number=SeqID_18524
MGCCNGEGLTDPLAEGFCFKLLGPTCEALEARGELLRHMRRRCPKSFVYDIHRVRQDVDAGDHLRAFKEHKGHRLRFPSHWLEHAIRQMERMGVESLVDGALPSPTTCARLTTSFWRMTENYEGRSAVMLGVCFVAKGPVLILTGPSATKQTPNKRLLGLVAHLIQLAAKFLKIDNLSESVQNESGAPSTIKAQRLSSGPPLQGMEAGSPRMMIVAKAGPPLPLV

SEQ ID NO: 60304 - protein, 147 aa, Zea mays
  Coding DNA Sequence Number=SeqID_18525
MVMLPMPSVWLLGAQAAPGGSMEREGGVWAIYSELCAPVLNRILLASGADGYEGSLGERQRMTLKNGLGHQGQSMHARVHFWAEWGFGPGERTHDLSRLGLSAEAIYMAYNVTSHIETQALEARARCGIAVVMTAPGLHAAHGAHHK

SEQ ID NO: 60305 - protein, 386 aa, Zea mays
  Coding DNA Sequence Number=SeqID_18526
  Homolog annotation: Hit_ID=Q10N63; Match level="QueryCoverage=98%, HitCoverage=55%, E-value=6e-72, Identity=43%"; Hit description =Expressed protein
MSSWLRSAVSRAVEAGGRSGVARAVKGYADTVAHHAGQAVADILHDRMGVQNYKSFKKTVARLEEAAVSCRGGERVELLKRWLGALQDVDAENGSSDLKVSEANDPSGEMDTLKAQTVLFYDADIDGAPMNFCDVFLYSQALEGYCQLLIIFSYNKILEPPSEEEVSLLLEIFSICLTGGKEVNKEIMSNVQDLAKAFSEYKDEVLVKREELLEYAQSIISGLKRNADIVRIDAETLELQRKLDEKQKSRGQSPEYQDKTSDKIAAANLEVFKEALGELRLCSRVEELLLKKKSITLGDSLEIHSQKASLTNYQVDKLKVLADSLACSSSKAEQRILEHRRQKEDALNFRVKKENEVSVSEKELLDEITELEKQRDELEAQLKKEY

SEQ ID NO: 60306 - protein, 107 aa, Zea mays
  Coding DNA Sequence Number=SeqID_18527
  Homolog annotation: Hit_ID=Q2QN57; Match level="QueryCoverage=90%, HitCoverage=17%, E-value=2e-07, Identity=40%"; Hit description =Expressed protein
MTIFSLPVSTEKNRHCKEAKAYADDPLEHPATVLQAQPPHKLTFRRGKVLNPEEISGSTPKRLRFMPSIAVADATSRSKCDRITSRRSGDDAVARDVGVEVIVLRWW

SEQ ID NO: 60307 - protein, 108 aa, Zea mays
  Coding DNA Sequence Number=SeqID_18528
MSNICLGMLLGLPHLGMTGSGDIYRSQHKSSRWRKVDALCGTLDSPVRLAVGLTPQVTVGAARFYTRQSGGFSPPVPPRTSRPSAPDSTTCDTRQSIVATHVFVLDFA

SEQ ID NO: 60308 - protein, 72 aa, Zea mays
  Coding DNA Sequence Number=SeqID_18529
KLKKIPGAVHLAAGDPRAWIRVGEVIRAHWCPDNTSGLAGATAPPSMVGDLTLQRNRKGRGLNGDVSETEKQ

SEQ ID NO: 60309 - protein, 66 aa, Zea mays
  Coding DNA Sequence Number=SeqID_18530
MEVVYLCSVSNNFTSHQVLGLSSTISMLQATTGKTHDWKDIFPDLIYMQTTTMDRKAQISQPFLKY

SEQ ID NO: 60310 - protein, 153 aa, Zea mays
  Coding DNA Sequence Number=SeqID_18531
  Subcellular localization annotation: CTP_CleavageSite=38; ConfidenceScore=5.47e-01
MGHASLYNLMASVASSASARSPETRQTRSPGRLGSAGRARMGPDDQRRKNDEGKNVQTWARPRQGRGREVMEAEGADGSGPWDSKRGFANGWSTLTERAHRAARENGRESEGIGADRSAPLSSERERGREGARGLALTDGVRLSGAEGVRVRG

SEQ ID NO: 60311 - protein, 106 aa, Zea mays
  Coding DNA Sequence Number=SeqID_18532
  Subcellular localization annotation: CTP_CleavageSite=15; ConfidenceScore=5.29e-01
MAASPPSPSLPVWCPADALSHGRPPPLAASQQPHLLCPPSPARPSTMDTASPGTRPLHAIALLPAASPISTGALIFSHPAWPASSPFSTDNSISFLKSLGSPDLGA

SEQ ID NO: 60312 - protein, 70 aa, Zea mays
  Coding DNA Sequence Number=SeqID_18533
MAHRSFPGLPEATSQLFYSLCPWIHGLFPAIEFAVAPSSPLPNSGDPGATLTHACLNSDPCDLTDLALDF

SEQ ID NO: 60313 - protein, 35 aa, Zea mays
  Coding DNA Sequence Number=SeqID_18534
MTSSSHTLDLVDGGVALSGDSQRERFGRRGSYDVA

SEQ ID NO: 60314 - protein, 661 aa, Zea mays
  Coding DNA Sequence Number=SeqID_18535
  Gene Ontology: Mol. function=RNA-directed DNA polymerase activity; Cellular component=mitochondrion; Biological process=RNA-dependent DNA replication
  Homolog annotation: Hit_ID=UPI00004C1731; Match level="QueryCoverage =93%, HitCoverage=53%, E-value=0.0, Identity=80%"; Hit description =UPI00004C1731 related cluster
  Pfam annotation: Domain name=RnaseH; Domain location=214-327; Score= -31.9; E_value=0.054; Accession=PF00075.14; Description=RNase H
  Pfam annotation: Domain name=rve; Domain location=374-532; Score =93.2; E_value=8.1e-25; Accession=PF00665.16; Description=Integrase core domain
  Pfam module annotation: Pfam domain module=RnaseH::rve; Domain location=214-327::374-532
MKESDQLATSFVTPFGMYCYVTMPFGLSNAGATYQRCMNHVFGEHIGRTVEAYVDDIVVKTRKASDLLSDLEVVSAAIVVERREEGHALPVQRPVYFISEVLSETKIRYPQVQKLLYAVILTRRKLRHYFESHPVTVVSSFPLGEIIQCREASGRIAKWVVEIMGETISFAPRKAIKSQVLADFVAEWVDTQLPTVPIQLELWTMFFNGPLMKTGADAGLLFISPLGKHLRYVLRLHFPASNNVAKYEALVNGLRIAIELGIRRLDARGDSQLVIDQVMKNSHCRDPKMEAYCDEVWRLEDKFYGLELNHIARRYNETADELAKIASGRTTVPPDVFSRDLHQPSVKIDDTPEPEAPSTQPEVPSAQSEAPSAQSEAPSARPEAPSVQPEKAPGGYTHLLVAIDKFSKWIEVRPLNSIRSEQAVAFFTYIIHHFGVPNSIITDNGTQFTGRKFLDFCEDHHIRVDWAAVAHPMTNGQVERANDMILQGLKPRIYNDLNKFGKRWMKELPSVVWSLRTTPSRATGFTPFFLVYGAEAILPTDLEYGSPRTRAYADQSNQTSREDSLDQLEEARDMALLHSARYQQSLRRYHARGVWSRDLQVGDLVLRLRQDARGRHKLTPPWEGPFVIAKVLKPGMYKLTNSQGEVYSNAWNIQQLRRFYP

SEQ ID NO: 60315 - protein, 96 aa, Zea mays
  Coding DNA Sequence Number=SeqID_18536
MVGSVAEEVAAAEWVIMQWDSTVSATSSVDGDDQMLLNGAADHAKQSSFSGRWTTSATWRCHRGTSLAARVVTRRPLDRGTRWPQLALDGQPWGRL

SEQ ID NO: 60316 - protein, 56 aa, Zea mays
  Coding DNA Sequence Number=SeqID_18537
MGASGGIFSFYSRASLDHGGIFGGVCCFGLRNLDEGRRDWGLISAEAGGRVFYSNQ

SEQ ID NO: 60317 - protein, 155 aa, Zea mays
  Coding DNA Sequence Number=SeqID_18538
MAKRSHGICGGAGVEQKSVNAKGRRGTQRRKGAVDWKRMRKGGVHSPRYADRAIIFHYSKIIRQQQTKKNPPDPPPVGIDQVVAAQMMVLQQMAEVVNEMQNQIREERQEIRQDRLEMQQAIRQARLERQQQQRPLPPPPAPPNYIYILLFIRPK

SEQ ID NO: 60318 - protein, 73 aa, Zea mays
  Coding DNA Sequence Number=SeqID_18539
MEVFFNLTAVRRTGGVVECSTTASTTEMKARRRGSTKEEQGNSKVCSLVAGMSWKAPTTATSMVDAAMLRIFL

SEQ ID NO: 60319 - protein, 76 aa, Zea mays
  Coding DNA Sequence Number=SeqID_18540
MRLGNRIRRSSYPGTKLQKWEKLSTSEYTKKDGTLANVIADKLKTESRSKSSKRAGTELTRGAGLTYLHTRREKER

SEQ ID NO: 60320 - protein, 207 aa, Zea mays
  Coding DNA Sequence Number=SeqID_18541
  Homolog annotation: Hit_ID=Q8S1S0; Match level="QueryCoverage=29%, HitCoverage=13%, E-value=1e-21, Identity=82%"; Hit description =Putative lung seven transmembrane receptor 1
MGCYRKSSKTDGKAARTLAKLTLFHQFYVVMVGYLYFTRIIVSALRTITSYKYRWVSIAAEEMSTMAFYMFTFYMFWLRIGTGTRLGLVGSGKGSGLVSSDLGAVSSDQGIFSVFVWDPGGHAKNSLGTSYISRSGECQQRPEIRTPTILPSVKMENGPLKGLSLRRSSKKEELSYAATSQKRDNITVYGPEWGCVIRAVGPSMWSL

SEQ ID NO: 60321 - protein, 105 aa, Zea mays
  Coding DNA Sequence Number=SeqID_18542
METRLSQPTTYSVADSIFAFPSNDELMLGDMDVLMIRNLKDDHPGLSKGQYVKEEKLGHSQQEKVKSNLTSSPPRSLGPVCTKTDAQDASELRLGWDFTDGKLRR

SEQ ID NO: 60322 - protein, 121 aa, Zea mays
  Coding DNA Sequence Number=SeqID_18543
MSQSSRRDVPVIVITKQKQRQEAKGVNPTTTLKGGGGTQVVKRLTPLLQGSYQHCSCQTVADLIAQKVDVIVKEYLFYSRERWSFDKKDQTEPKTNINQQQYLDQGHKLNTTGSETKLCKG

SEQ ID NO: 60323 - protein, 93 aa, Zea mays
  Coding DNA Sequence Number=SeqID_18544
MDSKGKRKVSDEKERIPIDVKPKGEKIVDSGSGKRKESNKKKHKKKIIYYKRAMILLPHQRSMTHLLANLKLKRTKVSSHVVPSKTPCDSEWV

SEQ ID NO: 60324 - protein, 475 aa, Zea mays
  Coding DNA Sequence Number=SeqID_18545
  Gene Ontology: Mol. function=transferase activity, transferring glycosyl groups; Cellular component=chloroplast; Biological process =biosynthetic process
  Homolog annotation: Hit_ID=Q10Q06; Match level="QueryCoverage=99%, HitCoverage=99%, E-value=0.0, Identity=85%"; Hit description =Digalactosyldiacylglycerol synthase 2, putative, expressed
  Pfam annotation: Domain name=Glycos_transf_1; Domain location=218 -378; Score=1.8; E_value=0.0013; Accession=PF00534.10; Description =Glycosyl transferases group 1
MSMKRHFAIFTTASLPWMTGTSINPLFRAAYLAKDGDKDVTLVIPWLCLRDQELVYPNNIVFDSPSEQESYVRHWIEERIDFRPSFSIKFYPGKFSKEMRSILPVGDITECIPDEVADVAVLEEPEHLNWYHHGRRWKNKFRRVIGIVHTNYLAYVRREKNGQVIACFLKYANTWVTRIYCHKIIRLSGATQNLPRSVICNVHGVNPKFLEVGKLKLRQLQNGEKAFTKGAYYIGKMVWSKGYRELLDLLSKYQSKLVGLEVDLYGSGEDSDEVCESAKRLSLSVNVHPGRDHADPLFHEYKVFINPSTTDVVCTTTAEALAMGKIVICANHPSNEFFKQFPNCRVYDNEDEFVQLTLNALSEQPAPLTDTQRYELSWDAATERFIEASDINPHVPESRAHQNSRALLPAFLRTRKLKQNLEDASVYLHQALSGLEVTRCAFGAVPKTLQPDEHLCKDLGLAPPAKKRRLKIKKT

SEQ ID NO: 60325 - protein, 70 aa, Zea mays
  Coding DNA Sequence Number=SeqID_18546
MGLSIVARAYCWSIERAGLGGSNDSEETSSEEVEDSYDSEEWSGGEGDEDDDSSGDDDGNGGVDGDDKGG

SEQ ID NO: 60326 - protein, 197 aa, Zea mays
  Coding DNA Sequence Number=SeqID_18547
LIRELMAGLGLPSAEEKGTSRAERQSRAGGSRGSRQSRAGASRAERQSEREGAELSCLCYWTRHLLQDSQDSRAPGLTIPLACSRKVEKGTPQLNVVHRRRPQQEGSHDRDERGKEQVRGSRLTEPAGQFLQWPEPRRSDQSCLCYFEASASRRERHQHQRRLEGWSGLDLATQRGLELAAARACGMGLDRSIGKGS

SEQ ID NO: 60327 - protein, 120 aa, Zea mays
  Coding DNA Sequence Number=SeqID_18548
  Homolog annotation: Hit_ID=Q53KA2; Match level="QueryCoverage=23%, HitCoverage=2%, E-value=2e-07, Identity=72%"; Hit description=ABC transporter-like protein
MARLFICQTLIDEFLFQSELLAAEINYMAKRENELQNDHMNLRTKDPRTCPIGHRPEDQPAGHQEHALQAVQVPVLLPRILLPRTTKFLAILNRLIYRTAASKNNKEQGMSYWASDLMIH

SEQ ID NO: 60328 - protein, 102 aa, Zea mays
  Coding DNA Sequence Number=SeqID_18549
MKLPERGIGLYLTGDAGSRSPDFTRAPAYVDRVPQKGLPFKLILGSKLRKIEKEKYCNLADGEYILVPEQGVAQEVAPDPEPEPAIEDLPAPALEGKPRFYA

SEQ ID NO: 60329 - protein, 74 aa, Zea mays
  Coding DNA Sequence Number=SeqID_18550
MGKPVPSLLMLLLSRVTALVTTITGMGDHVSGRLRGKVRGQVHSDNASPWIVVHRPSSFRYKNGYNQFLTSREC

SEQ ID NO: 60330 - protein, 63 aa, Zea mays
  Coding DNA Sequence Number=SeqID_18551
MGKPVPSLLMLLLSRVTVLVPTITRMGDHVSGHVRGKVCGQVHSEMFKGFLEKPVYTEDPGFS

SEQ ID NO: 60331 - protein, 82 aa, Zea mays
  Coding DNA Sequence Number=SeqID_18552
  Subcellular localization annotation: CTP_CleavageSite=31; ConfidenceScore=5.01e-01
MAVGRLLSHGAPDSPVRHRTLSDDRCARSSRCSTVAPDSPVNYSGAPSDFPEGEEFSVEYPGALDTVRWCTGQSGAPDQGAL

SEQ ID NO: 60332 - protein, 47 aa, Zea mays
  Coding DNA Sequence Number=SeqID_18553
MKKSLAFYLRTWSREHGYCPIPRPYGKHRTEGGNLAREHSMIYGLPL

SEQ ID NO: 60333 - protein, 922 aa, Zea mays
  Coding DNA Sequence Number=SeqID_18554
  Gene Ontology: Mol. function=ubiquitin-protein ligase activity; Cellular component=ubiquitin ligase complex; Biological process =protein ubiquitination
  Homolog annotation: Hit_ID=Q6Z335; Match level="QueryCoverage=99%, HitCoverage=97%, E-value=0.0, Identity=66%"; Hit description=MAP kinase-like
  Pfam annotation: Domain name=Arm; Domain location=259-299; Score =12.6; E_value=0.33; Accession=PF00514.13; Description=Armadillobeta -catenin-like repeat
  Pfam annotation: Domain name=Arm; Domain location=300-340; Score=8.6; E_value=1; Accession=PF00514.13; Description=Armadillobeta-catenin -like repeat
  Pfam annotation: Domain name=Arm; Domain location=385-429; Score =10.0; E_value=0.69; Accession=PF00514.13; Description=Armadillobeta -catenin-like repeat
  Pfam annotation: Domain name=Arm; Domain location=430-469; Score=2.2; E_value=6.6; Accession=PF00514.13; Description=Armadillobeta-catenin -like repeat
  Pfam annotation: Domain name=Arm; Domain location=470-515; Score=7.0; E_value=1.6; Accession=PF00514.13; Description=Armadillobeta-catenin -like repeat
  Pfam annotation: Domain name=Arm; Domain location=779-819; Score =26.1; E_value=0.00013; Accession=PF00514.13; Description =Armadillobeta-catenin-like repeat
  Pfam annotation: Domain name=HEAT; Domain location=264-301; Score =0.3; E_value=39; Accession=PF02985.12; Description=HEAT repeat
  Pfam annotation: Domain name=HEAT; Domain location=439-471; Score =8.8; E_value=3.7; Accession=PF02985.12; Description=HEAT repeat
  Pfam annotation: Domain name=HEAT; Domain location=789-821; Score =11.7; E_value=1.6; Accession=PF02985.12; Description=HEAT repeat
  Pfam annotation: Domain name=U-box; Domain location=151-227; Score =43.6; E_value=6.8e-10; Accession=PF04564.6; Description=U-box domain
  Pfam module annotation: Pfam domain module=Arm::Arm::Arm::Arm::Arm::Ar m::HEAT::HEAT::HEAT::U-box; Domain location=259-299::300-340::385 -429::430-469::470-515::779-819::264-301::439-471::789-821::151-2
MERQTARRTQTNVTQMMESIFASVSLAKDLSARCKSRALQVTDDEIQSTAQDLENVLQNIYDDLCRIPASAFGSSAYMDVPIKSQPMRDCCKADIPINVMGNRPRTRSLRDNDTPRLVDFLKGMYHESHEFSGQMFNTLLEVTEYIEPLYDAFICALTNEIMTDPVMIESGVTCDRRAIEEYIERFADSSEPVYCPVTKMTMQSKTMVSNASLKCVIEEWTMRNEIMRVRIARTALSLSTTDTMVLEAIHELKLLAKLRVKNRELMHKIGVTKFLARLLDNHNDQIQFEALKLLCLLAQDEEGKDIIGKTKAIARTIKLLSSNSTDERHAAISFLLELSESQLLLDNIGSTPGSILILTTMKLNSSDDPIAAARAGAVLKNLEKCPKNIKYMAESGYLEPLQSHLVEGYKTGSEEIQMEMVGYLCELVQEQELTIDINRSTSEILVKMVRGCNPMVRKAALNVLAQLSLHRPNNKMLVDTGAVPVMIEELFIRKVDDEPVNSMANAATVLANIVESGIDPDTTVVNKEGHVLTSKYSIYNFVHMLKCFMPDDLNLSVLRILLALTALAKPLDTVVSVIRENYRGHSIIELMGSPTEVLSLAATRLLITLSPHIGHTIVERLCKTQGQPHKLVKSISHAGRITERQATLATLLAKLPYRNTSLNIALVKDGAVPAMLRAIKEVENGAGRSSRQAVPYMEGLVGTLVRLTATLFSPEVLKAAMDHNLASVLTELLDGAAGSDEFKKKNTLLKLLKDSKAHSNKKTSLHQVCVCPVHRGVCSPAATFCLLEAGALEGLLGCLENDNIRVVEAALRALCTLLDERVDVEKSVAALAELDVARRVLAALRQHRQNVLWQKCFCVVEKLLDHGDDRCVREVTGDRMLPTALVSAFHRGDESTKQTAESILRRLHKMPDYSATYVSMEF

SEQ ID NO: 60334 - protein, 98 aa, Zea mays
  Coding DNA Sequence Number=SeqID_18555
  Gene Ontology: Mol. function=drug transporter activity; Cellular component=membrane; Biological process=multidrug transport
  Homolog annotation: Hit_ID=Q651I6; Match level="QueryCoverage=90%, HitCoverage=16%, E-value=1e-16, Identity=60%"; Hit description =Putative ripening regulated protein
MANSGVTALGHVLVCWALVFEVGMGSKGAVLSSAISYFVNLTMLMLALYGRLSSVQRVREDMDWILHGGLQRPSPVHQALHPDPVDDDGLVRQLAPTS

SEQ ID NO: 60335 - protein, 370 aa, Zea mays
  Coding DNA Sequence Number=SeqID_18556
MAVGDVVFSPTFILQGFLKRYVFSFLAKLHLWMKEQFPFFFSLWLMQDDMMHDDAWIDMMIEKYYNKTLHPLRNVLGVSSPLLGGILSLHPLRNDLGASSPLLDDILALHSLRNDFGESSPLLGGILSSASISVLCLTAHLGLPSWCFWVVSTELWDANEMIMAGSPLALYTRPWGAFRTHVDHTLPTYLLISSKQLLLFRGKSGASMLSYPRQFRMSGTRTNRSHRFRKSQRIQARKKRQEGALPGRREAQAPPSPPSEDFGDSEYSEEEFSSENDCTHAPASPVVLSDDLDDSMGLSAVERAYIRSVERVGLGGSDDSEEEAEDSSDSKEGSDGGSSDDSSGGGEGRGLAFIRDSEVGPRSGLCSKGL

SEQ ID NO: 60336 - protein, 59 aa, Zea mays
  Coding DNA Sequence Number=SeqID_18557
MKSLSPKKKSLMKMRMRMRWMKPACVAACCPFMFVISKGSYGADQYLMDGRRVRPQIST

SEQ ID NO: 60337 - protein, 123 aa, Zea mays
  Coding DNA Sequence Number=SeqID_18558
  Subcellular localization annotation: CTP_CleavageSite=57; ConfidenceScore=5.14e-01
MGIVSSPYPLPAGRGYPRACPITRHKDIFNNSLAAGSRGPGAGSTSSGSRDGRQPLTAESRSAAAGMSQADGIWYAGCWKSQITGSRESQIAGSREQELREQGRSPGGLRARTGSRCSLAVDT

SEQ ID NO: 60338 - protein, 176 aa, Zea mays
  Coding DNA Sequence Number=SeqID_18559
MASGRAATSSSILVNAAGTSKTLSASLWWDSFVVLSDDLDRATAGPSVPDALAKRIKSHHAWLRGSVSMFGKPNDASRSALEVGEVAVGERRLTVKPELKEAALRASKCLNLDEVQSYILVKRSSEVSPTIRDADAEEFLHLYRAWVIVLLAVRTPRDIRHTGAASTGTWEKRRRQ

SEQ ID NO: 60339 - protein, 99 aa, Zea mays
  Coding DNA Sequence Number=SeqID_18560
MVVVAVSLNILLELEKTLTNLREEGIAPPPFELPLRRAEESTSRSVVHHLEGCGVKRHVEQRWNLVLKRSSTSAILKVTPHVTGEDWAMVATDGGGEDV

SEQ ID NO: 60340 - protein, 66 aa, Zea mays
  Coding DNA Sequence Number=SeqID_18561
MGSHAVLEDVAVTPPECHADDLKVAQEGRKVRRRVALGMTSRVTEGVTTVVVEMDENVIALYLDIM

SEQ ID NO: 60341 - protein, 116 aa, Zea mays
  Coding DNA Sequence Number=SeqID_18562
MAGKGEWRAGDDREGGIRAGPGRAQGGAEEMGARDPASQGTGMTDELKPGARDGAAWKQSRHGSSDRARYQREREREHWQRKREELEARRAGRWREGDELGWRGHRKEDKDGVRRR

SEQ ID NO: 60342 - protein, 81 aa, Zea mays
  Coding DNA Sequence Number=SeqID_18563
MSGVSVPVFYRTNTNVSRPKVQKGQYSTVEYSPIEKKIDVVGHDRMRPDEVKVSDELVPRSATQRIGPRWQWRDTARAVLG

SEQ ID NO: 60343 - protein, 81 aa, Zea mays
  Coding DNA Sequence Number=SeqID_18564
MAHRTVSGAPVRYRVKLATLGKMEARSAIIHQTVECATGLSDHAKREIMTGEKAASSGRTLSREFGNKHKEDSLHKVASER

SEQ ID NO: 60344 - protein, 65 aa, Zea mays
  Coding DNA Sequence Number=SeqID_18565
MMLQSGRDVFENRTGWWIHHGHDGFNIRKDVPLQVKKQQTFVASVRRWYRMKNTKTRAAGGKALR

SEQ ID NO: 60345 - protein, 221 aa, Zea mays
  Coding DNA Sequence Number=SeqID_18566
  Gene Ontology: Mol. function=binding; Cellular component=thylakoid; Biological process=photosynthesis
  Homolog annotation: Hit_ID=Q75M28; Match level="QueryCoverage=95%, HitCoverage=41%, E-value=1e-44, Identity=51%"; Hit description =Putative ankyrin protein
  Pfam annotation: Domain name=TPR_1; Domain location=112-145; Score =20.8; E_value=0.0049; Accession=PF00515.18; Description =Tetratricopeptide repeat
  Pfam annotation: Domain name=TPR_1; Domain location=146-179; Score =11.6; E_value=0.22; Accession=PF00515.18; Description=Tetratricopepti de repeat
  Pfam annotation: Domain name=TPR_1; Domain location=180-213; Score =8.1; E_value=0.58; Accession=PF00515.18; Description=Tetratricopeptid e repeat
  Pfam annotation: Domain name=TPR_2; Domain location=112-145; Score =24.0; E_value=0.00053; Accession=PF07719.7; Description =Tetratricopeptide repeat
  Pfam annotation: Domain name=TPR_2; Domain location=146-179; Score =12.8; E_value=1.1; Accession=PF07719.7; Description=Tetratricopeptide repeat
  Pfam annotation: Domain name=TPR_2; Domain location=180-213; Score =13.2; E_value=0.96; Accession=PF07719.7; Description=Tetratricopeptid e repeat
  Pfam module annotation: Pfam domain module=TPR_1::TPR_1::TPR_1::TPR _2::TPR_2::TPR_2; Domain location=112-145::146-179::180-213::112 -145::146-179::180-213
MSTPHIDCLLDGLKPIQVAALRNNREFLELLLALTIPFLSVSNWSFDGITKYMLSKAAVGESQVKEATSLNSASLAGPQSAGSQVKEATSLNSASLAGPQSAGVSSSAKGDSMEANLRGYDAYKNENYIGAVDAYTQAIDLDPSNATLWSNKSLCWLLLGMAETALEDAKQSRTLRPDSGIACYREGAALHELQRFFEAAIAFYEGANLKPENQEYLSAFM

SEQ ID NO: 60346 - protein, 88 aa, Zea mays
  Coding DNA Sequence Number=SeqID_18567
  Gene Ontology: Mol. function=NADPH-hemoprotein reductase activity; Biological process=electron transport
  Homolog annotation: Hit_ID=Q9AU06; Match level="QueryCoverage=72%, HitCoverage=9%, E-value=9e-17, Identity=68%"; Hit description=NADPH -cytochrome P450 oxydoreductase isoform 3
MGTESLLIMHQDSTNGGREGSLLKDLKYCVFGLGNTQYEHFNKVAKMVHELLQEQGGKRLVPVGLALETMMSASRISPHGQMVMSSQI

SEQ ID NO: 60347 - protein, 125 aa, Zea mays
  Coding DNA Sequence Number=SeqID_18568
MIHYARAITNASLSQVSQYWDPLLGAIACGAEVPVALASGADVAPSSAPQILAPSQDIGGNPPSLCSLDHARRRRALRARPTPAPPSPPAAPAAPTPAAPSVPHAPTPAAPADPPMLAANRRSPA

SEQ ID NO: 60348 - protein, 117 aa, Zea mays
  Coding DNA Sequence Number=SeqID_18569
  Homolog annotation: Hit_ID=Q2QNL8; Match level="QueryCoverage=83%, HitCoverage=17%, E-value=1e-25, Identity=61%"; Hit description=PAPA -1-like conserved region family protein, expressed
MVCCKEHQRIYTEWFALADSKNSDSEPDFEETEQKTINEPHVNVRSEPLTTRRCALQPWMDGSSSSNSTVDLPDGVPPAPSRSKNDRLSKEEMIATMDEVVQGRKMQVEKATKESED

SEQ ID NO: 60349 - protein, 511 aa, Zea mays
  Coding DNA Sequence Number=SeqID_18570
  Gene Ontology: Mol. function=hydrolase activity, acting on glycosyl bonds; Cellular component=membrane; Biological process=metabolic process
  Homolog annotation: Hit_ID=Q10MC0; Match level="QueryCoverage=96%, HitCoverage=99%, E-value=1e-162, Identity=75%"; Hit description=Beta- fructofuranosidase, putative, expressed
  Pfam annotation: Domain name=Invertase_neut; Domain location=131-477; Score=719.7; E_value=2e-213; Accession=PF04853.3; Description=Plant neutral invertase
  Subcellular localization annotation: CTP_CleavageSite=72; ConfidenceScore=5.59e-01
MAAAAISHLRRGAQHHAVLCISLSRRRFSSSAVAAASPLAAAARRLLSTTADSATASTSGEHYKPPPFDPFRAATLSPSAPPLESARLEDEPPSSPPPQDEAAASVAAHEQATLACQELELEGLKAGVEAVKSREESPEEKEAWWLLSRAVVNYCGSAVGTVAANDPSTSQMLNYDQVFIRDFVPSAIAFLLKGESDIVKNFLLHTLQLQALFYSALRCAREMIGVTDGSKNLIRAINNRLSALSFHIREYYWVDMKKINEIYRYKTEEYSHDAINKFNIYPEQIPSWLADWIPVKGGYLIGNLQPAHMDFRFFSLGNLWAIVSSLATQRQAEGILNLIEAKWDDIVANMPLKICYPALEYEEWRIITGSDPKNTPWSYHNGGSWPTLLWQFTLACIKMGRRDLARRAVEVAEKRLSDDKWPEYYDTRTGRFIGKQSRLYQTWSIAGYLSSKMLLDCPEMASILVCDEDFELLEGCACSLNKNARTKCSRRAAKSQTACSVQRTGPRYVAE

SEQ ID NO: 60350 - protein, 60 aa, Zea mays
  Coding DNA Sequence Number=SeqID_18571
MGMRRGEWRRTGAVESSRRRGFTVRGRSSFTLQQVLGVFFSAKGPLSKNTFGKITTLENK

SEQ ID NO: 60351 - protein, 125 aa, Zea mays
  Coding DNA Sequence Number=SeqID_18572
VWAKALIDLLSVDSQRCSEPEIGPRSFGVPRGGCPPHTPGALRGGGLGIAHRSCTAAGWVSPVMAAPALPPALRCAPDTRSAFPRAQPHARGGGDEDDGYDYAYGNGEDEAVEGDFQEFQDYDEF

SEQ ID NO: 60352 - protein, 755 aa, Zea mays
  Coding DNA Sequence Number=SeqID_18573
  Gene Ontology: Mol. function=nucleic acid binding; Cellular component= cytoplasm; Biological process=DNA integration
  Homolog annotation: Hit_ID=Q9SDG8; Match level="QueryCoverage=97%, HitCoverage=84%, E-value=0.0, Identity=78%"; Hit description =Putative zwille protein
  Pfam annotation: Domain name=DUF1785; Domain location=161-213; Score =105.0; E_value=2.2e-28; Accession=PF08699.1; Description=Domain of unknown function (DUF1785)
  Pfam annotation: Domain name=PAZ; Domain location=214-345; Score =131.7; E_value=2e-36; Accession=PF02170.12; Description=PAZ domain
  Pfam annotation: Domain name=Piwi; Domain location=490-755; Score =281.0; E_value=2.3e-81; Accession=PF02171.8; Description=Piwi domain
  Pfam module annotation: Pfam domain module=DUF1785::PAZ::Piwi; Domain location=161-213::214-345::490-755
MARLMICLHHPLWLLVNLKYEDDTPVDRKGSGRKVIEKLQQTYAAELANKDFAYDGEKSLFTIGALPQVKMEFTVVDEDVSTGKTPANGSPGNDSPPGSDRKRVRRPYNTKTYKVELSFAAKIPMSAISQALRGQESEHTQEAIRVIDIILRQHSAKQGCLLVRQSFFHNNPSNFVDLGGGVVGCRGFHSSFRATQSGLSLNIDVSTTMIVKPGPVIDFLIANQKVNDPSMIDWAKAKRSLKNLRIKTSPANQEQKIVGLSDRPLPFTLKHKNGESEEITVFDYFVKNRGIKLEYSGDLPCINVGKPKRPTYFPVELCSLLPLQRYTKALSTLQRSSLVEKSRQKPQERMSVLSDVLQRSNYDAEPMLKACGITIARNFIEVDGRVLQPPKLKAGNGEDIFTRNGRWNFNNKKLIRASSVEKWAVVNFSARCNVRDLVRDLIKCGGMKGIMVDAPFAVFDENPSMRRSPAVRRVEDMFEQVKTKLPGAPKFLFIMPLTFTGPWKKKCLAEFGIVTQCVAPTRVNDQYLTNVLLKINAKLGGLNSLLQIETSPAIPLVSKVPTIILGMDVSHGSPGHSDIPSVAAVVSSREWPLISKYRASVRTQSPKMEMIDSLFKPRETDDDGLIRECLIDFYTSSGKRKPDQVIIFRCCGSSYPSIQYCVLVHINMKWNPKFTLIIAQKNHHTKFFIPGKPDNVPAGTVVDNKVCHPRNFDFYMCSHAGMIGTTRPTHYHILHDEIGFNPDDLQELVHSLSYV

SEQ ID NO: 60353 - protein, 136 aa, Zea mays
  Coding DNA Sequence Number=SeqID_18574
  Gene Ontology: Mol. function=ubiquitin-protein ligase activity; Cellular component=ubiquitin ligase complex; Biological process =protein ubiquitination
  Homolog annotation: Hit_ID=Q6ZC56; Match level="QueryCoverage=66%, HitCoverage=11%, E-value=7e-33, Identity=74%"; Hit description =Putative arm repeat-containing protein
MFNVKYLLHPLLDCCRLPTSRLFALPTYRGTVTAIRPLGRAGLMDNLSPATLLNSISCLGALTSDVSTARPKPIHKYCKNVYDISSIVTPLLEDLCKSPEEQLDEVLRDLDTAVNEASGLIGNWHQTTSKMYFVSA

SEQ ID NO: 60354 - protein, 251 aa, Zea mays
  Coding DNA Sequence Number=SeqID_18575
  Gene Ontology: Mol. function=metal ion binding
  Homolog annotation: Hit_ID=Q6ZC54; Match level="QueryCoverage=81%, HitCoverage=20%, E-value=3e-57, Identity=62%"; Hit description =Putative shoot gravitropism 2
MAGPWDTHASTSRAPAGPDGEAEGASPDSLRNTPSNIARLEDAIGALRGAPQREEELLAYWWREYAECSAGPRGSLVESDDSAYLYKVEEERVGVPVKGGLYEPAVLQVDLMRRHCFPVYWNGENRRVLRGHWFARKGGVDWIPVREDVSEQLELAYNCQQTTEHPVVVKTRSGIVGNFNLQAYLQQGLTFKEVHRICMLFLLERMILGKLGLVFDTGPKFGSNTIKLRRGYFCSESASTKPSQESHISFH

SEQ ID NO: 60355 - protein, 650 aa, Zea mays
  Coding DNA Sequence Number=SeqID_18576
  Gene Ontology: Mol. function=metal ion binding; Cellular component=ER- Golgi intermediate compartment; Biological process=Golgi organization and biogenesis
  Homolog annotation: Hit_ID=Q6ZC54; Match level="QueryCoverage=99%, HitCoverage=68%, E-value=0.0, Identity=65%"; Hit description =Putative shoot gravitropism 2
  Pfam annotation: Domain name=DDHD; Domain location=392-588; Score =61.7; E_value=2.4e-15; Accession=PF02862.8; Description=DDHD domain
MVDELRQKKEEEMDDYCSQVPVGHLVFMVHGIGQRLEKANLVDDVVDFRRVTANLAERYLTSYQRSTQRVLFIPCQWRKGLKLSGESTVEKLTLDGVKGLRVALGATVHDVLYYMSPIYCQHIIDSVSNQLNKLYMKFLKRNPGYSGKVSLYGHSLGSVLSYDILCHQESLWAPFPTEYLNMETSDRNQGAKSANEADLHDSGAKDHDTSSLGYSCADNENSVIDEDSTRTDVSCMDSILPSCVLEDSPNNHDTVVPRGAVVADQNGEEKKVENYQSVYAEEGTTSGVITKKAEGSSISRSAKEVHEEVLDKEKLMVLAKDKLILSLEEEVKCLKAKLDQLEQHNHLVTENTSGVEYHEGQNYNHALNSGKLFVAQESTNQSYSPQIKYTKLNFKVDTFFAVGSPLGVFLSLRNVRIGIGKGQDYWQDKNVIEEMPCCRQMFNIFHPFDPVAYRIEPLVCEDYLKKRPVIVPYHRGGKRIHVGVQEFREDISARSQAIARQLKSLKVSCSLLQVCVMLVNDLEVNAVNVKAVAAILALSRNDTEGENISASISICFGSSYIFTGLWMSCSNYWRDHDTALFILKHLYRDIPEDPPSDVIERMPIKLFYERDPVEEETPVTFSDHAAIKEFCRKVKAYSRKMEDDANCQAS

SEQ ID NO: 60356 - protein, 303 aa, Zea mays
  Coding DNA Sequence Number=SeqID_18577
  Gene Ontology: Mol. function=protein serine/threonine kinase activity; Biological process=protein amino acid phosphorylation
  Homolog annotation: Hit_ID=Q851M7; Match level="QueryCoverage=87%, HitCoverage=44%, E-value=2e-53, Identity=73%"; Hit description =Putative receptor-like protein kinase
  Pfam annotation: Domain name=B_lectin; Domain location=43-130; Score =4.8; E_value=0.00084; Accession=PF01453.15; Description=D-mannose binding lectin
  Subcellular localization annotation: CTP_CleavageSite=41; ConfidenceScore=5.77e-01
MPLGTLSPGNSATWTSPNSTFSLGFTASAPSPSLFVAAITYASGVPVWSAGNGAAVDSGSSLCFSSNGDLQPVNGSGAVLWSSNTGGQNVSAAAVQESGNLVLKDNPGAATPPRRSGRPWRTSASYNGTSPVCGCPSLNFQLSDPSKPRAGCTRKVELASCPGNSTTLELDNTQFLTYPPEITTEQFFVGITACRLNCLSGGCFFANPAPNFFNNCEPIVDINCLSGGSCVASTALSDGSGLCFLKVSSFVSGYQSAALPSTSFVKVFRGGTTAGDNFRGERRRGCLEISGSEENKQSSLVRF

SEQ ID NO: 60357 - protein, 91 aa, Zea mays
  Coding DNA Sequence Number=SeqID_18578
MSPTRMLAEGHLRVATGGGAPADGGIAVRHLPHHHPTKKVAGLYGSLLKYHVQVIRTFLHDMFVTLEVLLHYEFVNMTMLGGKLEKTIMKV

SEQ ID NO: 60358 - protein, 52 aa, Zea mays
  Coding DNA Sequence Number=SeqID_18579
MDGSKKSFEVSSAWEKVKEAKEPKARGCWSSRMAIEINSWRLGVLESNIDLK

SEQ ID NO: 60359 - protein, 942 aa, Zea mays
  Coding DNA Sequence Number=SeqID_18580
  Gene Ontology: Mol. function=nucleotide binding; Cellular component =membrane; Biological process=DNA replication
  Homolog annotation: Hit_ID=Q2QTM2; Match level="QueryCoverage=50%, HitCoverage=100%, E-value=1e-148, Identity=77%"; Hit description =Expressed protein
  Pfam annotation: Domain name=AAA; Domain location=318-508; Score=1.3; E_value=0.00017; Accession=PF00004.19; Description=ATPase family associated with various cellular activities (AAA)
  Pfam annotation: Domain name=ResIII; Domain location=296-439; Score= -37.3; E_value=0.062; Accession=PF04851.6; Description=Type III restriction enzyme, res subunit
  Pfam module annotation: Pfam domain module=AAA::ResIII; Domain location=318-508::296-439
MRRHSVSVDAPLSRTLVQLKRVRSLRDPATNSMSKYASPSDHMIWETASSNGVTPELGRSAHHHLVGEDEDVGAEPTTMGSERSFRGPSARTASYRKSSAVRIRGLNPPRSKQVHRVRQDGHRKSLDSNHSNHSSIRQLADNMVSNVDADKEEGEVNSYERPKLAMPDKSDEEVKMPGCSKSRSKSSAAMSRVGSPCMSASEARSVGSRRSTLGHGTEDTRLRSNDVVGSNFSGCGISYCWSGASKYRELYSDSDGPDQPLLSTDGIEAAFQGNVPYTETLRCLSQKFRPRSFSELIGLNVVAQSLLYSTCKGKVAPMYLFHGPRGTGKTSTARIFAAALNCVSLEEQRPCGFCKECVILFSGKSRDVKELDAAKMDRLGRVKALLKSASLVPYSSRFKVFIVDECHLLREDAWSAILKSLDEPYRHTVYIMITSDIESLPRASITHCQKFHFPKIKVADIVYRLERICIEEGLEFDHDGLYFIAAKSNGSLRDSEIMLDQLSLLGKKVTISLVHELVGSVSDDELIELLDLALSSDTTNTFSTNEPNPVAETNDMHAHSVTGYTDDWVSKVHSSANFCQACNSSKSNCSERHCRRLKLENIWRRAIGKCRSRSAKSFLRKEGFLSSVHVTEELAIAEVGFEHPDHLSRAEKMQSLIESSLQHVLGCNVEIRFKLVPCPVSKDARLKRQPFSFLNCSGRKQELSDSVVTDEDEAARGPGARETPLKGYTSSQQESPYTMRRVDSKPTTVHGCEDDARSTLTSSRSTADDLTRTCRSETGYPKGVREQGRSDGTQQEPDLQPNCFSRTLKLQKKLLSSGAAHTICLRVQPHNKMDFLPKKEFDTYFCAYEPYEQCPRSDSRATYSSRDDDLQPFSHTISYSHTVEQEFTLWLESTLLESPKTVHVMEERTSELGGTNRFCYEILPILPEAGDMDTTRSCGDKF

SEQ ID NO: 60360 - protein, 237 aa, Zea mays
  Coding DNA Sequence Number=SeqID_18581
  Gene Ontology: Mol. function=inositol or phosphatidylinositol phosphatase activity; Biological process=phospholipid dephosphorylati on
  Homolog annotation: Hit_ID=UPI000034F077; Match level="QueryCoverage =99%, HitCoverage=37%, E-value=7e-49, Identity=41%"; Hit description =phosphoprotein phosphatase
MWSHLANLRASGGSFHEHYNPFYDPVNHNGALLPPAAALAPTLWPQFFLRWTCPIESQGGDLESQWHAMNKKYADTMKAKDIAEWRAKDIKLKLESMKQDLQREKRINSTALAAARSAQRENAAIKKAIESIGCTIKFSTSENEDRTEVLSCSLGRGTDGRAQQDENGDFSVAIEDSLVSDAPADHFCESLCPFRTREGCRWPDAPCAQLGSQFVGLKANFDAFDRLSIHDCYFGPE

SEQ ID NO: 60361 - protein, 337 aa, Zea mays
  Coding DNA Sequence Number=SeqID_18582
  Gene Ontology: Mol. function=inositol or phosphatidylinositol phosphatase activity; Cellular component=cellular_component; Biological process=phospholipid dephosphorylation
  Homolog annotation: Hit_ID=Q0WP53; Match level="QueryCoverage=75%, HitCoverage=29%, E-value=3e-81, Identity=60%"; Hit description =Myotubularin-like protein
  Pfam annotation: Domain name=Chromo; Domain location=8-56; Score =11.3; E_value=0.044; Accession=PF00385.14; Description='chromo' (CHRromatin Organisation MOd
  Pfam annotation: Domain name=Myotub-related; Domain location=4-85; Score=-10.1; E_value=0.0003; Accession=PF06602.5; Description =Myotubularin-related
  Pfam module annotation: Pfam domain module=Chromo::Myotub-related; Domain location=8-56::4-85
MHHGVVAPELERAIRSRLAHGVLQVLVQWKGELATSTTREDIELFRVKKLYIIDARPRANAIANGAKGGGSESSSNYHKSEVLFLGIQNIHTMRESLSRLRDYVDAHGSISSNGSPSAVSVVGDRRNRGSTWGGGNLNSMTSFSSTLGEWLNHIQNILVGASWIAAQISEEAASVLVHCSDGWDRTTQLVSLACLLLDPYYRTFSGFQALVEKDWLAFGHPFAERMGVPTVAENGGSQYELLRQPSLGNLSSSPSRNTLGPPGPSSNSPVQSQTSNNTSPILLQWLDCISQLLRLYPSAFQFSSGKLISSMLSSIPHGLTTTNSLSPVYTHYRIAPC

SEQ ID NO: 60362 - protein, 276 aa, Zea mays
  Coding DNA Sequence Number=SeqID_18583
  Gene Ontology: Mol. function=nucleic acid binding; Cellular component= chloroplast; Biological process=mRNA processing
  Homolog annotation: Hit_ID=Q6ZJ16; Match level="QueryCoverage=89%, HitCoverage=86%, E-value=6e-80, Identity=55%"; Hit description =Putative nucleic acid-binding protein
  Pfam annotation: Domain name=RRM_1; Domain location=101-190; Score =59.1; E_value=1.5e-14; Accession=PF00076.12; Description=RNA recognition motif. (a.k.a. RRM, RBD, or
  Pfam annotation: Domain name=RRM_1; Domain location=213-276; Score =69.1; E_value=1.4e-17; Accession=PF00076.12; Description=RNA recognition motif. (a.k.a. RRM, RBD, or
  Pfam module annotation: Pfam domain module=RRM_1::RRM_1; Domain location=101-190::213-276
  Subcellular localization annotation: CTP_CleavageSite=44; ConfidenceScore=5.38e-01
MADTALPPSHKLLPTVSLPLLPSSTRAAPLLLCASRRLPPAPLVASSDAVETNIEWVDDDEEEAGEAFDEEGGDVEEEVLASGDEGEGEYAAVEPPEEAKVYVGNLPYDIESEGLAQLFDQAGVVEVAEVTVAVKKYSFSDICSIEVVIYNKETGQSRGFGFVTMSTIEEADKAIEMFNRYDISGRLLNVNRASPRGTRMERPPRQFAPAFRAYVGNLPWQADDSRLVQLFSEYGEVVNAAVVYDRETGRSRGFGFVTMVSKEELDDAISALDGQY

SEQ ID NO: 60363 - protein, 124 aa, Zea mays
  Coding DNA Sequence Number=SeqID_18584
MATPGMALVGVAGGMRGNLGGGTPHLIYCSQHTDEPQGGVQMRTKVLHAGDDEGEGITPSHSYAPIARPESVVAGWGNEGGEHVVVDGVGAREQMEPGAVGGGVDVDTNDGPEGADKLTPKKNV

SEQ ID NO: 60364 - protein, 199 aa, Zea mays
  Coding DNA Sequence Number=SeqID_18585
  Homolog annotation: Hit_ID=Q6QP54; Match level="QueryCoverage=42%, HitCoverage=26%, E-value=1e-07, Identity=42%"; Hit description =Putative kinase
  Subcellular localization annotation: CTP_CleavageSite=66; ConfidenceScore=5.43e-01
MEGINPIPSSPSSAQDHHRPTSHRKCMTPAISFFPFYASAPPISCDARENSTACPAPTVVPPARARLTTAKSSLRRNRKLRLARSLGLRPQKGGLRLARPWASVSEGGLRLARPTGLGPRLGHRRWSPPRPTPGLGLNLDLGGWSPPRPTLGLDLGPDLRRNRVLTQPRPRPQEESPPRPILGSDRPRHRGDHHYPTPS

SEQ ID NO: 60365 - protein, 408 aa, Zea mays
  Coding DNA Sequence Number=SeqID_18586
  Gene Ontology: Mol. function=oxidoreductase activity; Cellular component=integral to membrane; Biological process=potassium ion transport
  Homolog annotation: Hit_ID=Q2R0H4; Match level="QueryCoverage=74%, HitCoverage=92%, E-value=1e-128, Identity=71%"; Hit description =Oxidoreductase, aldo/keto reductase family protein, expressed
  Pfam annotation: Domain name=Aldo_ket_red; Domain location=5-306; Score=-11.6; E_value=1.4e-08; Accession=PF00248.11; Description =Aldoketo reductase family
MTMGEQSGAACSLRLLDAAYDAGVNFFDSAEMYPVPQRSETRGRSEELLGRWLRARRAPRDSVVVATKVSKSPQILPLLRLLVAGPSGQMTWIRGGPTSLDSQNIAEAIDGWYVPMFGETEYDPNCQYTSVPMEEQLEALGRAIDAGKLSKDSQLLPKLLTLQNSYNLLCRNFDSGLAECCHHERISLLAYSPMAMGILSGKYHLSDNCGPPDARMNLFKGRYSEGESRYKLQSPKVKAAVKEYTQISAKYGISPVTLAIAFVLRHPLVASAVFGATKLWQLDEVLQATTVHLCEEIVAEINDDHAACHSDASRAPCRRSLRAVSSRTQQIPARHTILPPEASARSTGTRPAPGTGSRRVVVARHRIPPPEASAQSTNTRPAPGTGSRRAVVARHRIPPPEASVPSSW

SEQ ID NO: 60366 - protein, 69 aa, Zea mays
  Coding DNA Sequence Number=SeqID_18587
MGDHVSGRVRGYVCWQVQSGRPPTASCGWHHISCSIIIFRSYMRCKMHMYEYNESSTKVAQIYKDIVAN

SEQ ID NO: 60367 - protein, 442 aa, Zea mays
  Coding DNA Sequence Number=SeqID_18588
  Gene Ontology: Mol. function=methyltransferase activity; Cellular component=chromatin silencing complex; Biological process=methylation
  Homolog annotation: Hit_ID=Q9LIN4; Match level="QueryCoverage=99%, HitCoverage=100%, E-value=1e-177, Identity=64%"; Hit description =Arabidopsis thaliana genomic DNA, chromosome 3, BAC clone:F20C19
  Pfam annotation: Domain name=UPF0020; Domain location=161-339; Score =10.2; E_value=1.2e-07; Accession=PF01170.9; Description=Putative RNA methylase family UPF0020
MWYLCVFYHRLLDYRRPEVESLAELFAGPGARESVEWRMPENHHVDSPFHLVRLPGDERLAAQVANRSLLVKGVYELWGYGTTYEELEKSVRDRLTRLHLFVSFQGRVNLKKPDHRFFVMETDDYGSNNGLPPVVKRSIFFGREVGAADRHLLPTYQLKSRKYIGPTAMDAEMAFLMANQGLASPGKLVYDPFVGTGSILVAAAHFGAMTMAFQGADIDIRVVRDGRGPNCNVWSNFEQYKLPEPLCLLRADNNLPPWRPGLKEMFDAIICDPPYGVRAGGRKSGGRKLIKGVKGPYTVPDEKRDNHIPSTAPYSLAECVHDLLHLAARMVVMGGRLVFFYPVLRGEDGTANPQFPEHPCFKLITSSEQILSFRYSRVLLTMVKVAPYTEEIEKLAAERHREFRENHQKWMEEGNLHSAVFEPAQDGKPDRDSKPKYRGKYV

SEQ ID NO: 60368 - protein, 86 aa, Zea mays
  Coding DNA Sequence Number=SeqID_18589
MASLHWLAAPPCWASWGVWLLCRPYRDEMPRLVEELVAEDPDVQQVEVADQELIEEVYGTRTTPWQIGNMTCGYRVQPLQSVKLVY

SEQ ID NO: 60369 - protein, 436 aa, Zea mays
  Coding DNA Sequence Number=SeqID_18590
  Homolog annotation: Hit_ID=Q9FVD4; Match level="QueryCoverage=24%, HitCoverage=21%, E-value=1e-23, Identity=56%"; Hit description =Ser/Thr specific protein phosphatase 2A B regulatory subunit beta isoform
MSGYFNEVSTVAFQLGNRIKERGGRLIDVDALHEKLLQVIKLYLMHYALASVYENQVAETEAVPKGRVSSSESQDSFYQVAEHACRKDAEKADHSISRHPEFRYKTEFQSHEPEFDYLKSLEIEEKINQIKWCQAANVPCVHIRMQDAPDIEILLSKKGTKLSEMNLDRSAAPANGSPGGVGYLSPSLSNGNALKPGRLPLLRLPVENGALYLLSTNDKTIKFWKVQEKKVKKLSEMNLDRSAAPANGSPGGVGYLSPSLSNGNALKPGRLPLLRLPVRKLNPMLKRLPKRIGKKNLQRHGKTGYTSLCKEIRQNSSSMLKRSRGALQAILIICSFPEKIKSHAEEAAQKDREEKLAETRKNRLHITVQGNKAEFIQHAEAKQRCTSGYSYHLFFSSWHMVLNKLHNWISVFLQQLIELLRLNARKYKHKKHIRVC

SEQ ID NO: 60370 - protein, 95 aa, Zea mays
  Coding DNA Sequence Number=SeqID_18591
MEKSRVLVVGGTGYIGRLFLSCSPRLWDSDRWSADYHQKLGLGKRHSLSSESGQTEIVASAAEGCMVIKLEHNDATLPADYHQKTKTWAWKFRPP

SEQ ID NO: 60371 - protein, 98 aa, Zea mays
  Coding DNA Sequence Number=SeqID_18592
MGRRQVCIARTQGPGRQCVSSPIYGRSNEGTSEPPSTMLGPEQRDPVGLRDRSGTPEPHASDGKGGKPAHLGVRGAVCGRSGERLVHLHLVRWMGWRR

SEQ ID NO: 60372 - protein, 349 aa, Zea mays
  Coding DNA Sequence Number=SeqID_18593
  Homolog annotation: Hit_ID=Q6Z8Y3; Match level="QueryCoverage=16%, HitCoverage=5%, E-value=2e-13, Identity=69%"; Hit description =Putative CLAVATA1 receptor kinase
MASSPVDAQLTQALEHQTHTILAELDKWFMAIDSKWEARVEALEPVAMQLHVYQRCAQREPGRDPAGEAVVEHAQLGELLAVADPSRDGLGEGVRRHVHHLGADLATHQAAVGADVKDRLRRFDAATDTCIAALESTNQVCEIWHPHVDSEIEGLQSRVADSERACLVAPMSINAVSSCPTASAGEKMLDASFVRQEVRICFSDKVPMLSLEGINGVCRDEIRVHKLLPDHSILAELEDRDVSEQLAEARGRLDNPTTTLLGPNINPVTTPPHLRGLCAELSFSSPTSSLLQLVCVEEDEVLTTSHNRCLTNCFNLIQSCFSWDAMPHRQTWPPPHMHVEFGCASDRMK

SEQ ID NO: 60373 - protein, 279 aa, Zea mays
  Coding DNA Sequence Number=SeqID_18594
  Homolog annotation: Hit_ID=Q10QG0; Match level="QueryCoverage=21%, HitCoverage=22%, E-value=2e-08, Identity=49%"; Hit description =Uncharacterized plant-specific domain TIGR01568 family protein, expressed
  Pfam annotation: Domain name=DUF623; Domain location=215-274; Score =85.2; E_value=2.1e-22; Accession=PF04844.4; Description=Protein of unknown function, DUF623
MPAPKWFQKLRGRRSKGKQQGPCARGLAAEDAPAQGQRPSSLPAPCAVSPNRASYYFASADRARQDRDLPCAADAAAALLDVRVDVVHRRAGDRRLGGLDAPPGTPELQLRPIVTRPPVDDASASGGVSSASATTSAATTPSTRARRFHVSSPMARRRRRRRCDHDSVAIKKGKAAAAEEEEEEGEVSPVPSLRAPTRRRRRRWLYESLVVVKTSSDPERELAESMSEMVVANGIRSSEDLEELLACYLALNAAEHHRAVVAAFRRIWLLLDKHRLLLI

SEQ ID NO: 60374 - protein, 70 aa, Zea mays
  Coding DNA Sequence Number=SeqID_18595
MAAGGRGKLAPAEVAPAAFPSRGLAVAGAAAGEVVRRVRPTEASERRRAEVVDYARRLVGSALGCEESVE

SEQ ID NO: 60375 - protein, 62 aa, Zea mays
  Coding DNA Sequence Number=SeqID_18596
MAHPSWRSRESHVTPEMPRVARTGVVVLPDAEIPEESPAQATQQLVRLDEAANGKLSSSKTT

SEQ ID NO: 60376 - protein, 256 aa, Zea mays
  Coding DNA Sequence Number=SeqID_18597
  Subcellular localization annotation: CTP_CleavageSite=36; ConfidenceScore=5.46e-01
MVLCAPSSLRRIPSPACRAVPSSLARARVLLPALLSASRAPPGFLRSDRGVPARSSLAIDHGFDGHCATATTAPDFATEEQSARLNRTPPCSPASSFSAPGRSPAPFTRLHGCAADRDAPARIFLLAARHGTLYVALGPALLARSDSVSLAHPCAIFVPGPCAGSPRRRIQEPAPSLSSPKSWPSRPVSACWLDVVVLLYPHPRLDLAWCLAVHSCWSLTSLRVDVLEPEMFQVDTRHSYTVDTSKIHSIPRCSIS

SEQ ID NO: 60377 - protein, 60 aa, Zea mays
  Coding DNA Sequence Number=SeqID_18598
MEDGDESAAAAAALGLSPQLFVNEVHGIIADISAEAFEAAAAPGVVGAATAAEKATDLQR

SEQ ID NO: 60378 - protein, 966 aa, Zea mays
  Coding DNA Sequence Number=SeqID_18599
  Gene Ontology: Mol. function=solute:hydrogen antiporter activity; Cellular component=integral to membrane; Biological process =potassium ion transport
  Homolog annotation: Hit_ID=Q9ZTZ7; Match level="QueryCoverage=41%, HitCoverage=67%, E-value=1e-150, Identity=70%"; Hit description=KEA1
  Pfam annotation: Domain name=Na_H_Exchanger; Domain location=575-937; Score=154.4; E_value=3e-43; Accession=PF00999.11; Description =Sodiumhydrogen exchanger family
  Subcellular localization annotation: CTP_CleavageSite=51; ConfidenceScore=5.14e-01
MDLSRFASGVGPSRVAPRAGLQIGAAENGFRACSLRRARHRGGGNGNLTAAASTLRGRGGLFYLAPTRRSHPSLRLFYLLPTRGSHLSLRARWRPRCQGNDSLAYVDGPLETAKGSGEVDDNVPTSSGSDDDRGLADVDGLREMLQRSRNELEVARVNSTMFEEKAQRISESAIAFKDRADGAQRDVCAAVATVQEIISKEADAKEAVQKATMALSMAEARLQLAAEALEANRGSVGPTEVSIEGMEQEALLSAQEEIKDCRAALSRCAEELSRVQDKKMELQKEVDRLTDLAGKAQMDASNAEEDVANIMVLAEQAVALEMEASQRVNDAEMVLLKAEKAIASIDTVVELPSPAEEQRSTEEDSVSEGYEYSSDVTDDVYVRDEVSSIERLMVGDLTVQGFEQLEPSREIYDEESSNKMSVEPQKEAESDSDKSKQGKKQEMERKEHTKEPLSAPKALVKRSSRFFSASFFSSKVDGEFTPTSVFRGLMKSVQKQAPKLVVGILLLGAGAFFLNRAEKSQLFQQQGIATSIGKVTSTTKPIVLEIRRIPQRVKKLIELLPHQEVNEEEASLFDILYLLLASVIFVPLFQKIPGGSPVLGYLAAGVLIGPYGLSIIRNVHETKAIAEFGVVFLLFNIGLELSVERLSSMKKYVFGLGSAQVLATTAAVGVIAHCFAALPGPAAIVVGSGLALSSTAVVLQVLQERGESTSRHGRATFSVLLFQVGFQAIAEAMGMAAVKAVAAITAIIAGGRLLLRPIYKQIAENQNAEIFSANTLLVIFGTSLLTARAGLSMALGAFLAGLLLAETEFSLQVESDIAPYRGLLLGLFFMTVGMSIDPKLLLSNFPAISVILSLLIIGKTLLVTFVGRVFGVSAIAAIRVGLLLAPGGEFAFVAFGEAVNQVSSTLDLLLMYTIVDHRNIYNCFVGISMALTPWLAAGGQFLASKFEQHDVRSLLPVESEPSVFPV

SEQ ID NO: 60379 - protein, 1025 aa, Zea mays
  Coding DNA Sequence Number=SeqID_18600
  Gene Ontology: Mol. function=glutathione peroxidase activity; Cellular component=integral to membrane; Biological process=response to oxidative stress
  Homolog annotation: Hit_ID=Q8H2Q5; Match level="QueryCoverage=98%, HitCoverage=99%, E-value=0.0, Identity=60%"; Hit description =Putative anthranilate phosphoribosyltransferase
  Pfam annotation: Domain name=C2; Domain location=25-111; Score=73.2; E_value=8.1e-19; Accession=PF00168.20; Description=C2 domain
  Pfam annotation: Domain name=C2; Domain location=294-374; Score=95.4; E_value=1.8e-25; Accession=PF00168.20; Description=C2 domain
  Pfam annotation: Domain name=C2; Domain location=456-538; Score=74.8; E_value=2.6e-19; Accession=PF00168.20; Description=C2 domain
  Pfam annotation: Domain name=C2; Domain location=618-707; Score=79.7; E_value=8.9e-21; Accession=PF00168.20; Description=C2 domain
  Pfam annotation: Domain name=PRT_C; Domain location=870-1025; Score =431.6; E_value=1.1e-126; Accession=PF08372.1; Description=Plant phosphoribosyltransferase C-ter
  Pfam module annotation: Pfam domain module=C2::C2::C2::C2::PRT_C; Domain location=25-111::294-374::456-538::618-707::870-1025
MEERGFPNDATKEGNDAYKLATYKLGVEVVSAHDLMRKEGQGSASACVELTFDGQRFRTVVKEKDLNPVWNERFYFNISDPSNLRALALEAYVYSVNKTIESSRSFLGKVRIAGTSFVPFPDAVVMHYPLEKRGMFSRVKGEMGMKVYITNDPAIKASNPLPAMDPVSNNPPPAPSTAEQIAADIIGTNLHKSQEHRSEAKTLHTIAKEVHHNHGHLPASFGEQPSKYSVDQMKPGSQPPRIVRMYSAASQQPMDYALKETSPFLGGGQVVGGRVIHGEKNASTYDLVERTQYLFVRVVKARDLPDMDVTGSLDPYVEVRVGNYRGITKHFEKQKNPEWNAVFAFSRDRMQASVLEVVVKDKDLIKDDFVGFVRFDLNDVPIRVPPDSPLAPEWYRLVGKSGDRSMGELMLAVWVGTQADEAFPDAWHSDAATLEDPSTVTHMKSKVYHAPRLWYLRVNIIEAQDVAILDKTRCPDVFVRAQVGHQLGRTKPVQARNFNPFWNEDIMFVAAEPFEDHLVLTLEDRVGPNKDEMLGRVIIPLAMVDRRADDRIVHGKWFSLEKPVLVDVDQLKRDKFSTRLHIRLCLDGGYHVLDESTNYSSDLRPTAKQLWKPSIGLLELGVLGAQGIVPMKTRDGKGSSDTYCVAKYGSKWVRTRTIMNNPHPRFNEQYTWEVYDPATVLTVGVFDNGQLGEKTSSGKDGKIGKVRIRLSTLESGRVYTHSYPLLVLHPSGVKKMGELHLAIRFSSTSLVNMLYLYSRPLLPKMHYVRPIPVLQVDMLRHQAVQIVAARLSRMEPPLRKEVVEYMTDFDSHLWSMRKSKANFFRLVTVFSGLFAASRWFIGICSWKNPITTVLVHILFIMLVCFPELILPTVFLYMFLIGIWNFRYRPRYPPHMNTKISHAEAVHPDELDEEFDTFPTSRNPEIVRVRYDRLRSVAGRIQIVVGDIATQGERVQALLSWRDPRATSVFVLFCLIAAIVLYVTPLQVLAALGGFYVMRHPRFRHRLPSVPVNFFRRLPARTDSML

SEQ ID NO: 60380 - protein, 104 aa, Zea mays
  Coding DNA Sequence Number=SeqID_18601
MAKQTESGEESYELRRSQVARSSTPWTIDLWMRGREDLAAIFKVLGAKIALSLAALELRSKRPRGQQDGTETLPAVPRTASRRRLDTAKVVDKSTGTGRRRPRL

SEQ ID NO: 60381 - protein, 211 aa, Zea mays
  Coding DNA Sequence Number=SeqID_18602
  Gene Ontology: Mol. function=hydrolase activity; Cellular component =paraspeckles; Biological process=mRNA processing
  Homolog annotation: Hit_ID=O43809; Match level="QueryCoverage=79%, HitCoverage=73%, E-value=4e-54, Identity=59%"; Hit description =Cleavage and polyadenylation specificity factor 5
MVSSSSSVVNVYPLANYTFGTKEPKMEKDTSVADRLARMKVNYMKEGMRTSVEAILLVQEHNHPHILLLQIGNTFCKLPGGRLKPGENEIEGLKRKLCSKLAVNSPSFPPNWQVGECVAVWWRPNFETVMYPYCPPHITKPKECKKLFIVHLSEREYFAVPRNLKLLAVPLFELYDNIQPLRVCGGRLSWFMPFPDPTHVGATYTETVLPI

SEQ ID NO: 60382 - protein, 127 aa, Zea mays
  Coding DNA Sequence Number=SeqID_18603
  Gene Ontology: Mol. function=sequence-specific DNA binding; Cellular component=intracellular; Biological process=DNA replication
  Homolog annotation: Hit_ID=Q1STS2; Match level="QueryCoverage=81%, HitCoverage=79%, E-value=2e-27, Identity=62%"; Hit description =Transcription factor CBF/NF-Y/archaeal histone
  Pfam annotation: Domain name=CBFD_NFYB_HMF; Domain location=22-95; Score=64.7; E_value=3e-16; Accession=PF00808.13; Description=Histone- like transcription factor (CBFNF-Y) and archaeal histone
  Pfam annotation: Domain name=Histone; Domain location=16-98; Score =41.7; E_value=2.6e-09; Accession=PF00125.14; Description=Core histone H2AH2BH3H4
  Pfam module annotation: Pfam domain module=CBFD_NFYB_HMF::Histone; Domain location=22-95::16-98
MRQARPYSGIFCGGVSARTGPHALPLARIKKIMKRSAGEAAAAADGGARMISGEAPVVFSKACELFVAELTRRAWAATLDGKRRTVHREDVATAVHNTDLFDFLVDVVTADTAGGTGGGGHDGNGAL

SEQ ID NO: 60383 - protein, 73 aa, Zea mays
  Coding DNA Sequence Number=SeqID_18604
MTWQGAPDCSVCTGLSDKKYAKLVRTLADGHRRNAPAFSSGRRNIWNTLPSKDAPWPPQLLTPERYDSVLVLF

SEQ ID NO: 60384 - protein, 111 aa, Zea mays
  Coding DNA Sequence Number=SeqID_18605
  Gene Ontology: Mol. function=asparaginase activity; Biological process=glycoprotein catabolic process
  Homolog annotation: Hit_ID=O65268; Match level="QueryCoverage=91%, HitCoverage=30%, E-value=2e-14, Identity=38%"; Hit description =Putative L-asparaginase 4 precursor (EC 3.5.1.1) (L-asparagine amidohydrolase 4) ...
  Homolog annotation: Hit description=[Contains: L-asparaginase 4 subunit alpha; L- asparaginase 4 subunit beta]
MAGPSLLGRIPPMFLVGEGAYQWAKSKGMDLVESTSEANSWLVTENARAQWVKYTSLLVNTKKSLYHSTGSGSEHHSVQLEAQDSYGNVASGASSGGIALKVTIWSCFCVH

SEQ ID NO: 60385 - protein, 159 aa, Zea mays
  Coding DNA Sequence Number=SeqID_18606
  Gene Ontology: Mol. function=calcium-dependent phospholipid binding; Cellular component=membrane; Biological process=protein amino acid phosphorylation
  Homolog annotation: Hit_ID=O24582; Match level="QueryCoverage=75%, HitCoverage=84%, E-value=6e-66, Identity=99%"; Hit description=Novel protein
  Pfam annotation: Domain name=C2; Domain location=30-102; Score=43.9; E_value=5.4e-10; Accession=PF00168.20; Description=C2 domain
MAAGSQSKPHHMCDADWQCMIDDPELPSWGRRQHSTGENNMDPFVILTCRTQEQKSSVANGAGSEPEWNETFVFTVSDDTPQLHLKIMDSDLTNDDFVGEATIPLEAVFQEGSLPPAVHPVVKEEKYCGEVKLALTFTPAAETRRPDDNEEGPPYSSWS

SEQ ID NO: 60386 - protein, 85 aa, Zea mays
  Coding DNA Sequence Number=SeqID_18607
MKGMTDALGDLGQVVSDRTLALNLLCLNKRFEHIKTFIRRTTPLLPFQTIRNDLLLEELTMAVESSISAYIAFHCHLDASASAAV

SEQ ID NO: 60387 - protein, 236 aa, Zea mays
  Coding DNA Sequence Number=SeqID_18608
MDTNHILQLNGDGTKEPRQYNIVHALPYRGGSIIDVGEDTVVTGVALEGNLHVEVGDGGGLMDHNGLSVREGSDGGLRQLESGNKRTLQASDICLFLLHASAMVRTRALAATLVGDDFGDRGGRSDVLDAGNLHVEVGDGGGLMDHNGLSVREGSDGGLRQLESGNKRTLQASDICLFLLHASAMVRTRALAATLVGDDFGDQVVPPLLSGGNIFLGTLCSLLLGTSSGGLGLTRG

SEQ ID NO: 60388 - protein, 181 aa, Zea mays
  Coding DNA Sequence Number=SeqID_18609
  Subcellular localization annotation: CTP_CleavageSite=22; ConfidenceScore=5.11e-01
MLALANLKPSTTPVAPITSTTPASTAPAPASAPPIPPPCFRERDETKVHPLDVDLHLLDLWRATASRVRRFRHVPVDSWLPAQWDPAAALLFSTRTQESFFRAQLSAQIALRAHRCLNLSAFRTTAGAESEGHITYLLGLYSLLTFGGRYVEEWVQVFYAVVWIDPNHQWMGFRFERVGNG

SEQ ID NO: 60389 - protein, 219 aa, Zea mays
  Coding DNA Sequence Number=SeqID_18610
MTREQHGCVGLGEVEHHIDDGHQKGKDEVEQGRRQGGACVREKRRLRAANKGREVRAAMEMAAKQEFAARIMSRWRSRELGGKRNHGAQEQSASCSRGRAPWELRERRGRNAGEAQQDAMKAARGAMGPEYLLGREEAKLAGEADMGTKAEQREEEARRGNREENRGPGRAGRRSSEQEQGEEGAPWSDLGRTLAKEEGALAGWKLEEMKTAQQRKEMR

SEQ ID NO: 60390 - protein, 754 aa, Zea mays
  Coding DNA Sequence Number=SeqID_18611
  Gene Ontology: Mol. function=zinc ion binding; Cellular component =nucleus; Biological process=regulation of transcription, DNA -dependent
  Homolog annotation: Hit_ID=Q53K34; Match level="QueryCoverage=79%, HitCoverage=64%, E-value=0.0, Identity=60%"; Hit description=Myb -like DNA-binding domain, putative
  Pfam annotation: Domain name=Myb_DNA-binding; Domain location=355 -400; Score=55.3; E_value=2.1e-13; Accession=PF00249.21; Description =Myb-like DNA-binding domain
  Pfam annotation: Domain name=SWIRM; Domain location=132-220; Score =70.2; E_value=6.7e-18; Accession=PF04433.7; Description=SWIRM domain
  Pfam annotation: Domain name=ZZ; Domain location=295-339; Score=25.1; E_value=0.00015; Accession=PF00569.8; Description=Zinc finger, ZZ type
  Pfam module annotation: Pfam domain module=Myb_DNA-binding::SWIRM::ZZ; Domain location=355-400::132-220::295-339
  Subcellular localization annotation: CTP_CleavageSite=40; ConfidenceScore=5.24e-01
MEAKPSSAAHGDAPAVEAPRRRGSGGKRKSAGSSFTPSKRQAKERNAAFHVPQHLLHSGPLTRAARHSPHKLAGTPPESGPASSSAATGDGVSGGQAEVDAIRPETEETPAPELPLVDEMLEAVRSRGPGVHVVPTFAGWFSWKEIHSVEKQILPSFFNGKSVKRTPEVYLAIRNSIMMKFHANPQLQLESKDLAELSIGESDARQEVLEFLDHWGLINFHPFPPAGHEESKPEESQDNSNDEKASLIEQLFKFESVQSYMTPLLNKEDVGAPPPLPSLFPEPVLIENMVAAAEPSVEYHCNSCSVDCSRKRYHCRTQADFDLCCVCYNEGKFDPGMAKTDFILMDSAEVSGASGTSWTDEETLLLLEGLEIFGGKWAEIAEHVATKTKAQCMLHFLQMQIEDRFHDGDDINQNIPVSTEQATTEKAIVETPEKMEVGDKVEGRDNADEKASEKTEGSCEETKTEDANVVNKDTQKSGGKDSGASPSTEEAKQSSDDQPIVKENSVDVDTSGEKLSNVAIDILKCAFEAAGHSPEYEGSFADAGNPVIALAAYLAGLVEDGNATTSFRSSLKSISEVPPALQLASRHCFILEDPPNELKDICVSVRMETDTGGGYWRRQPQPGHDVETRPKLREHHRWKPLGEDIGELRSGRNVDIADSNTLADEVKVDLHVLRALVLHRISGEVYYADGVALDEVGTRERAMKLLEQLTELGSLGHAVGYSAMPRYSALTLEWETTSRRFEDQEMRLTPMNIV

SEQ ID NO: 60391 - protein, 49 aa, Zea mays
  Coding DNA Sequence Number=SeqID_18612
MGTGKGSAPRLPLLLSLLSSSSAVRCEVAGTWRQVLTYLWLAKHLSLNA

SEQ ID NO: 60392 - protein, 676 aa, Zea mays
  Coding DNA Sequence Number=SeqID_18613
  Homolog annotation: Hit_ID=Q84TA3; Match level="QueryCoverage=32%, HitCoverage=28%, E-value=6e-39, Identity=58%"; Hit description =Putative leukotriene A-4 hydrolase
MAREARGFQAGKFEELEAEWPSDCSSICASARQTAPERVYAVCTAELLKAWFSRPAFKLDTILMAAASCVHSASGARFCRSASRPPTALLSIDGAPSFDGKSHPVASRPPAARPSRINVVFPTRCARLPSPARPLPRSLRAKTKGCEKTKGCAGAVCGGASHCSAEAAGEVEKVSRKEAVSRGRARVSAMPRTGSGAAAREKGMGSGGSAWVEAEWTARARVSSRRSPECSVERVSTAEVCMVEAAKSSHCSAEAAGEVEKVSRKEAVSRGRARISAVPRTGSGATAREKGMGSGGLAWVEAEWTARARVSRRRSSECGAERAVCGRGSHCSAEAGGEVEKVSQKEAVSRGRARVSAVPRTGANELLLRRKLEEQQQAAELQHAIELQSRRLMGLQLLDLKARAAATAAAASALPTPVANAFASSHPLSTMAVESPLESGEQLKLSSGFALEGKLNGGDKEESACEASPDAADSDQSGDHNLPDSPFASPTKSAALVHDSFAATEHENTASLVGSKIDVGSNHLRPLRWKSLRPAPTSSPCAGALERPLLYFSVAPIMSVNILSSTSEMILSECNEQAVLRSRSHGDGASAGPSTSTATPTLGPLDLLLAVDRHQKVPKVHNKPIKRPRKGFNKKSKGGLQAELRTFGKTQRRRAIIHRTVRCTPDSVRCSKEKRL

SEQ ID NO: 60393 - protein, 527 aa, Zea mays
  Coding DNA Sequence Number=SeqID_18614
  Gene Ontology: Mol. function=nucleic acid binding; Cellular component= chromosome, pericentric region; Biological process=regulation of transcription, DNA-dependent
  Homolog annotation: Hit_ID=Q05KP5; Match level="QueryCoverage=99%, HitCoverage=65%, E-value=1e-165, Identity=60%"; Hit description =Chromatin remodeling factor DDM1b
  Pfam annotation: Domain name=SNF2_N; Domain location=283-527; Score =171.9; E_value=1.6e-48; Accession=PF00176.13; Description=SNF2 family N-terminal domain
MVEGMVVAVPNGVKADGAAATAAAAKADSPKSVLEDEKISESKNGNASLATEPVKQGDETSDDFVDAMMSLPVDHEIDSADVPPAVEAVKDEDQLLEPAKEEKFDDFLDAGLSIPIDLEAKNGDVSLITEAMKKEEEQLEEARIKAEEEEEARKREEVAKLAFDPESRYSKLDELLTKTQLFSEFLLEKMDKIADEVVEPQGEESPVEKKKRRGRKRKANATPQYNDNYGACSKKAKTAVAAMLTRSREDRLADDSTLSEEERLKKEQANLVPLMTGGKLKSYQIKGVKWLISLWQNGLNGILADPNGPWENNPDNWISCSPEGQRHAWFVPSVSSIIYHGDKVARAEIRRKFMPKTAGPDFPIIVTSYEIAMLDARFLAHYRWTYVVVDEGHRLKNSKCKLLREMKRIPMANKLLLTGTPLQNNLAELWSLLNFILPDIFSSNEEFESWFDFSAKGSEEPEESEEKRRVHVVSKLHAILRPFLLRRMKEDVEQMLPRKKEIIIYANMTEVQKRILYHLVEKTFDVY

SEQ ID NO: 60394 - protein, 562 aa, Zea mays
  Coding DNA Sequence Number=SeqID_18615
  Homolog annotation: Hit_ID=Q9LW21; Match level="QueryCoverage=99%, HitCoverage=90%, E-value=7e-22, Identity=41%"; Hit description =Arabidopsis thaliana genomic DNA, chromosome 3, P1 clone: MDJ14
MGLPQPSTVEDDAPTALRTSISCPPHSGGVSACDLDGLPAGSSSRRVLSYPLICDFDRKATLDAPNESNGYSKDGCEFGEPADLHGLNIDSRNTNSWSSPKLVPSVHMPARRVVGFDSGCIGGSDGAETDMVDSSLVDRNSHLPFDQHELQARKRLFSPLKNVLVKQFNGDMLNLPSGDSRFRHSDSADKLYSTGFQDNKKANTGCINFFETRDTPASRCSSRSPEWDVTRSNSNSFTDGPLLGSKDYISYYDHLAASAKLAHSPLSLSPLSPKYMNKIKVTGSQRYIMKDLEDDFLDLKETGGSGGARMPEVSKGSNLLHDELDVMTPKWGSLRRYQNWGPESSPTSPRIGYGRSLSLHVRRSLVGSFEESLLSGRYSYGKDSQTIDGFLAVLNVTGGCNGGQNCNSNDESEKGDLKTRCRSLDSDSNESNKSSSPGNKKDQSDSDGCCCQMDKFGMGEKKSCCSPSKINDSSGGAVLRYALHLRFLCPSKKKSSKSMLRCKSDLSTAPYSSNTLPEEERRFYLYNDLRVVFPQRHSDADEGELRVEHDFPADPKYFDISN

SEQ ID NO: 60395 - protein, 133 aa, Zea mays
  Coding DNA Sequence Number=SeqID_18616
MELESQVVVLRLLAFAAAVVVATNRQDRWGIVLTLIEDRYSPSGSTYTGINELRLRRLRAAHTAVYAKKLVSKHWLHHMGPGKLHTFCSGGDDGNNREKRGKGGSSVTNKQYRAISGVDCPTMATIAIASTQN

SEQ ID NO: 60396 - protein, 544 aa, Zea mays
  Coding DNA Sequence Number=SeqID_18617
  Homolog annotation: Hit_ID=Q8RVR4; Match level="QueryCoverage=35%, HitCoverage=99%, E-value=1e-48, Identity=56%"; Hit description =Putative CONSTANS-like B-box zinc finger protein
  Pfam annotation: Domain name=CCT; Domain location=506-535; Score =43.2; E_value=8.6e-10; Accession=PF06203.4; Description=CCT motif
MKSCGGGGADGQQCPCDYCGEAAAASALPRGRRAPSGSPCDPPQGHAAKGAFAEARAGRRTAQGCARAPRPARARLPRRRPRRYPLRGLLRGAAPPLSAARVSVEGFSGCPSAAELAASWGLDLRRAAVAVGDDGDGGDDDDPFLSVLDYSVLGVGVADTDLRDLYVPCDPPRVPVPDAGARPLRGEALCDQLAEMARRDEADTSHAHPHSDLSPRTPRRTSAASSGRLPSGKMAPPAALPVPAHPPPAAPQEVPLPYTSLLMMASANCSDLIGGGDRVGDTDEQLLWDCAAPSVPPTQHFLYILHINQTEKCSQDLGWFFSQRACSFGKGFLKCISLFRYLLDHIFHIWDFNLGRSRHHDEKSALEVGYGSNHGGFMIKSYSDMLKDISSGTTKDLEDIYDSRYCSTAEDIMSSNICQLSSKNVSTGSNKRKVRSCAASTMDGPTTSGNHNHVPASASGPGAALTREISFGDQTVSAPAAETERPAAVRIDSETLAQNRDSAMQRYEKHIRYESRKLRADTRKRVKGRFVKSTEALNAARYNG

SEQ ID NO: 60397 - protein, 52 aa, Zea mays
  Coding DNA Sequence Number=SeqID_18618
  Subcellular localization annotation: CTP_CleavageSite=45; ConfidenceScore=5.44e-01
MTAPQARTTVMGPPATVATRGTSGSNGHVRRGLRGSTEVKGTSTVAEAEVSV

SEQ ID NO: 60398 - protein, 474 aa, Zea mays
  Coding DNA Sequence Number=SeqID_18619
  Gene Ontology: Mol. function=pyruvate dehydrogenase (acetyl -transferring) activity; Cellular component=mitochondrion; Biological process=glycolysis
  Homolog annotation: Hit_ID=Q9ZQY1; Match level="QueryCoverage=69%, HitCoverage=83%, E-value=1e-166, Identity=90%"; Hit description =Pyruvate dehydrogenase E1 beta subunit isoform 3
  Pfam annotation: Domain name=Transket_pyr; Domain location=61-256; Score=215.4; E_value=1.3e-61; Accession=PF02779.14; Description =Transketolase, pyrimidine binding dom
  Pfam annotation: Domain name=Transketolase_C; Domain location=273 -397; Score=189.8; E_value=6.5e-54; Accession=PF02780.10; Description= Transketolase, C-terminal domain
  Pfam module annotation: Pfam domain module=Transket_pyr::Transketolase _C; Domain location=61-256::273-397
  Subcellular localization annotation: CTP_CleavageSite=14; ConfidenceScore=5.39e-01
MLGVARRRLGSGCVSALPPPGSPPSLRSHRDPFLSPQVLAQLAQALRPAAAPARTYSAAAKEITVREALNTALDEEMSADPSVFLMGEEVGEYQGAYKISKGLLDKYGPDRVLDTPITEAGFTGIGVGAAYHGLRPIVEFMTFNFSMQAIDHIINSAAKSNYMSAGQISVPIVFRGPNGAAAGVGAQHSQIGILLYYDGITNCLSMQCYAAWYAHVPGLKVLAPYSAEDARGLLKAAIRDPDPVVFLENELLYGESFPVSAEVLDSSFCLPIGKAKIERQGKDVTITAFSKMVGYALQAADILAKEGISAEVINLRSIRPLDRATINASVRKTNRLVTVEEGFPQHGIGAEICMSVVEDSFEYLDAPVERIAGADVPMPYAANLERMAVPQYSTWEMQIFLSRIGFWSLGWEKVNVVAVILACGIESRLTAHAIDHLSVSPFDSLLLPHLQVDDIVRAAKRACYRAAVPMAATA

SEQ ID NO: 60399 - protein, 134 aa, Zea mays
  Coding DNA Sequence Number=SeqID_18620
  Gene Ontology: Mol. function=nucleic acid binding; Cellular component= intracellular; Biological process=chromatin modification
  Homolog annotation: Hit_ID=Q653W1; Match level="QueryCoverage=42%, HitCoverage=12%, E-value=4e-13, Identity=66%"; Hit description=Zinc finger (C2H2 type) protein-like
MGKKKNLERLEALIVSWNGMLALVLNVEATRESNKDDRGGVTHVLIVCMSIAGRIHRLLDNLRIAKQTGFNSVADQVGADSSIEELYLLNPSALLPCLYHILAASTSSDPSGSTNRFLKSYLLSEESLKGTAHA

SEQ ID NO: 60400 - protein, 172 aa, Zea mays
  Coding DNA Sequence Number=SeqID_18621
  Subcellular localization annotation: CTP_CleavageSite=64; ConfidenceScore=5.65e-01
MTVGAQGRRTLVFQVTPSTPMAQSSVFTGGKTFASRSRIMFGSLDFLATATATGELHLADSEVSAVAGVGGPTRSATRSKADKRRLKRRDVVLKRCLNRLAVAIKQNAKGALPSTFVGSHEAQYFFNPGQNKVASAMMLRSIPEPDELEARVMYQNLRNLVEMDVAQQDEIN

SEQ ID NO: 60401 - protein, 115 aa, Zea mays
  Coding DNA Sequence Number=SeqID_18622
MGLAWAGQKLTEAMVCGIAENLEGYCTGIPVAIELAIHEYVALAPGTTVEVVDGWVVTGEGRGGEVAMGCRGDTQIRVVMGVIGRRQRLGRERGAVPRPGRTGQAGGRQRQWRLW

SEQ ID NO: 60402 - protein, 62 aa, Zea mays
  Coding DNA Sequence Number=SeqID_18623
MDPNDSDMVDTTTIPGHHGGDDRLQEQRGEMTAGYRKGVVEGSVAADVEGGPQLASRERPRA

SEQ ID NO: 60403 - protein, 77 aa, Zea mays
  Coding DNA Sequence Number=SeqID_18624
  Subcellular localization annotation: CTP_CleavageSite=38; ConfidenceScore=5.44e-01
MVGTSAVTARRPVGVSGALYTKANSASAFGNQIPQPNSCMSRGSLEEMVAGITWPSTLPPGWTVEWDPASAEEEHEE

SEQ ID NO: 60404 - protein, 138 aa, Zea mays
  Coding DNA Sequence Number=SeqID_18625
MERGFRGEPQTQCSIPSPAVAQTIVRLDGDDGAASSGPNSAVAGVVDAARGFQRARRRSRVQLREKTELHADLNNLLLIALSPAETACMDAAAVARDDMWGQKAAALGRQCPAGRCPRARGLAPGPRYQGQRTSSRGL

SEQ ID NO: 60405 - protein, 153 aa, Zea mays
  Coding DNA Sequence Number=SeqID_18626
MGPIVSILCVWVVTGVWDLWLRTFPAASDCSEIRGELAGRALVPRLRDPRLRGLRSPLGINPWPRHPLDHWRAASPNRGLEKGRRAGAVAWSRGRRNHRRPPCPRCSAGELHWAQGRFRRPRRAEQATLGPGVLRRRKISAAPWTGSGVASPW

SEQ ID NO: 60406 - protein, 121 aa, Zea mays
  Coding DNA Sequence Number=SeqID_18627
MGNSARGGLAVRHGGRTLADSTVGSGSRTHGRRGGDEGATTRDYSPEGTRTGRLGRAKAAGRRAQATELLGRRTGARKGGETLAETQGKMRSSSGGVAAAPAEHRAGTGVRRGGERRTGLF

SEQ ID NO: 60407 - protein, 121 aa, Zea mays
  Coding DNA Sequence Number=SeqID_18628
MRLRSCWILNTAVFVSVRAYMRMALSATTPITEDNMDQRERARGWAGGREAWSRSWDLRMKRSSSSSKAWLSMEEINAIATAYQSLPDEEKQTHILIQQPNNDSEIEAILGMLAGESSESG

SEQ ID NO: 60408 - protein, 137 aa, Zea mays
  Coding DNA Sequence Number=SeqID_18629
MPLTPIWSLPSPTTPLMRCWFISLATGRLRTNTDLLDIATKFTDGDRRRGKDNFRKEKTPHDTGDISSAKKEHREHSDKHQSGNHTRRKGNEVATAAHPPNPPTNNGGGHFHKLMDTSCQNHGFPNPSLAHHLSVDA

SEQ ID NO: 60409 - protein, 74 aa, Zea mays
  Coding DNA Sequence Number=SeqID_18630
MEEEEVEEGISVEDVEDPEIEALPKQRAGDDYDDDEEEADGVQDHYQRLFFQQKELRLLPRQPTCACGDRCYRS

SEQ ID NO: 60410 - protein, 489 aa, Zea mays
  Coding DNA Sequence Number=SeqID_18631
  Gene Ontology: Mol. function=protein serine/threonine kinase activity; Cellular component=integral to membrane; Biological process=protein amino acid phosphorylation
  Homolog annotation: Hit_ID=Q5Z7H5; Match level="QueryCoverage=93%, HitCoverage=55%, E-value=1e-170, Identity=49%"; Hit description =Putative serine-threonine protein kinase
  Pfam annotation: Domain name=LRRNT_2; Domain location=34-74; Score =50.2; E_value=7e-12; Accession=PF08263.3; Description=Leucine rich repeat N-terminal domain
  Pfam annotation: Domain name=LRR_1; Domain location=104-127; Score =17.5; E_value=0.048; Accession=PF00560.23; Description=Leucine Rich Repeat
  Pfam annotation: Domain name=LRR_1; Domain location=129-151; Score =14.1; E_value=0.5; Accession=PF00560.23; Description=Leucine Rich Repeat
  Pfam annotation: Domain name=LRR_1; Domain location=155-177; Score =10.8; E_value=2.7; Accession=PF00560.23; Description=Leucine Rich Repeat
  Pfam annotation: Domain name=LRR_1; Domain location=179-202; Score =2.7; E_value=89; Accession=PF00560.23; Description=Leucine Rich Repeat
  Pfam annotation: Domain name=LRR_1; Domain location=204-227; Score =7.3; E_value=12; Accession=PF00560.23; Description=Leucine Rich Repeat
  Pfam annotation: Domain name=LRR_1; Domain location=229-251; Score =12.4; E_value=1.4; Accession=PF00560.23; Description=Leucine Rich Repeat
  Pfam annotation: Domain name=LRR_1; Domain location=253-276; Score =8.3; E_value=8.1; Accession=PF00560.23; Description=Leucine Rich Repeat
  Pfam annotation: Domain name=LRR_1; Domain location=277-299; Score =8.4; E_value=7.5; Accession=PF00560.23; Description=Leucine Rich Repeat
  Pfam annotation: Domain name=LRR_1; Domain location=300-322; Score =21.0; E_value=0.0043; Accession=PF00560.23; Description=Leucine Rich Repeat
  Pfam annotation: Domain name=LRR_1; Domain location=324-346; Score =17.4; E_value=0.052; Accession=PF00560.23; Description=Leucine Rich Repeat
  Pfam annotation: Domain name=LRR_1; Domain location=348-370; Score =8.7; E_value=6.7; Accession=PF00560.23; Description=Leucine Rich Repeat
  Pfam annotation: Domain name=LRR_1; Domain location=396-418; Score =3.2; E_value=72; Accession=PF00560.23; Description=Leucine Rich Repeat
  Pfam annotation: Domain name=LRR_1; Domain location=420-442; Score =8.4; E_value=7.7; Accession=PF00560.23; Description=Leucine Rich Repeat
  Pfam annotation: Domain name=LRR_1; Domain location=444-463; Score =6.0; E_value=22; Accession=PF00560.23; Description=Leucine Rich Repeat
  Pfam annotation: Domain name=LRR_1; Domain location=466-488; Score =8.7; E_value=6.7; Accession=PF00560.23; Description=Leucine Rich Repeat
  Pfam annotation: Domain name=LRR_1; Domain location=80-102; Score =2.4; E_value=1e+02; Accession=PF00560.23; Description=Leucine Rich Repeat
  Pfam module annotation: Pfam domain module=LRRNT_2::LRR_1::LRR_1::LRR_ 1::LRR_1::LRR_1::LRR_1::LRR_1::LRR_1::LRR_1::LRR_1::LRR_1::LRR_1: LRR_ 1::LRR_1::LRR_1::LRR_1; Domain
  Pfam module annotation: Domain location=179-202::204-227::229 -251::253-276::277-299::300-322::324-346::348-370::396-418::420 -442::444-463::466-488::80-102
MRPTTSCHRFPLLLVLLLFLLAGEGRSQPAAGGGPSDRDTLLAVKKAWGSPPQLKSWDPAAAPDHCNWTGVTCATGGVGVVTELILSRQKLTGSVPAPVCALASLTHLDLSYNNLTGAFPGAALYACARLTFLDLSTNQFSGPLPRDIDRLLSRSMEHLNLSTNGFSGEVPPAVAGLPALSSLRLDTNNFTGAYPAAEISNRTGLQTLTLANNAFAPAPVPTEFSKLTNLTFLWMDGMNLTGEIPEAFSSLEQLTLFSMASNNLTGSIPAWVWQHQKLQYIYLFHNVLSGELTRSVTALNLVHIDLSSNQLTGEIPQDFGNLKNLTTLFLYNNQLTGTIPVSIGLLPQLRDIRLFQNELSGELPPELGKHSPLGNLEVCLNNLSGPLRGSLCANGKLFDIVAFNNSFSGELPAALGDCVTLNNLMLYNNNFSGDFPEKVWSFPNLTLVMIQNNSFTGTLPAQISPKLSRIEIGNNMFSGSFPASAAGLK

SEQ ID NO: 60411 - protein, 100 aa, Zea mays
  Coding DNA Sequence Number=SeqID_18632
  Gene Ontology: Mol. function=acyltransferase activity
  Homolog annotation: Hit_ID=Q5I2P3; Match level="QueryCoverage=55%, HitCoverage=10%, E-value=1e-17, Identity=69%"; Hit description =Diacylglycerol acyltransferase
MWNMGVAILISFLVSAVFHEICIAVPCHIFKFWAFSGIMFQIPLVFLTRYLHATFKHVMLAAGQPENASIPGGRAGMQRVHYQRCNVNGYQARISSARGM

SEQ ID NO: 60412 - protein, 664 aa, Zea mays
  Coding DNA Sequence Number=SeqID_18633
  Gene Ontology: Mol. function=solute:hydrogen antiporter activity; Cellular component=integral to membrane; Biological process =regulation of pH
  Homolog annotation: Hit_ID=Q5Z8T1; Match level="QueryCoverage=87%, HitCoverage=84%, E-value=0.0, Identity=80%"; Hit description =Putative Potassium-efflux system protein
  Pfam annotation: Domain name=Na_H_Exchanger; Domain location=211-615; Score=274.5; E_value=2.1e-79; Accession=PF00999.11; Description =Sodiumhydrogen exchanger family
MLTRRRSNHPGCSFPLPFLVCGLLLAAAVAFSPAAAAEAADGGAGHEGRAGKPEVEAEAEARGDGVAVAEAGGEVVAQGNATEAKEGSLADMIDRALEKEFPESEGEQGGGETDPGSFNNTVAEKQICNANCSSCSFYSYQGVLETVARRVTKKNETKDNKSFPFKEVFLDRTEQEDVPTLIDRKDNVFIISNPKSKYPVLQLDLRLISDLVVVIVSATCGGIAFACLGQPVKVITGYLLAGSIIGPGGFSFVNEMVQVETVAQFGVIFLLFALGLEFSTAKLRVVRAVAVLGGLLQIMLFMFLCGILATLCGGKTKEGVFVGVLLSMSSTAVVLKFLMERNSINALHGQVTVGILILQDCAVGLLFALLPILSGTSGLLHGVASMMKSLVVLITFLTILSILSRTGVPWFLKLMISLSSQTNELYQLAAVAFCLLFAWVSFYCSYIDFDLAYGPIFLYFIIKTVFVKDLKCSDKLGLSLELGSFAAGVMISTTDLAQHTLEQIEPIRNFFAALFLASIGMLINVHFLWNHVDILLAAVILVITVKTFIVAIVVKGFGYSNKTSLLVGMSLAQIGEFAFVLLSRASSIHLIEGKLYLLLLGTTALSLVTTPLLFKMIPAMVHLGVLLRWFSVDTNQVELGLKNDVLRIDSGKRINLIVQGSHDS

SEQ ID NO: 60413 - protein, 169 aa, Zea mays
  Coding DNA Sequence Number=SeqID_18634
MAATWARSKLEQQHTDKQGRLANSGLGEWNATQGAGAHAPRRTEKPATRRGRGPRMQGEQQGDGAQEREASTGRCTEEFGWDSAGRRPRLGAWRAAKQTAEGARGHGGIGVRRQGAGVKQRENERKEKEPDAMDGVCTGFCRAGDSAVEQRVRAGNQKPGEWEGEDPGR

SEQ ID NO: 60414 - protein, 239 aa, Zea mays
  Coding DNA Sequence Number=SeqID_18635
  Gene Ontology: Mol. function=acid phosphatase activity; Cellular component=cellulose and pectin-containing cell wall; Biological process=translation
  Homolog annotation: Hit_ID=Q5Z7F8; Match level="QueryCoverage=67%, HitCoverage=60%, E-value=2e-58, Identity=68%"; Hit description =Putative Acid phosphatase 1
  Pfam annotation: Domain name=Acid_phosphat_B; Domain location=31-232; Score=149.6; E_value=8.3e-42; Accession=PF03767.5; Description=HAD superfamily, subfamily IIIB (Acid
MTQRLLLALSLIASATAVPAVIRTVPDDPTAGSSGAADAADALFCDSWRLSVETANAGPWSAVPSRCGAFVRDYMEGPRYASDSAVADADALAFASEALAAAEWGGSASARPAWVFDVDETLLSNAPYYAVNGWGSQEFNETSFDEWVDAAKAPTLPSSLNLYNQLQGLGFHVILLTGRSEFQRNATELNLLFAGYNSWEKLILRPKISFYTNLHRITMVLPISEMQVYFSMAIGQGRS

SEQ ID NO: 60415 - protein, 473 aa, Zea mays
  Coding DNA Sequence Number=SeqID_18636
  Gene Ontology: Mol. function=RNA-directed DNA polymerase activity; Biological process=RNA-dependent DNA replication
  Homolog annotation: Hit_ID=UPI00004C1732; Match level="QueryCoverage =60%, HitCoverage=27%, E-value=8e-88, Identity=63%"; Hit description =UPI00004C1732 related cluster
  Pfam annotation: Domain name=rve; Domain location=118-272; Score=2.0; E_value=0.004; Accession=PF00665.16; Description=Integrase core domain
MYFDGSLMKTGAGVGLLFISPLRKHVRYVLRLHFLASNNVAEYEALVNGLRIAVELGDQCLDARGDSDIYQPSVKLDDAPEPDETSAQPEGQELLQEIYSGACGHHAAPRTLVGNAFQQGFYWPTAVADATRIKAPGGFKHLLVTIDKFSKWIEVRPLTSIGSEQAVAFFTNIIHRFGVPNSIIIDNGTQFTRKKFLDFCEGPPHPWTKSEDLQRPQQVRQVVDKRTTLGGLESEDDTEPGHGWKRLGTWPYYTRRGISSLCDATTPEGFGPEASKWETWDSNSELLTFGNSGGRSAIIHRTVRWHTGLSGVPAEQRLLRANGHLQNALNALQCTPVSEQRLMAHQTVNSAYPMHHQTVRCPRRQKLQRSESNGQVTWQAHRIVSGGAPDCPVPSVGDEDYDEDEVAQIVHFNSQATTILLTSLSREEYNKVQGLKSAKEIWDVLKTAHEGDEVTKITKRETIEGELGRFRLR

SEQ ID NO: 60416 - protein, 84 aa, Zea mays
  Coding DNA Sequence Number=SeqID_18637
  Subcellular localization annotation: CTP_CleavageSite=18; ConfidenceScore=5.05e-01
MKLWKETSRSSKTTTSSRCGLAATPSRLPVKAAVIYVSFSHFDLFLKLKTELSGKDNRFHYKILMGIKRFFAPINVSSMHFIRE

SEQ ID NO: 60417 - protein, 78 aa, Zea mays
  Coding DNA Sequence Number=SeqID_18638
  Subcellular localization annotation: CTP_CleavageSite=25; ConfidenceScore=5.16e-01
MKVMPSATTTLHHCTGRVNNNNKVCQGGVVSRQLLACPTKFAHLRPASKALRACLDIDPLVYNTCKAIVIDIDPFGYK

SEQ ID NO: 60418 - protein, 262 aa, Zea mays
  Coding DNA Sequence Number=SeqID_18639
  Gene Ontology: Mol. function=RNA-directed DNA polymerase activity; Biological process=RNA-dependent DNA replication
  Homolog annotation: Hit_ID=UPI00004C1731; Match level="QueryCoverage =99%, HitCoverage=20%, E-value=5e-74, Identity=55%"; Hit description =UPI00004C1731 related cluster
  Pfam annotation: Domain name=rve; Domain location=125-261; Score =28.4; E_value=2.5e-05; Accession=PF00665.16; Description=Integrase core domain
MAEYEALVNGLRIAIELGVRHLDVRGDSQLVINQVMKNLSCHDARMEVYCEEVRCLEDKFFGLELNRIARRAGPLQPQTGGPRTKSISSEENSLLVRSRPGAWPGTTRHTGPSLETPLDMGCTSQLRLPMLPGLCDPIEDKAPGSFTHLPVAIDKFSKWIEVRPLANIRSEQVVAFFTDIIHRFGVPISIIRDNGTRFTGKKFLSFYDNHHICVDWLVMAHPRTNGQVERANGMILQGLKSRIFNKLNKFSKRWLTELSLVV

SEQ ID NO: 60419 - protein, 41 aa, Zea mays
  Coding DNA Sequence Number=SeqID_18640
MAEDDECLDAIKATSDEFLGAYTKAKDEAMNATLVLDEEED

SEQ ID NO: 60420 - protein, 287 aa, Zea mays
  Coding DNA Sequence Number=SeqID_18641
MTSPILREASSQILEVTRGECLDAGRSPGVFEKEEEDSTVAGGPSSRDEGSSHWHDWGVKVKSYKDYGDETGAAGEVVLNLSVEDYLLEGVSELDTHTRLAVGGKVWAGGTGGPVGIVQRCHRWRQGITEAFAPMESCALVDLATHNYALRKSDWKLRSNAFRPRILRLFGTSLLPKIKAGDSWRRHEETRRSKILEDSLTTFDGGDVEEESSDSEEGLNFFVRMDEESCEEDLDFFIALDIASVAEASVVEGPLNGALLASIKGKRRRIGVSKRRVDSANTFIRGR

SEQ ID NO: 60421 - protein, 659 aa, Zea mays
  Coding DNA Sequence Number=SeqID_18642
  Gene Ontology: Mol. function=triacylglycerol lipase activity; Biological process=lipid metabolic process
  Homolog annotation: Hit_ID=Q53LH1; Match level="QueryCoverage=99%, HitCoverage=100%, E-value=0.0, Identity=65%"; Hit description=Lipase, putative
  Pfam annotation: Domain name=Lipase_3; Domain location=72-224; Score =48.7; E_value=2e-11; Accession=PF01764.16; Description=Lipase (class 3)
MDDAAGEEEASMFETSHVLGALLASSPLLASAWDRCTTATAAAPGFVHGEDGGKVYVGFSGVQAALSAAGAAVAGGGADVFAPVGLGGDAAGRMFAPLLAAEPDSSAAGEPVAVQALALQCFLKLCGNPDFQMLLNEIRGKAVMFTGHSLGGAIATLAALHYLCISSSSSPWSPAAPVLCVTFGSPLLGNEALSRAILRERWGGNFCHVVSQHDVVPRLLFCPPDAVPAHIIVGMQLDQWPARTRHTGAVNTVTTRMADTDKNALQQLIQTHMAAVAMEQKLATPETTGGSPYRPFGTYVLCSPEGAACVDNATAAAQMLYATFASRSSPGAESPEAAHSCYGELVLKMPQHLLLKRCLRVDDTRATPNYDDGVSLALEASGIDATVRAHAMEASTARQWLKTSKRAGRRPSLNCACLATQLGRITPLRAQIEWYKAVFDAEMGYYDAFKQRRSPRKYSKVNLNRMKLGQFWDGVLTKLDAGQLPHDFHRRAKWVNAARFYQLLVEPLDIADYHHQGLHRTSGSYMTHGRERRYELFDRWWQEKACTGAGGDITSSMLAASASSRRRSKYAGLTQDPCFWARVEEAREETESARGERDVAELAMKLEELQEFERYSRELVANKEVSVDVLAPQSSYTLWVEEWNQLKLRDEVRTLLLQF

SEQ ID NO: 60422 - protein, 282 aa, Zea mays
  Coding DNA Sequence Number=SeqID_18643
  Homolog annotation: Hit_ID=Q53LG8; Match level="QueryCoverage=93%, HitCoverage=93%, E-value=1e-52, Identity=48%"; Hit description =Expressed protein
MAAASDRGEVDTARPFRSVKEAVAVFGHRILVGNNHSSHSSTAAAAIASPSASANATGVAATPSAKHEASSSSSTMTFSPTPMAESEAEIIPATVPLYSAPSSPPSLASSPSPVKPCSGHRGDESAGGLVIVRSIQKLEADVAATRKELAQLGKRGNEMEKALVSLSAQLHRGLSKLAEMEADRAAGRGRSIACDTDVASFSLRSEQWGDRLAASEYLPSFSHALSLGEMDDVELMGGQRRKAQKVKPIVPLIGDILFSRRKSTKEKGDDGSYSGDLYGVLG

SEQ ID NO: 60423 - protein, 405 aa, Zea mays
  Coding DNA Sequence Number=SeqID_18644
  Gene Ontology: Mol. function=DNA binding; Cellular component=nucleus; Biological process=porphyrin biosynthetic process
  Homolog annotation: Hit_ID=Q6H6S9; Match level="QueryCoverage=90%, HitCoverage=81%, E-value=2e-69, Identity=45%"; Hit description =Putative DNA-binding protein Gt-2
MAIFEGMMKQVTDKQDAMQRVFLETLERWEAERTAREEAWRRQEVARMNRERERLARERAAAASRDAALIAFLQCVGGGQGQPVRLPPHSAGASVVPAPPKPDCAPPSPRLDAAATSLQQLVPAQLKAVEALAWAGGEGGGSTSSRWPKEEVEALIQVRNEKDEQYHDAGGKGPLWEDIAAGMRRIGYNRSAKRCKEKWENINKYYKKVKESNKRRPEDSKTCPYFHQLDAMYRKKHRGDRGRITAAGPNMQDSPSQRELEGKSSNDVDIDNRKSDEQGNVHTSPVSGNRDTAPTTTRPPGDGAKNKTAEDNLKRTNVQLKQQQHEFGTDETDSDDDMARNHTAYTEEDDDEAKIKYKMDFQNPNMIGSSSNMSAPPPPAAAAATTAAAPTTSAAPTSNTFLAVQ

SEQ ID NO: 60424 - protein, 125 aa, Zea mays
  Coding DNA Sequence Number=SeqID_18645
  Subcellular localization annotation: CTP_CleavageSite=55; ConfidenceScore=5.47e-01
MPGLCDRTPIITQPTFMSSSSVSRSAWRPRPSTATLSWEATHSRAAPHALLLKPLASKPRVSYHQLMPLHQLRQHDPPLVVAVTASKPVLQGMLTGLLGNLSPFSYFAKKSETEVVISTYAVLVC

SEQ ID NO: 60425 - protein, 474 aa, Zea mays
  Coding DNA Sequence Number=SeqID_18646
  Gene Ontology: Mol. function=aldehyde dehydrogenase [NAD(P)+] activity; Cellular component=chloroplast; Biological process =aldehyde metabolic process
  Homolog annotation: Hit_ID=Q67B30; Match level="QueryCoverage=99%, HitCoverage=100%, E-value=0.0, Identity=87%"; Hit description=Fatty aldehyde dehydrogenase 1
  Pfam annotation: Domain name=Aldedh; Domain location=4-430; Score =99.4; E_value=1.1e-26; Accession=PF00171.12; Description=Aldehyde dehydrogenase family
MGSVPEEKAKLGFGGLVGDLREVYESGRTQGLEWRQSQLRGLVRLLEEKEEEIFDVLHEDLGKHRGEAFRDEAHTPLVAFPATALVVPEPLGVVLVFSCWNLPIGLALEPLSGALAAGNAVVVKPSELAPATSAFLAANIPKYLDSKAVKVVEGGPEVGEKLMEHRWDKVLFTGSSRVGRLIMAQAAKHLTPVALELGSKCPCIVDWLDSDRDSQVAVNRIIGAKWSTCSGQACIAIDYLLVEEEFAPILIEMLKSTLERFFTKPEYMARILNEKQFQRLSGFLADRRVASSVVHGGHFNPKTLSMEPTLLLNPPLDSDIMTEEIFGPLLPIITVKKIEDSIKFLRSKPKPLAIYAFTRNEKLKQRIIDETSSGSITFNDAIVQSTPIDHPDILFQYGLDSIPFGGVGHSGFGQYHGKYSFDMFSHKKAVLKRSFLVEFMFRYPPWDETKIGMLRRVYRFDYVSLFLALIGLRR

SEQ ID NO: 60426 - protein, 67 aa, Zea mays
  Coding DNA Sequence Number=SeqID_18647
  Homolog annotation: Hit_ID=Q6H628; Match level="QueryCoverage=38%, HitCoverage=19%, E-value=2e-07, Identity=100%"; Hit description =Putative glutaredoxin I
MALVRLAFPVFFFLAAAEFAAGTRSPSAFVQNAIYSNRITIFSKTYCPVCCSSLWHKMLVYILLRVN

SEQ ID NO: 60427 - protein, 201 aa, Zea mays
  Coding DNA Sequence Number=SeqID_18648
  Gene Ontology: Mol. function=zinc ion binding; Cellular component =intracellular
  Homolog annotation: Hit_ID=Q6H630; Match level="QueryCoverage=95%, HitCoverage=93%, E-value=1e-43, Identity=46%"; Hit description =Putative zinc finger protein
  Pfam annotation: Domain name=zf-B_box; Domain location=1-37; Score =4.6; E_value=0.039; Accession=PF00643.14; Description=B-box zinc finger
  Pfam annotation: Domain name=zf-B_box; Domain location=51-98; Score =47.1; E_value=5.8e-11; Accession=PF00643.14; Description=B-box zinc finger
  Pfam module annotation: Pfam domain module=zf-B_box::zf-B_box; Domain location=1-37::51-98
DQDPLIYTADEAALCEACDRRVHRANKLAGKHRRLSLLSPAAPSSSAQQTPPPPLCDICQEKRGLLFCKEDRAILCPDCDVPVHTASELAMRHTRFLLTGEDENDSSSSSISEYLTKTLPGWHVEDFLVDETAAATAIGVSADVSYQAGGLARTGGPQDGYYSAWMAPEQIFCEGKGSRMPQMAMCSSSKRPRATSSYSYW

SEQ ID NO: 60428 - protein, 91 aa, Zea mays
  Coding DNA Sequence Number=SeqID_18649
  Subcellular localization annotation: CTP_CleavageSite=51; ConfidenceScore=5.18e-01
MGISYTSNGALGTPPIATITFITSGAFVILSYFSILKSHLPLLLAVALTTSANAAGARFLAPSPALPRYTAYVDAVAWGMAGCVPTRGPCG

SEQ ID NO: 60429 - protein, 404 aa, Zea mays
  Coding DNA Sequence Number=SeqID_18650
  Gene Ontology: Mol. function=RNA-directed DNA polymerase activity; Cellular component=mitochondrion; Biological process=RNA-dependent DNA replication
  Homolog annotation: Hit_ID=UPI00004C1731; Match level="QueryCoverage =99%, HitCoverage=34%, E-value=1e-150, Identity=61%"; Hit description= UPI00004C1731 related cluster
  Pfam annotation: Domain name=rve; Domain location=311-404; Score= -12.2; E_value=0.062; Accession=PF00665.16; Description=Integrase core domain
MGPIKDLKGVQRVMGCLAALSRFISRLGERGLPLYRLLRKIERFTWTPEAEEALGNLKALLTSAPILVPPAAGEALLVYVAATTQVKLLYAVILTRQKLRHYFESHLVTMVSSFPLGEIIQCREALGRIAKWAVEIMGETISFAPRKAIKFQERARACSSSHPLGKHLRYVLRLHFLASNNVAEYEALVNGLHIAIELGVQRLDARGDSQLVIDQVMKNSHCRDPKMEAYCDEPEAPSAQPKAPSAPEGEALRVEEERNGVTPNRNWQNPYLQYLHRGELPLDRTEARRLARRAKSFVLLVPRALVGNAFRQGFYWPTAVADATRIKAPGGYTHLLVAIDKFSKWIEVRPLNSIKSEQAVAFFTNIIHRFGVPNSIITDNGTQFTGRKFLDFCEDHHIRVDWLP

SEQ ID NO: 60430 - protein, 83 aa, Zea mays
  Coding DNA Sequence Number=SeqID_18651
MGRHVYLVEYGSCGSGGLQGKTKAAPLRGRRLAPPPQDDDSDLELELEPDPNLTKETLCEASALAKVSLVWKAYVRAPRGGGE

SEQ ID NO: 60431 - protein, 67 aa, Zea mays
  Coding DNA Sequence Number=SeqID_18652
MEIARMQEAMRQQIDYQRLQVSDTTNGYPNTNLWNRRLHRLHNLLGLLHNSLSMYPKTLDEHSKFSP

SEQ ID NO: 60432 - protein, 295 aa, Zea mays
  Coding DNA Sequence Number=SeqID_18653
  Homolog annotation: Hit_ID=Q6H5G6; Match level="QueryCoverage=34%, HitCoverage=43%, E-value=4e-42, Identity=82%"; Hit description =Putative calmodulin-binding protein
TYCFVRMPKGLKNTGSTFSRLTQSIILKDQVDRNIFTYVNDIVVAIKRKADQLSDLVETFSNMREARLWLNPKNQLVPSFTTSPPQHAAPLLSDSPLDRSPQQRQSEAKACTVHHYTVHYTASSTLPPARTSRCSTSPPPRSRLLAPARAGIRSLRLAPSLRALASRLDPLALALSSLAALPASASSSPHDNVLFLAPTPTAALLGLHAQLCELLRKDAGVEVPDAFRPDHWLPRCAVAVDVPRGRMAEAFCVLRELKLLPVSGYGMDIALVEVGATVRELVSYPLGGGSSAGAD

SEQ ID NO: 60433 - protein, 1331 aa, Zea mays
  Coding DNA Sequence Number=SeqID_18654
  Gene Ontology: Mol. function=binding
  Homolog annotation: Hit_ID=Q1SJ53; Match level="QueryCoverage=95%, HitCoverage=71%, E-value=0.0, Identity=52%"; Hit description=C2
  Pfam annotation: Domain name=Arm; Domain location=107-148; Score =16.0; E_value=0.12; Accession=PF00514.13; Description=Armadillobeta -catenin-like repeat
  Pfam annotation: Domain name=Arm; Domain location=1109-1147; Score =2.7; E_value=5.5; Accession=PF00514.13; Description=Armadillobeta -catenin-like repeat
  Pfam annotation: Domain name=Arm; Domain location=1248-1289; Score =7.2; E_value=1.5; Accession=PF00514.13; Description=Armadillobeta -catenin-like repeat
  Pfam annotation: Domain name=Arm; Domain location=1290-1330; Score =6.5; E_value=1.9; Accession=PF00514.13; Description=Armadillobeta -catenin-like repeat
  Pfam annotation: Domain name=Arm; Domain location=149-189; Score =15.0; E_value=0.16; Accession=PF00514.13; Description=Armadillobeta -catenin-like repeat
  Pfam annotation: Domain name=Arm; Domain location=239-279; Score =20.7; E_value=0.0053; Accession=PF00514.13; Description =Armadillobeta-catenin-like repeat
  Pfam annotation: Domain name=Arm; Domain location=281-322; Score =10.0; E_value=0.68; Accession=PF00514.13; Description=Armadillobeta -catenin-like repeat
  Pfam annotation: Domain name=Arm; Domain location=324-373; Score =16.0; E_value=0.12; Accession=PF00514.13; Description=Armadillobeta -catenin-like repeat
  Pfam annotation: Domain name=Arm; Domain location=454-494; Score=0.0; E_value=12; Accession=PF00514.13; Description=Armadillobeta-catenin -like repeat
  Pfam annotation: Domain name=Arm; Domain location=496-536; Score=9.2; E_value=0.87; Accession=PF00514.13; Description=Armadillobeta-catenin- like repeat
  Pfam annotation: Domain name=Arm; Domain location=538-578; Score =36.8; E_value=7.7e-08; Accession=PF00514.13; Description =Armadillobeta-catenin-like repeat
  Pfam annotation: Domain name=Arm; Domain location=580-620; Score =15.1; E_value=0.16; Accession=PF00514.13; Description=Armadillobeta -catenin-like repeat
  Pfam annotation: Domain name=Arm; Domain location=654-699; Score=2.0; E_value=6.9; Accession=PF00514.13; Description=Armadillobeta-catenin -like repeat
  Pfam annotation: Domain name=Arm; Domain location=746-784; Score =21.8; E_value=0.0024; Accession=PF00514.13; Description =Armadillobeta-catenin-like repeat
  Pfam annotation: Domain name=Arm; Domain location=830-872; Score=8.1; E_value=1.2; Accession=PF00514.13; Description=Armadillobeta-catenin -like repeat
  Pfam annotation: Domain name=Arm; Domain location=880-921; Score=0.5; E_value=11; Accession=PF00514.13; Description=Armadillobeta-catenin -like repeat
  Pfam annotation: Domain name=HEAT; Domain location=1113-1149; Score =6.4; E_value=7; Accession=PF02985.12; Description=HEAT repeat
  Pfam annotation: Domain name=HEAT; Domain location=114-150; Score =5.9; E_value=8.1; Accession=PF02985.12; Description=HEAT repeat
  Pfam annotation: Domain name=HEAT; Domain location=155-191; Score =15.4; E_value=0.21; Accession=PF02985.12; Description=HEAT repeat
  Pfam annotation: Domain name=HEAT; Domain location=588-622; Score =1.0; E_value=32; Accession=PF02985.12; Description=HEAT repeat
  Pfam annotation: Domain name=HEAT; Domain location=624-656; Score =1.7; E_value=26; Accession=PF02985.12; Description=HEAT repeat
  Pfam annotation: Domain name=HEAT; Domain location=665-701; Score =4.2; E_value=13; Accession=PF02985.12; Description=HEAT repeat
  Pfam annotation: Domain name=HEAT; Domain location=750-786; Score =10.7; E_value=2.1; Accession=PF02985.12; Description=HEAT repeat
  Pfam annotation: Domain name=HEAT; Domain location=892-923; Score =2.8; E_value=20; Accession=PF02985.12; Description=HEAT repeat
  Pfam module annotation: Pfam domain module=Arm::Arm::Arm::Arm::Arm::Ar m::Arm::Arm::Arm::Arm::Arm::Arm::Arm::Arm::Arm::Arm::HEAT::HEAT:: EAT: :HEAT::HEAT::HEAT::HEAT::HEAT; Domain location=107-148::1109
  Pfam module annotation: Domain location=1290-1330::149-189::239 -279::281-322::324-373::454-494::496-536::538-578::580-620::654 -699::746-784::830-872::880-921::1113-1149::114-150::155-191::588 -622::624-656::665-701::750-786::892-923
MALSTLQIVFSFDRLSVIISLNSEFIVQYVCDDITSLKKERHVDKVQDSEPPTPMSVMKMGKNRVNVEDEETLSSVAQCIEHLRQSSSSSQDKESSLKQLLDLVQTRDTAFGAVGSHSQAVPILVSLLRSGPSGVKMLAATVLGSLCKEEELRVKVLLGGCIPPLLALLRSKSAESQTAAAKTIYAVSQGGIRDHVGSKIFFTENVVPVLWEQLKISLKNESLVDGLLTGALKNLSKNTEGFWSATVQCGGVDILIKLVSSGQTNTLANACYLLGSLMMEDSSVCSKVLSGETTKQLLKLLGPGNETSIRAEAAGALKFLSAQSKEARRQIANSNGIPALINATIAPSKEFMQGESAQSLQENAMCALANISGGLSYVISSLGESLESCSSPAQIADTLGALASALMIYDTNAESISASDPVDIEKTLLKQFKPKVPFLVQERIIEALASLYSNPVLCKTLADSDAKRLLVGLITMAATEVQDDLTKSLFALCKKDCDLWQALQGREGVQLLISLLGLSSEQQQECAVALLALLSKENDESKWAITAAGGIPPLVQILETGSPKAKEDSATILGNLCNHSEDIRACVESADAVPALLWLLKNGSDNGKEIASKTLNHLIHKSDTGTISQLSALLTSEQPESKVYVLDALKSLLSVAPLDDILHEGSAANDAVETMIKILSSPKEETQATSATALAGLFHCRKDLRETHIAVKTLWSLMKLLHMQSNKILMGASCCLAAIFLSIKQNKEVAAIARDALTPLVSLANSSVIEVAEQATRALANLFLDQELSLQVSFEENLFRVTRVLREGTIDGRTHAAAAIARLLQCRTVNQPLSDTINRSGSVLALAELLEVANGEAAATSEVLDALVLLSRSKASSGHTKAPWAILAENPHTILPLVSCIADAAASLQDKAIEVVSRLCSDQHDVIGGLVSETPGCISSIAWRIIGSNTLKVKVGGCALLVCAAKEHCQKQIEVLNDASLYIQLIHSLIDMIHMANTPAENVSSESISDIRISRHSKENYSDGETVCRTAVISGNMIPLWLLAVFSRHDSKTRAELLEAGAVEMLTEKISQNAFQYVNHQVARTKGEEDSTSWVCSLLLALLFPRKRDNSIKLCITIPFPVLSNLLRSDEPAYRYFAAQALSSLVCNGSRGTLLAVANSGAAIGLVSLLGCADVDIADLLELSEEFMLVPNPDQIALERLFRVDDIRIGATSRKSIPLLVDLLKPIPERPGAPFLALGLLTQLAVDCPPNMLLMAEAGILEALTKYLSLSPQDATEEATTELLGILFSSPEIRHHESALGVVNQLVAVLSSRRKEFTLQCCKGIREFVFC

SEQ ID NO: 60434 - protein, 147 aa, Zea mays
  Coding DNA Sequence Number=SeqID_18655
  Subcellular localization annotation: CTP_CleavageSite=93; ConfidenceScore=5.07e-01
MASSIHGRRSGTPAPRGTDRVVGTKATQHQTPPPRAADDACKDALRLLACGSTIITRSSARSSAYSRNNTVAWAASPARRKAWKIEASEQLVCARTISSIIPMHIPIYSNSTIASTAEECKSAGVGLIDRVKRKKTSIVQVSKHTMA

SEQ ID NO: 60435 - protein, 111 aa, Zea mays
  Coding DNA Sequence Number=SeqID_18656
  Subcellular localization annotation: CTP_CleavageSite=50; ConfidenceScore=5.21e-01
MSRVGKMVDDGKIQGVGADLAPNTRKNNSAVLSAGRGRSVALDRTARDLAAGAVSPCTLVVRSVLGAQTVCACAEGVLLHNELESRLPGGTPSGRRDLGCVLGLADCPRRL

SEQ ID NO: 60436 - protein, 322 aa, Zea mays
  Coding DNA Sequence Number=SeqID_18657
  Gene Ontology: Mol. function=DNA binding
  Homolog annotation: Hit_ID=Q2QX50; Match level="QueryCoverage=59%, HitCoverage=63%, E-value=5e-24, Identity=37%"; Hit description =Expressed protein
MAGSSLSGGGSTGGEDWAALEEADAVAAAAVEEQGDSVVQEEPNMVEEADSVLGQEEDTAVEVVEVDAAATTGSVDQRLLDLRLLLFRQTPLAVGSPKCMSPAEKKSTSTVDIPCQAHSMVDLSGQLCLHVAQSCALYKSEDEHEKGFQFMHCWNKLRLQPKWLGKVDDLAVAKPSNKKQKTTREGDANGTLPYETKESQVQVVENYQLTRPPGKKIAKATLVQEKRKSVTVAIENLWAAKKESDAEKEQKKEERFNKAFALEVDRVNTEKALMEVRKQEIELQKRRDEERIINMDLSGLTEEQQSYYTKLRAKILDQLSDA

SEQ ID NO: 60437 - protein, 322 aa, Zea mays
  Coding DNA Sequence Number=SeqID_18658
  Gene Ontology: Mol. function=protein transporter activity; Cellular component=membrane; Biological process=intracellular protein transport
  Homolog annotation: Hit_ID=Q5S1U0; Match level="QueryCoverage=81%, HitCoverage=86%, E-value=3e-22, Identity=35%"; Hit description =Syntaxin related protein
  Pfam annotation: Domain name=SNARE; Domain location=191-255; Score =15.3; E_value=0.013; Accession=PF05739.9; Description=SNARE domain
MEAGLPPRPPPPPQALVAHCVFQINTKVSELRRLERELAAVAVGGDARVVRERIHRARADVTRLARNAARRLADPAAAAAVMSKLATDFQAALRVFLLVHGRIIEDDRHEATAAARRAPTMFRFRPRSPPSYGSRIGSQLTNANTNANATAGADQQCDIQIQQQHLVESRRMQELALLDNDIAFSEALIEERKLEIRKIQRDMDIAEINEIFVHLAKLVHDQQGAIDIVESNMEKATMDTSKAKEQLSRVALTHETDSAMKCSLTTVFGLVKLIFACVLELQSSPGHRLWCLGGKKIKPAEEVEIKDVDGNLIRTANSEYED

SEQ ID NO: 60438 - protein, 130 aa, Zea mays
  Coding DNA Sequence Number=SeqID_18659
  Gene Ontology: Mol. function=metal ion binding
  Homolog annotation: Hit_ID=Q6K506; Match level="QueryCoverage=73%, HitCoverage=65%, E-value=3e-21, Identity=58%"; Hit description=Ring -H2 zinc finger protein-like
MEAAGGGSYRVCDTVVLVCLACASALIVSTMAVCFRRAFANGYTASAGATAANGRSQCGLAPSALSAIPKLAYRRGAGAGAGWAQCAICLALVRDGETSAIMEVRILNVSMSGKKLVSSSFLRYNMYETI

SEQ ID NO: 60439 - protein, 180 aa, Zea mays
  Coding DNA Sequence Number=SeqID_18660
  Gene Ontology: Mol. function=zinc ion binding; Cellular component =integral to membrane; Biological process=ubiquitin cycle
  Homolog annotation: Hit_ID=Q94IZ7; Match level="QueryCoverage=62%, HitCoverage=54%, E-value=7e-19, Identity=42%"; Hit description=Ring -H2 zinc finger protein-like
  Pfam annotation: Domain name=zf-C3HC4; Domain location=106-147; Score= 24.6; E_value=0.00035; Accession=PF00097.15; Description=Zinc finger, C3HC4 type (RING finger)
MSAVDGSPGTPPPPGHRGCCASGATLELVGAFTAVCLVLYGVILYMNYLYVRWSGRDGVHRTDSGAGGLPARKRAGGGIDKAALAAMPVVRFKADAHCGGDSPVECAVCLSAMQDGDAVRALPGCRHAFHVTCVDAWLCARATCPVCRARPALPPPQQAPKAGAMVAGSSGRHPDLESQV

SEQ ID NO: 60440 - protein, 86 aa, Zea mays
  Coding DNA Sequence Number=SeqID_18661
  Subcellular localization annotation: CTP_CleavageSite=42; ConfidenceScore=5.30e-01
MAPDPRLALSKAWVFSFVGSRDPTESSLDPTPRGPGPVPGALADVVTANLPSVIPPSTSAPVAGGHVAPTPGGFVGSRTGRLIPAT

SEQ ID NO: 60441 - protein, 69 aa, Zea mays
  Coding DNA Sequence Number=SeqID_18662
  Homolog annotation: Hit_ID=Q8LR43; Match level="QueryCoverage=77%, HitCoverage=18%, E-value=5e-13, Identity=72%"; Hit description =Putative transcription factor
MAPPYNNNYTGEAWNNSGGGVHDSGSPQIVAAAAHHSPFPSLLSLAPRPHQLAFYSSEADQQFQVYCSI

SEQ ID NO: 60442 - protein, 165 aa, Zea mays
  Coding DNA Sequence Number=SeqID_18663
  Gene Ontology: Mol. function=zinc ion binding
  Homolog annotation: Hit_ID=UPI0000DB7FBC; Match level="QueryCoverage =57%, HitCoverage=64%, E-value=6e-18, Identity=40%"; Hit description =PREDICTED: similar to CG8675-PA, partial
MSKRQGPPKHQNRYAWKPNLGQKINETEPGGRFRPLSEITGVCQRCRDQIDWKRRYGKYKPIVEPAKCQKCNKRNVRQAYHNVCRDCSKDLGICAKCCTCVNELVGRDANEEESERKSLEEAVRGARERERRTLLRISYTVEFELGSCFGKVPVPSSETLRYNEN

SEQ ID NO: 60443 - protein, 85 aa, Zea mays
  Coding DNA Sequence Number=SeqID_18664
  Pfam annotation: Domain name=DUF1664; Domain location=2-77; Score= -30.0; E_value=0.025; Accession=PF07889.3; Description=Protein of unknown function (DUF1664)
MGLNAIQYNSMTIPPLTVLVAKKHLAGRIDRVDCSLDECQEITEATREEVTIIHGDLSAFLSAARHLNHEPLSLSQQGSWTKTSK

SEQ ID NO: 60444 - protein, 191 aa, Zea mays
  Coding DNA Sequence Number=SeqID_18665
  Subcellular localization annotation: CTP_CleavageSite=59; ConfidenceScore=5.04e-01
MATAAPFLAARICAGDRCPDYTEHLTSMSLAQNNGCNRTNMEVRCSSTIRVRRFPATVRCGTTARIDSGDKLPSLINSPAPRNTPVQTPDDSRNATTPPDSCYGCGQKTQRRQLSLTLWWRRQLVAAVELHAGLQDGAKNGGSAFQLYRIDGFDFLTKWVLHHWQEIPHQALLSKAYLRDKLAQETSRAYP

SEQ ID NO: 60445 - protein, 57 aa, Zea mays
  Coding DNA Sequence Number=SeqID_18666
MPPLFRYLSRAELSVPPELVGVVLAGVQFGTTARFPVIRCGGRKEDGLCAVGLVAEV

SEQ ID NO: 60446 - protein, 114 aa, Zea mays
  Coding DNA Sequence Number=SeqID_18667
MAGKSRASAKPSSSGQLPRQGRGAASWSELGTELEQAHGRLGASREQGAAGCRGEGGQCHGRSRGTRQAGAPRLTTRTSRTAGRARIREPAWAEASTGASQGALRAGDRCSQLG

SEQ ID NO: 60447 - protein, 67 aa, Zea mays
  Coding DNA Sequence Number=SeqID_18668
MAIDSKEADPFETINVVLEFPDVFPKDLPEKMSQDKKAVAKTKLSEEEKLLEEKTAGFIESIAKTNT

SEQ ID NO: 60448 - protein, 43 aa, Zea mays
  Coding DNA Sequence Number=SeqID_18669
MGKGKKSKVRGSGDNLIDSSDADSVGSSSTALSDQLLGLNLLQ

SEQ ID NO: 60449 - protein, 63 aa, Zea mays
  Coding DNA Sequence Number=SeqID_18670
MPVDLDDLSASCVPLVLSFKAPCQALPLEAAFEHNPYQVFDGNSEPILIVDLRLSNHFGHGAQ

SEQ ID NO: 60450 - protein, 94 aa, Zea mays
  Coding DNA Sequence Number=SeqID_18671
MGREERALLGAMGAEGENTEFQLDARKKTELGTAEEVQGALRAGAEQGRTPWEGRNAGWRRGWMRLENIRGGARGREDKERETSCKKICRGDDG

SEQ ID NO: 60451 - protein, 68 aa, Zea mays
  Coding DNA Sequence Number=SeqID_18672
MARARAYKAPRDFDRTPPHALDLTGAQSHRRLPVHGVPAAARSPATVDRQTEPFPATPDPWKRLCTPW

SEQ ID NO: 60452 - protein, 60 aa, Zea mays
  Coding DNA Sequence Number=SeqID_18673
MAPPSAAGAPPLGWRAVVGVYASLDTRGAALIRSEQATVDSEVQRVEVDEQELIEGKLCP

SEQ ID NO: 60453 - protein, 494 aa, Zea mays
  Coding DNA Sequence Number=SeqID_18674
  Gene Ontology: Mol. function=protein serine/threonine kinase activity; Cellular component=integral to membrane; Biological process=protein amino acid phosphorylation
  Homolog annotation: Hit_ID=Q66QA4; Match level="QueryCoverage=99%, HitCoverage=58%, E-value=1e-154, Identity=60%"; Hit description =Putative leucine-rich repeat receptor-like kinase
  Pfam annotation: Domain name=LRR_1; Domain location=117-139; Score =2.9; E_value=83; Accession=PF00560.23; Description=Leucine Rich Repeat
  Pfam annotation: Domain name=LRR_1; Domain location=12-34; Score =17.5; E_value=0.048; Accession=PF00560.23; Description=Leucine Rich Repeat
  Pfam annotation: Domain name=LRR_1; Domain location=36-58; Score =13.4; E_value=0.83; Accession=PF00560.23; Description=Leucine Rich Repeat
  Pfam annotation: Domain name=LRR_1; Domain location=60-82; Score =13.2; E_value=0.96; Accession=PF00560.23; Description=Leucine Rich Repeat
  Pfam annotation: Domain name=Pkinase; Domain location=209-479; Score =133.6; E_value=5.6e-37; Accession=PF00069.15; Description=Protein kinase domain
  Pfam annotation: Domain name=Pkinase_Tyr; Domain location=209-479; Score=102.6; E_value=1.1e-27; Accession=PF07714.7; Description =Protein tyrosine kinase
  Pfam module annotation: Pfam domain module=LRR_1::LRR_1::LRR_1::LRR _1::Pkinase::Pkinase_Tyr; Domain location=117-139::12-34::36-58::60 -82::209-479::209-479
MPEDETIDGFQNLQVLSMSNCSLSGKIPLWLSKLKNLQVLLLHTNQLSGTIPAWIKSLESLFHLDISSNKLTGEIPTALMEMPMLTTEKTATHLDPRVFELPVYKNPSLQFRITSALPKLLKLGYNNLTGAIPQEIESAIPSAWKQPTLPLRTEYFLTITWKGLFLLEGQFSTFSNNSFEEQSLVIVPRGEGGENKLKFADIVKATNNFHQGNIIGCGGYGLVYKAILPDGTKLAIKKLNGEMLTMEREFKAEVEALSMAQHENLVPLWGYYIQGDSRLLVYSYMENGSLDDWLHTMDDDASTFLSWPMRLKIAQGASQGLSYIHDVCKPHIVHRDIKSSNILLDKDFKAYVADFGLSRLVLANKTHVTTELVGTLGYIPPEYGQGWVATLRGDIYSFGVVLLELLTGRRPVSALFLSKELVKWVQEMKSEGKQIEVLDPHLRGLGHDEQMLKVLEIACKCVDHDACMRPTILEVASCLDTIEPTLRMQNSVRI

SEQ ID NO: 60454 - protein, 216 aa, Zea mays
  Coding DNA Sequence Number=SeqID_18675
  Gene Ontology: Mol. function=receptor activity; Cellular component =integral to membrane; Biological process=protein amino acid phosphorylation
  Homolog annotation: Hit_ID=Q6ET59; Match level="QueryCoverage=76%, HitCoverage=23%, E-value=8e-54, Identity=64%"; Hit description =Putative phytosulfokine receptor
  Pfam annotation: Domain name=LRRNT_2; Domain location=45-84; Score =41.3; E_value=3.3e-09; Accession=PF08263.3; Description=Leucine rich repeat N-terminal domain
  Pfam annotation: Domain name=LRR_1; Domain location=112-134; Score =10.0; E_value=3.8; Accession=PF00560.23; Description=Leucine Rich Repeat
  Pfam annotation: Domain name=LRR_1; Domain location=136-157; Score =4.1; E_value=49; Accession=PF00560.23; Description=Leucine Rich Repeat
  Pfam annotation: Domain name=LRR_1; Domain location=162-185; Score =7.0; E_value=14; Accession=PF00560.23; Description=Leucine Rich Repeat
  Pfam annotation: Domain name=LRR_1; Domain location=187-210; Score =9.3; E_value=5.2; Accession=PF00560.23; Description=Leucine Rich Repeat
  Pfam module annotation: Pfam domain module=LRRNT_2::LRR_1::LRR_1::LRR_ 1::LRR_1; Domain location=45-84::112-134::136-157::162-185::187-210
MQQQQRVHPSHDNDKHNNDGFLKPLLGLALALLLSAFLPPTSSCSEQERSALLQFLAGLSRDGGLASSWRNGTGCCAWEGVGCGADGAVTDVSLASRGLEGQISASLGELTALLRLNLSHNLLSGGLPAELTSSNSILVLYVSFNRLNGGLRELPSSTPPRPLQVLNISTNLFTGPFPSTTWEAMTSLVALIASNNSFTGQIPSHICSSSTGLGCD

SEQ ID NO: 60455 - protein, 171 aa, Zea mays
  Coding DNA Sequence Number=SeqID_18676
  Gene Ontology: Mol. function=metal ion binding; Cellular component =nucleus; Biological process=transcription
  Homolog annotation: Hit_ID=Q339V3; Match level="QueryCoverage=97%, HitCoverage=38%, E-value=3e-28, Identity=43%"; Hit description =Expressed protein
MTGPKRGIELCGEIMLEFDMRIKRGGEEKDDPQLIDGVAIVLDEMSMPRSTYAFTKRIHGDCGAVDITVSRLDFAVEATIQLHVSEVEGSFSLRAGCFTSGLCEEIQIFKGTISEPRALRRCVVAAVHDTWMDVKLKVDDSGHSYSSDDNPEHWCSFKTTSHGWTCQQSCS

SEQ ID NO: 60456 - protein, 205 aa, Zea mays
  Coding DNA Sequence Number=SeqID_18677
MERRRVAASLVAVVVPLLLCSCFVAGDQGEPAAGGSDTNQLCVSKCGTCPTICTASPPTILPMTAPPPPALALLPLSAPPPPYLELGPPPPPGDEYDLLPPVTPLTSPAPESPCSTPPSSSSSSSEPPPSPPPPPPPKSSSGSSSSSSSPSAPSHFSSPPTPPSSSNPYYYLYLSGGAKVRGGASSACATALVLAAFLPAVALFK

SEQ ID NO: 60457 - protein, 695 aa, Zea mays
  Coding DNA Sequence Number=SeqID_18678
  Gene Ontology: Mol. function=two-component response regulator activity; Cellular component=nucleus; Biological process=two -component signal transduction system (phosphorelay)
  Homolog annotation: Hit_ID=Q2RAB7; Match level="QueryCoverage=94%, HitCoverage=95%, E-value=0.0, Identity=68%"; Hit description=CCT motif family protein, expressed
  Pfam annotation: Domain name=CCT; Domain location=645-683; Score =76.0; E_value=1.2e-19; Accession=PF06203.4; Description=CCT motif
  Pfam annotation: Domain name=Response_reg; Domain location=53-169; Score=109.7; E_value=8.5e-30; Accession=PF00072.14; Description =Response regulator receiver domain
  Pfam module annotation: Pfam domain module=CCT::Response_reg; Domain location=645-683::53-169
  Subcellular localization annotation: CTP_CleavageSite=33; ConfidenceScore=5.09e-01
MSPDADAAAGGGGGGEASAGAGAGASSPPASASAAANGRALVRWDQILPRRSLRVLLVEHDDSTRQIVTALLRKCGYRVAAVADGMKAWEVMRERAYDFDLVLTEVAMPSLSGIQLLSRIAAAAECKNIPVIMMSSQDSIGTVLKCMQKGAVDFLVKPVRKNELGNLWQHVWRRHAMNCQTNGSENNAASNHVSTNVANGSKTGENNDEESDAQSFGNKRETEIKSAETLPDIRRDEMAGSSKKIELQNKSNDGVNTKVDASKDSDGAPSESEKNVRSKCLNGITSAKVAEQIMDNALRITDASSRRPTNLGKDLAMTEPAADRKCQSLVMENNAVKEKNPGEKSKSAVIGHADSYPSQFLETNLGKQQYRNGYKNQEFREKDIFNHSNSSAFSRYGNRRIESSGEIQFLPSRCIVGQEQHVHGKDPVFQPNGVLLPPNDHNTGESTRQARITLDSSMEGADIICSSSAREDAGASSSSHRKDSMSHPSYGFVPVPIPVGAMMPYHCGAILQPVYYPQGPLMHCNSSAINKATIHQTSGQSNYREDCGSGRPSQVDEHKQSEEKHQLHHSRQIHRESGQPVDMVRAHMDHANQSASCSRDICKGSGCTGSGEADTNANTTVALESGNESGIQNSDRSHREAALMKFRMKRKDRCFDKKVRYHSRKKLAEQRPRVKGQFVSQKLKAAMATEAETDS

SEQ ID NO: 60458 - protein, 130 aa, Zea mays
  Coding DNA Sequence Number=SeqID_18679
MARGKGNRSECRSTEGKRKRPPSPPAEDFSDSEFSSEYDGSPALVFPMASSDDSDDSIKLSVAERAYIRYIDCTGLGGSDDSEGEDSLEEEEEEDSSESEEGTDGDGDDEGDDDDGDDDGDDAGGKVPPA

SEQ ID NO: 60459 - protein, 61 aa, Zea mays
  Coding DNA Sequence Number=SeqID_18680
MARRRSQKNKKTTPKENKEICHQVKDQVFHYVDDGYSSVKVVYNFYIQDSLKIAQKSDGSR

SEQ ID NO: 60460 - protein, 149 aa, Zea mays
  Coding DNA Sequence Number=SeqID_18681
MAKVVVRVLIVKGGCSSSPEVMTRGQLQSSVNSTWVLFIYLYAIVQLCAYIHALNNYIQRFCSRDCGLVKKEFLEVLIHPLLGIIVSYRNEYGIGHHKLSEGGTLLVELGEHNLEKIGKAKDGGKKSFEIPSAQEKVKEVKGVGAHSWL

SEQ ID NO: 60461 - protein, 126 aa, Zea mays
  Coding DNA Sequence Number=SeqID_18682
MEEHFSYLVEHDVGVDNEDGGGSGAELSLRGCGAGGAGDEAAVDVIAEVVLPDDLRRGNDGVRIHLPVKEQEEGLKALGTAVNVVVHRLHFASKKSAIMKAHLSAFPADLGMDIVICTTERKRSIN

SEQ ID NO: 60462 - protein, 72 aa, Zea mays
  Coding DNA Sequence Number=SeqID_18683
  Homolog annotation: Hit_ID=Q6K1T2; Match level="QueryCoverage=56%, HitCoverage=7%, E-value=2e-11, Identity=80%"; Hit description =Putative lysyl-tRNA synthetase
MAKEVKSTEGEGDDNYSYEVSLDEDFLTSLEYGMPPASGMGSKQFQLDNGTREGLDKVLKAASNEPETVMHL

SEQ ID NO: 60463 - protein, 145 aa, Zea mays
  Coding DNA Sequence Number=SeqID_18684
MGEWERERELGEEESLVVGGRREELDCPFIEEGGDERSARERCMAGGFKAIDDIHGASMRERETNALKFITPRESERRVGQLGWRRGADPGATGLGRASCGQGGCAVGRAASGSADVVARWRGSRGAGPKRRSRARTRERKGGER

SEQ ID NO: 60464 - protein, 109 aa, Zea mays
  Coding DNA Sequence Number=SeqID_18685
  Subcellular localization annotation: CTP_CleavageSite=68; ConfidenceScore=5.32e-01
MRPVVATRELIHLRLQTTASFYLAAASAPSRARRAPPPVAVPAPSAATPSRARPSPRPRAYRCATCPRAPARPCPSCPALLPSSSPPGQARLRARNPNVRDEPPSRPPQ

SEQ ID NO: 60465 - protein, 95 aa, Zea mays
  Coding DNA Sequence Number=SeqID_18686
  Subcellular localization annotation: CTP_CleavageSite=37; ConfidenceScore=5.17e-01
MSGAPEDSNSNSPPSGISRGTRAIIHRTVRCTPDSVRCAKEKRPQELASFGNLQRLVRYNSPDMSVRNVSVLGDDLKTVPDSPERPDLTQGKDGR

SEQ ID NO: 60466 - protein, 387 aa, Zea mays
  Coding DNA Sequence Number=SeqID_18687
  Gene Ontology: Mol. function=lactoylglutathione lyase activity; Biological process=carbohydrate metabolic process
  Homolog annotation: Hit_ID=Q6XC06; Match level="QueryCoverage=99%, HitCoverage=99%, E-value=1e-89, Identity=57%"; Hit description =Glyoxalase I
  Pfam annotation: Domain name=Glyoxalase; Domain location=136-376; Score=48.1; E_value=2.9e-11; Accession=PF00903.15; Description =GlyoxalaseBleomycin resistance proteinDioxygenase superfamily
  Pfam annotation: Domain name=Glyoxalase; Domain location=24-127; Score=95.9; E_value=1.2e-25; Accession=PF00903.15; Description =GlyoxalaseBleomycin resistance proteinDioxygenase superfamily
  Pfam module annotation: Pfam domain module=Glyoxalase::Glyoxalase; Domain location=136-376::24-127
MATGSEASKAAEAVVDWHKHDSKRMLHAVYRVGDLDRTIKYYTECFGMKLLRKRDVPDENCTIYYGVDKYDIGTGFGHFAIANDDVYKLAENIKSKGGKITREPGPVKGGSTVIAFAQDPDGYMFELIQRADTPEPLCQVMLRVGDLERSIKFYEKALGMKLLRKKDVPDYKALSSKDDSTVEILSFAFGTLDEAFLHLSTKQASLLLGTGGKKRATSSVYKEIQNFASLWDSGCNRPSSSALANKLLSTSITRIKSIGDKGFPWRNPLWWCIRSPGSPLTNTWVDDYTIAMLGYADEDKTTVLELTYNYGVTEYSKGNAYAQVAIGTNDVYKSAEAVDLATKELGGKILRQPGPLPGINTKIASFVDPDGWKVVLVDNTDFLKELH

SEQ ID NO: 60467 - protein, 210 aa, Zea mays
  Coding DNA Sequence Number=SeqID_18688
  Homolog annotation: Hit_ID=Q8W1B3; Match level="QueryCoverage=41%, HitCoverage=57%, E-value=3e-33, Identity=76%"; Hit description =Putative receptor-interacting protein
  Subcellular localization annotation: CTP_CleavageSite=56; ConfidenceScore=5.37e-01
MQQIISACKLPHTQRAAAFLPPRPSLRRLDRPVGVAQAALSFCQTGQWSSEVTAVTSALPGGARQDKADNQRLQAASHATGRRVPAAEAIAQAPSSPRFRQARRRCQEENKQQQEAEEGSGADEQEQQKRTFLSLEEAGLVEMSGLSTHERFLCRLTISSLNLLRVISEQEGVPIEELNAGRVCDWFLKDKLKREQNVGTAVLQWDDPGF

SEQ ID NO: 60468 - protein, 116 aa, Zea mays
  Coding DNA Sequence Number=SeqID_18689
  Homolog annotation: Hit_ID=Q9AXB0; Match level="QueryCoverage=42%, HitCoverage=13%, E-value=5e-10, Identity=66%"; Hit description =Putative uroporphyrinogen decarboxylase
MAQMFRLQTWASFDINFQVKGQLENIPLHQALCPDEPLLVRAARGEDGIPHWMMRQAGRYMAEYQASAKGKLTFSHRVRGAPSCEVLRWDFDLKVQGDAYGVDVRHRDNKTGQHVE

SEQ ID NO: 60469 - protein, 459 aa, Zea mays
  Coding DNA Sequence Number=SeqID_18690
  Gene Ontology: Mol. function=heat shock protein binding; Cellular component=intracellular; Biological process=protein amino acid phosphorylation
  Homolog annotation: Hit_ID=Q75LG4; Match level="QueryCoverage=87%, HitCoverage=88%, E-value=1e-150, Identity=67%"; Hit description =Putative pentatricopeptide repeat protein
  Pfam annotation: Domain name=PPR; Domain location=274-308; Score =25.7; E_value=0.00016; Accession=PF01535.11; Description=PPR repeat
  Pfam annotation: Domain name=PPR; Domain location=311-344; Score =18.3; E_value=0.028; Accession=PF01535.11; Description=PPR repeat
  Pfam annotation: Domain name=PPR; Domain location=347-381; Score =10.3; E_value=0.44; Accession=PF01535.11; Description=PPR repeat
  Pfam annotation: Domain name=PPR; Domain location=74-108; Score=19.2; E_value=0.015; Accession=PF01535.11; Description=PPR repeat
  Pfam module annotation: Pfam domain module=PPR::PPR::PPR::PPR; Domain location=274-308::311-344::347-381::74-108
  Subcellular localization annotation: CTP_CleavageSite=39; ConfidenceScore=5.41e-01
MARAPRPSAVPTLLRLLSSHPSLSTAAHAALLKSSSLTSAVPVAATALLTAYANAGHPGAASRLFDEMPAPDAVAWNALLACLVRHGRAGAAAAAFHGMSVSALPPTAATLCTMLKACAASRAARPGRQLHARGVVSRHADADVMVATALVDLYMSCGHVEDAMRVFVLTRCPKDAALHNAVLSGCVENGRFSDAFSTLRRRTELNGISLTAALTACAATANLAYGTQVHCKALRGDFDSDTITCNALIDMYAKCGRATAARVVFDRMATRNVVSWSSMMGAYSRHGHGVDALDLFKLMEEAAPTVLPNAITFLAVLSACGHSGLVDEAQSMLHLMKSKYGIDPQPEHYACVIDMLGRTGRVDEAWDLYSSLLTASRNKPSSAISVAMLNACRANVDAARGKEVAVRMLEADPRNPGIHVLISNFHAALRQWPQSNESRRIIVDKGLRKEAASSHVCFG

SEQ ID NO: 60470 - protein, 201 aa, Zea mays
  Coding DNA Sequence Number=SeqID_18691
  Homolog annotation: Hit_ID=Q942Z3; Match level="QueryCoverage=64%, HitCoverage=39%, E-value=6e-16, Identity=39%"; Hit description =Putative shock protein
MWHAPLRFTIPPAADPRALALHVLLPAERAFGDRDVGEVVVPVQDLAAASPDGADQRHLSYQVRRPVSSRKRGVLHMTTSPYRLSDEPDAHNHPYAQVPPASSMRHLGKAADAAITAYPVATPRGGQYHQPYGPAPLRCVPGATTSTGTARTGAAPAASSGGGMSTAGLGFGLGLLGGLVIGDAEVDAAYDGGGFMDGMGL

SEQ ID NO: 60471 - protein, 90 aa, Zea mays
  Coding DNA Sequence Number=SeqID_18692
MAPCILCDDGGSQPPYRSKRTMYYVISGDDVEPIEVVDVPDDDERHYHEFVDKAQFEETDEEEEEENIAMGVDEQGDSDDVSRLDYDKDN

SEQ ID NO: 60472 - protein, 141 aa, Zea mays
  Coding DNA Sequence Number=SeqID_18693
  Gene Ontology: Mol. function=DNA binding; Cellular component =mitochondrion; Biological process=DNA integration
  Homolog annotation: Hit_ID=UPI00004C1731; Match level="QueryCoverage =99%, HitCoverage=9%, E-value=3e-72, Identity=90%"; Hit description =UPI00004C1731 related cluster
  Pfam annotation: Domain name=rve; Domain location=1-138; Score=58.6; E_value=2e-14; Accession=PF00665.16; Description=Integrase core domain
MKKAPRGFSHLLVTIDKFSKWIEVRPLTSIRSEQAVAFFTNIIHRFGIPNSIITDNGTQFTGKKFLDFCDDHHIHVDWAAVAHPMTNGQVERANGMILQGLKPRIYNDLNKFGKRWMKELPSVVWSLRTTLSRAMGFSPFF

SEQ ID NO: 60473 - protein, 72 aa, Zea mays
  Coding DNA Sequence Number=SeqID_18694
  Homolog annotation: Hit_ID=Q9FG92; Match level="QueryCoverage=86%, HitCoverage=22%, E-value=3e-13, Identity=50%"; Hit description =Genomic DNA, chromosome 5, P1 clone:MQD19
MIRRLEKQQRSNGEDFEYVRFFPKNEKYVSLFTGGNVQDIVQERNKWRKQIKENIMADAANGKDNIVGIHII

SEQ ID NO: 60474 - protein, 248 aa, Zea mays
  Coding DNA Sequence Number=SeqID_18695
  Gene Ontology: Mol. function=metalloendopeptidase activity; Cellular component=mitochondrial respiratory chain; Biological process =proteolysis
  Homolog annotation: Hit_ID=Q5JJV3; Match level="QueryCoverage=76%, HitCoverage=35%, E-value=2e-72, Identity=69%"; Hit description =Putative mitochondrial processing peptidase
  Pfam annotation: Domain name=Peptidase_M16; Domain location=85-232; Score=155.2; E_value=1.7e-43; Accession=PF00675.10; Description =Insulinase (Peptidase family M16)
MAMLCRATRVLRKVCGLGPAAAARRLSAAEAFAACEGSLLRPLPGLDLPPCLPDNLSRSPTRITTLPNGLRVATEDVPCGLILKLIYGARLRQGPSACIGFFVDSGSIYESGETTGVSHLLERMAFKDTKHRSHLNIVSELELAGGNVGASASREQMVYSYDTLKGYMPEALEILIDCMRNPLFLQEEVERQLVLAREEVNELQKNPEKFLHEQLNLVGYSGALANPLIAPEDALARINDKIIQKFYH

SEQ ID NO: 60475 - protein, 564 aa, Zea mays
  Coding DNA Sequence Number=SeqID_18696
  Gene Ontology: Mol. function=hydrolase activity, hydrolyzing O -glycosyl compounds; Cellular component=apoplast; Biological process =carbohydrate metabolic process
  Homolog annotation: Hit_ID=Q5JJV0; Match level="QueryCoverage=97%, HitCoverage=96%, E-value=0.0, Identity=67%"; Hit description=Beta -fructofuranosidase, insoluble isoenzyme 4 precursor
  Pfam annotation: Domain name=Glyco_hydro_32C; Domain location=365 -515; Score=49.3; E_value=1.3e-11; Accession=PF08244.2; Description =Glycosyl hydrolases family 32 C termi
  Pfam annotation: Domain name=Glyco_hydro_32N; Domain location=66-324; Score=354.1; E_value=2.3e-103; Accession=PF00251.10; Description =Glycosyl hydrolases family 32 N termi
  Pfam module annotation: Pfam domain module=Glyco_hydro_32C::Glyco _hydro_32N; Domain location=365-515::66-324
  Subcellular localization annotation: CTP_CleavageSite=58; ConfidenceScore=5.54e-01
MAMAMARPCAFLLFFLVLFSYDGSGPGSSRRTRRSGVAQATQRVFLYPQAPKVSSIVSSKYRTAYHFQPPKNWINGPMYYNGIYHQFYQYNPNGSLWGNIVWAHSVSTDLVNWIRLAPAIERTTPSDINGCWTGLNPGQFRDPTTGWIGPDGLWRIAVGAEVDGHSAALLYESEDFVRWDRVDHPLYSSNASAMWECPDFFAAMPGENSGLDMSAAVPDGAKHVLKMSLDGSDKYMVGVYDLKGDAFVPDTVIEDRRLWSRIDYGNYYASKSFFDSKKGRRVIWGWTNETDSSSDDVAKGWAGIHAIPRTIWLDKDSKQLLQWPVEEIESLRGKQVRHQGLELRKGDLFEIKEIDTLQADVEIDFELTSIGSADPFDPSWLLDIEKQCREAGASAHGPFGLVVLASESMEEHTSVHFRVYYRSQEKHMVLMCADLRKSSLRPELYTPAYGGFFELDLEKEKTVVSLRTLVSGAEQTPQAFVLHVVVVIVVVVGNGITAAPLQIDRSAVESFGGGGRVCIMARVYPAALVDDGGTRMYAFNNGTSTVRVPRLEAWSMRRAQVNKG

SEQ ID NO: 60476 - protein, 306 aa, Zea mays
  Coding DNA Sequence Number=SeqID_18697
  Gene Ontology: Cellular component=intracellular; Biological process =signal transduction
  Homolog annotation: Hit_ID=Q8LHB9; Match level="QueryCoverage=77%, HitCoverage=87%, E-value=2e-85, Identity=68%"; Hit description =Putative rac GTPase activating protein
  Pfam annotation: Domain name=PBD; Domain location=28-74; Score=33.5; E_value=7.4e-07; Accession=PF00786.18; Description=P21-Rho-binding domain
  Pfam annotation: Domain name=RhoGAP; Domain location=103-245; Score =86.5; E_value=8.5e-23; Accession=PF00620.17; Description=RhoGAP domain
  Pfam module annotation: Pfam domain module=PBD::RhoGAP; Domain location=28-74::103-245
MQGGGGDEEDALAGRRPPRGGGDDEKMEIGWPTDVRHVAHVTFDRFHGFRGVPEELLQQQAAAAVVVDVVDGIVRAPSASKTVFGVSTESMQCSYDGRGNSVPTVLLHLQRRLVDQGGLRAEGIFRVAADGAQEQYARDQLNNSGVVPDGVDVHCIAGLIKAWFRELPGGLLDALPADEVTRCQTEEDCARLCGARLPAPRAALLDWAVNLMADVAREEKANKMGTRNVAMVFAPNMTRADDPLTALAHAVQLMNFLNMLVERALKHEHHRAGLVFFLLLCTSTRLGHIQSQRCAVAMTMPTDRRI

SEQ ID NO: 60477 - protein, 135 aa, Zea mays
  Coding DNA Sequence Number=SeqID_18698
  Homolog annotation: Hit_ID=Q1SGB8; Match level="QueryCoverage=59%, HitCoverage=58%, E-value=9e-17, Identity=49%"; Hit description =Vacuolar protein sorting 55
  Pfam annotation: Domain name=Vps55; Domain location=7-134; Score =38.8; E_value=1.9e-08; Accession=PF04133.4; Description=Vacuolar protein sorting 55
MAMTVEVRWMDSVALFGIRALEIPNRLRMACCTRVHVLHEYSTADTALMYVLVPMPCLFFGGGSTHFLTSREGGGWINAAKFLTGASAMGSLAIPAILRHAGLIETGAMFIEFTSFFILVCTVLCFHRATLDEDW

SEQ ID NO: 60478 - protein, 151 aa, Zea mays
  Coding DNA Sequence Number=SeqID_18699
MGKSKKGGSSSHHSGDKRKREPTPPSEDFGDSEYSEEEFSSEFEGSPAPASPPVLSDDSDDSQGIAAEVWTYIRVVERAGLEGSDESEYSSDEEDSSDSSEEGSGGDDGDGADDGGDGDGGSGSGKGGDGSGKGVGGSGGSGSKGSNKASG

SEQ ID NO: 60479 - protein, 743 aa, Zea mays
  Coding DNA Sequence Number=SeqID_18700
  Gene Ontology: Mol. function=ATPase activity, coupled to transmembrane movement of substances; Cellular component=integral to membrane; Biological process=transport
  Homolog annotation: Hit_ID=Q5JJV5; Match level="QueryCoverage=99%, HitCoverage=91%, E-value=0.0, Identity=64%"; Hit description =Putative ABC transporter
  Pfam annotation: Domain name=ABC_membrane_2; Domain location=1-245; Score=274.8; E_value=1.7e-79; Accession=PF06472.5; Description=ABC transporter transmembrane region 2
  Pfam annotation: Domain name=ABC_tran; Domain location=359-538; Score= 103.8; E_value=5.2e-28; Accession=PF00005.17; Description=ABC transporter
  Pfam module annotation: Pfam domain module=ABC_membrane_2::ABC_tran; Domain location=1-245::359-538
VLRTAVGHRLAKVQGYLFRSAFLRRIPTFTRLIIENLLLCFLQSTLYQTSKYLTGSLGLRFKKILTDLVHADYFENMVYYKISHVDHRITNPEQRIASDIPKFCSELSDLVQDDLAAIVEGLIYIWRLCSYASPKYVLWILAYVIGAGGTIRKFSPAFGKLKSTEQQLEGEYRQLHSRLRTHAESVAFYGGENREASHIKQRFRALVKHLNVVLHENWWFGMIQDFLLKYLGATVGVILIIEPFFAGNLKPESSTLGRAEMLSNLRYHTSVIISLFQSLGTISISSRRLNILSGYANRIHELLDVSRELSGGRDRLITQNSSDGNYISEANYIEFSDVKVVTPSGNVLVDNLNLHLESGSNLLITGPNGSGKSSLFRVLGGLWPMVSGHIVKPGVGSNLNKEIFYVPQRPYTAVGTLRDQLIYPLTADQETEPLSYGGMVDLLKNVDLEYLLERYPLDKEVNWGDELSLGEQQRLGMARLFYHKPKFAILDECTSAVTTDMEERFCKRVRAMGTSCITISHRPALVAFHEIVLSLDGEGGWDIQDNRNGSFSPEVEFDVLKASESDRKSDALTVQRAFITSTKGNASMKPKKHSYSTEVIASSPSMEIEHTVQSSIVTQLQCSPRPLPVRVAAMSQILVPKLFDKQGGQLLAVVLLVFSRTWISDRIASLNGTSVKYVLEQDKAAFIRLAGTSVLQSAANSIVSPSLRNLTSRIALGWRIRMTNHLLQYYLKRNAFYKASFPH

SEQ ID NO: 60480 - protein, 110 aa, Zea mays
  Coding DNA Sequence Number=SeqID_18701
  Gene Ontology: Mol. function=ATPase activity, coupled to transmembrane movement of substances; Cellular component=integral to membrane; Biological process=transport
  Homolog annotation: Hit_ID=Q5JJV5; Match level="QueryCoverage=91%, HitCoverage=57%, E-value=4e-51, Identity=68%"; Hit description =Putative ABC transporter
  Pfam annotation: Domain name=ABC_membrane_2; Domain location=1-106; Score=-89.0; E_value=0.0021; Accession=PF06472.5; Description=ABC transporter transmembrane region 2
MTHDVEKLTNDLAGLLTGMVKPLVDIIWFTWRMKLLSGRRGVAILYAYMFLGLGFLRAVSPDFGDLANQEQELEGTFRFMHSRLRTHAESIAFFGGGSREKAANIVHHAT

SEQ ID NO: 60481 - protein, 159 aa, Zea mays
  Coding DNA Sequence Number=SeqID_18702
  Gene Ontology: Mol. function=transferase activity, transferring hexosyl groups; Biological process=carbohydrate biosynthetic process
  Homolog annotation: Hit_ID=Q10MP3; Match level="QueryCoverage=80%, HitCoverage=37%, E-value=4e-36, Identity=63%"; Hit description =Glycosyl transferase family 8 protein, putative, expressed
MVVVVVSLQFDGSVRFPGQIAGGARGVAFLRAPPFRNAADCGAGADNGTTANVYDPWLVHIATTLDEEYLRVSIAAVHSVVQHARCPESVVRAVFLQLWFKACYLDLGRVCELISTSVRQALEQPLNYARNYLAELLTPRHLPRLRPRPRGRRRQAVAH

SEQ ID NO: 60482 - protein, 87 aa, Zea mays
  Coding DNA Sequence Number=SeqID_18703
  Gene Ontology: Mol. function=transferase activity, transferring hexosyl groups; Biological process=carbohydrate biosynthetic process
  Homolog annotation: Hit_ID=Q10MP3; Match level="QueryCoverage=89%, HitCoverage=23%, E-value=4e-14, Identity=54%"; Hit description =Glycosyl transferase family 8 protein, putative, expressed
  Subcellular localization annotation: CTP_CleavageSite=36; ConfidenceScore=5.37e-01
MVVVVVSPSLQFDGSVRFPGQIAGGARGSPSAVPRRSAMPADCGAGANNGTTANVYDPWLVHIVITLNEEYLRGSIAADLLGGAARQ

SEQ ID NO: 60483 - protein, 145 aa, Zea mays
  Coding DNA Sequence Number=SeqID_18704
MAPKKETIRASTSLGDATKATLAEKKCKGTLTNDAPEATPKNDRAINNKHPRTENPLSPIKAPFARTILKTSLETPHQALPSGSRRHHRRRQSHGHLSQRPTQTMSTSHKRLSQRPTQTMSTSHKKQSPIKTKGDTRIQEVVNQY

SEQ ID NO: 60484 - protein, 107 aa, Zea mays
  Coding DNA Sequence Number=SeqID_18705
MEDVDATQYQRLARSLRYLVHTRPDLHSPSAACPREPHLVGYSDSDHADDIDASKSKAGSSSFSTTISISYTVSQYTDKMNHVQLQFRKYTAVEFHAMLLYNVQRQK

SEQ ID NO: 60485 - protein, 50 aa, Zea mays
  Coding DNA Sequence Number=SeqID_18706
MALIPLMSHPVLEGKPNANHVLTERYSRKRSEPPKESQYHPHNQHNSIVS

SEQ ID NO: 60486 - protein, 63 aa, Zea mays
  Coding DNA Sequence Number=SeqID_18707
MARWRPERGEVTCIGDTVAFTVARPLAMDGLATRVHCNVLNLPGTWRTTGQNPYEFEDTGLHS

SEQ ID NO: 60487 - protein, 144 aa, Zea mays
  Coding DNA Sequence Number=SeqID_18708
  Subcellular localization annotation: CTP_CleavageSite=51; ConfidenceScore=5.02e-01
MAEPWPAMAVPRNGAPSSKPNAAKSHGGQSKEVERFSRTGFLRLDGAVLLRSDEEDASDKYGPHGGVERSRRDGEWAMESAKETIPRMVPLAGGVHIAGPAQPAEKVGERGGGTPNTWVHLVGTLWLEWADEGERRWAKIGKVG

SEQ ID NO: 60488 - protein, 87 aa, Zea mays
  Coding DNA Sequence Number=SeqID_18709
MRYAGTRAEQRVAGIKGTFGSRMFEKAKRRRKGEEMATAFEGGRTDLLAATGARAGKLIACSTAWCSAEVPMLEYRRGGGLSSSGRI

SEQ ID NO: 60489 - protein, 84 aa, Zea mays
  Coding DNA Sequence Number=SeqID_18710
MAGGNTLAGAKERWLAGEGLDLEEGVHLAIDRLIDGVDLGLETEQREPLISDRAVFVRSDFIKSWPSYFDPADDSAYRFAGIPV

SEQ ID NO: 60490 - protein, 63 aa, Zea mays
  Coding DNA Sequence Number=SeqID_18711
MWGPHGRDTVWERSDQALEQVPTSRPTQATPTDDTNFVVAANAVPVNDRLSGSEPWSWSSDGG

SEQ ID NO: 60491 - protein, 65 aa, Zea mays
  Coding DNA Sequence Number=SeqID_18712
MRMMNLKMDNLNEYQDKGWSSRDRRLTNNNLVLFQVMLHMGWEFLQRKACDGESIMAMMGSTSEK

SEQ ID NO: 60492 - protein, 87 aa, Zea mays
  Coding DNA Sequence Number=SeqID_18713
  Subcellular localization annotation: CTP_CleavageSite=55; ConfidenceScore=5.05e-01
MGQMSLASAQLSRPNLRRALDHFTDGWVPLAGLPSPTLAPEAPDSRPPVSAPPPSSSRGRGLESVRDGADNFGQVGFGMILPPYHRC

SEQ ID NO: 60493 - protein, 134 aa, Zea mays
  Coding DNA Sequence Number=SeqID_18714
MCHYGDFVKRDQGSVNTSHLPVPPTLLAVGGPSIPDPVVQLLPKAKHTTRPIAAYCPCDTGLRSTNITSSISPRRAPFEECGERSSHRRGSSKHEKGWDGNGRQPGHNKSLPLMAQTCDPPDLGLRRHGSCLRN

SEQ ID NO: 60494 - protein, 109 aa, Zea mays
  Coding DNA Sequence Number=SeqID_18715
MAAALFFFFALAGMRSPAAVASAQCAHDLLWRLLVDGGMDGWTLQKRLDLVWYLFRPAVVPATGGVHPVGDLLPPVQPTRFRRVDGLTPGKLPRQLSFGRFFIGNSDKR

SEQ ID NO: 60495 - protein, 118 aa, Zea mays
  Coding DNA Sequence Number=SeqID_18716
MGVEWNPKVSGRQTTAPPHIGDGIGIARRTGGARHGLRRNWIGQVGRQGTSLRRSVRGERILRIGRAKAQGTYREHCGGGEDGAETNTHRREEDRADLDPEQIQPRLEVCGFTYPIVG

SEQ ID NO: 60496 - protein, 169 aa, Zea mays
  Coding DNA Sequence Number=SeqID_18717
MTRSRDILSKPAPRATIRFGNPDNVLDNEEATNRASEAPTLPKGDSLDIVGSFDHLHLDPLGGGNVRPCSLFSIFTKVVEALGLVQGLLSGLPPVKVRKRTWFLAEWDHPHLGLGMIHDLVDWGILCIHKKPRGDPHRCRVANGAAATEGLASARQSRWRFASLDLQQG

SEQ ID NO: 60497 - protein, 418 aa, Zea mays
  Coding DNA Sequence Number=SeqID_18718
  Homolog annotation: Hit_ID=Q8RUR5; Match level="QueryCoverage=65%, HitCoverage=97%, E-value=2e-57, Identity=46%"; Hit description =Harpin-induced protein-related-like
  Pfam annotation: Domain name=Hin1; Domain location=247-388; Score =122.0; E_value=1.7e-33; Accession=PF07320.4; Description=Harpin -induced protein 1 (Hin1)
  Subcellular localization annotation: CTP_CleavageSite=4; ConfidenceScore=5.28e-01
MAPRSVHARFLPFSLTRFQLFFPWNWNAPHPMGRRLGPRARASYKAAPPPPDLAASPVIPVSSSGASHSPQLFISLTSPSARFSRRGRPRATLNPQGTTPPDNLEKKHRQRRRASTSSQSQPGKIDSDEQPMMMHGNGHGHGRVHPASSSSDFSGEMNQSAVSDPSSSPLYSFHFEKPVPPPPPAGTYVVQVPKDKVFRVPPPENARLFDHYTRRARRRRRGSCSCACLLVGAAVALAAALAGVLACLVLGPKPPAYAVQALAVSGLVNASSSPAALSPGFDATVRADNRNGRLGVRYEGGRGRVSVSYGGALLADGAWPALYQAPRNVTVVVARARGSGVRLSRSVRGQLAAAERLRSVPFDMDVDVPVRLQLGVVRTWAVPLRARCTVAVDRLAADARVVSNSCDVKVRLLSWWRN

SEQ ID NO: 60498 - protein, 299 aa, Zea mays
  Coding DNA Sequence Number=SeqID_18719
  Homolog annotation: Hit_ID=Q6QP51; Match level="QueryCoverage=43%, HitCoverage=82%, E-value=2e-08, Identity=37%"; Hit description =Putative growth-regulating factor 1
MTASKKAGPSEGFNSRLRALGLRAHYWLEVRRPAPRKGSTAASGHSGSAPTTDQGARSDRSHFTAPLTDLTSGQPPPCAAPTAVPLDRVRLTAAQGSDSASAEEDDELRLARPQGSDSASAPEDDEFRLARPQGSDSASAPEDDELCLARPQGSDSASAPEDDELRLAQPQGSDSALASADGPASPDPGARTRPRPRKTDSTSTSEEPPPRPTPGLGRTHVTRGAIITLPLASSGYREQDRRPIWLAPVKQIMMAPRVLHDDGGSQPPYGSKETSARTRQPRQLSFRQAPALLQRPDIS

SEQ ID NO: 60499 - protein, 83 aa, Zea mays
  Coding DNA Sequence Number=SeqID_18720
MASGGGAPWVCTLCEASAEGYECLSEGRGGRVGTRQLVKGQGGDGHGLGVRRGRSPRRRVGHAQAVRRGGSDRWDHGLARAGE

SEQ ID NO: 60500 - protein, 455 aa, Zea mays
  Coding DNA Sequence Number=SeqID_18721
  Gene Ontology: Mol. function=calcium ion binding; Cellular component =mitochondrion; Biological process=embryonic development ending in seed dormancy
  Homolog annotation: Hit_ID=Q9LWW3; Match level="QueryCoverage=93%, HitCoverage=89%, E-value=1e-103, Identity=49%"; Hit description=Salt- inducible protein-like
  Pfam annotation: Domain name=PPR; Domain location=198-232; Score =38.4; E_value=2.4e-08; Accession=PF01535.11; Description=PPR repeat
  Pfam annotation: Domain name=PPR; Domain location=233-267; Score =39.9; E_value=8.7e-09; Accession=PF01535.11; Description=PPR repeat
  Pfam annotation: Domain name=PPR; Domain location=268-302; Score =39.5; E_value=1.2e-08; Accession=PF01535.11; Description=PPR repeat
  Pfam annotation: Domain name=PPR; Domain location=303-337; Score =18.6; E_value=0.022; Accession=PF01535.11; Description=PPR repeat
  Pfam annotation: Domain name=PPR; Domain location=338-371; Score =16.7; E_value=0.078; Accession=PF01535.11; Description=PPR repeat
  Pfam annotation: Domain name=PPR; Domain location=372-406; Score =39.1; E_value=1.5e-08; Accession=PF01535.11; Description=PPR repeat
  Pfam annotation: Domain name=PPR; Domain location=407-441; Score =28.0; E_value=3.3e-05; Accession=PF01535.11; Description=PPR repeat
  Pfam module annotation: Pfam domain module=PPR::PPR::PPR::PPR::PPR::PP R::PPR; Domain location=198-232::233-267::268-302::303-337::338 -371::372-406::407-441
  Subcellular localization annotation: CTP_CleavageSite=68; ConfidenceScore=5.28e-01
MEAQAGSTHRWSPGARAFSTAPATRTTVPLAHLADLPASLPESGYTVTPPVQPWPRRLTARSLSRLLLGAATPELAVLALRHALFHAAHPLPPSLPVFAAALSRLSHADAGAAARHLPPVLSLLRASRLPGLLRPPVPAAPPRAAGRSRPSAFSSPSRPSTPVLPPAPLTRSSTLSSPRAASASPPRSSAPRQPSYVVTYTTVLTAYCAKGDLEGAQQLFDDIIASGRRPDATMYTVLIDGYCHHRKLQDAARIMDEMGAAGVQPNEVTYSVVIEACCKERKSTEARDLTREMLGAGYVPDTPLCAKVVDVLCQDGKAGEANEMWRQMVKKSVPPDNTVVSTLIYWLCKKGMVQEARKLFDELERGFLPSLLTYNSLIIGLCENGELQEAGRVWDDMVERRYEPNAMTYEALIKGFCKIGKSNEGYALFKEMMSRGTQGRIYERGCRDCSSGCLP

SEQ ID NO: 60501 - protein, 72 aa, Zea mays
  Coding DNA Sequence Number=SeqID_18722
MSSMARAEAAKRKGAEWRSCPWARGAQLAVAVREREDGMGRKEAGQVLPFLKGCSLQQATPTLKCTVQDYKH

SEQ ID NO: 60502 - protein, 61 aa, Zea mays
  Coding DNA Sequence Number=SeqID_18723
MDRQPNLAHWKSGNPDLRNSVSICAAKARGLGSRTEPRSACKTREEAYCLFGINLCDMVHF

SEQ ID NO: 60503 - protein, 184 aa, Zea mays
  Coding DNA Sequence Number=SeqID_18724
  Gene Ontology: Mol. function=hydrolase activity; Cellular component =nucleus; Biological process=mRNA transport
  Homolog annotation: Hit_ID=Q6Z4P2; Match level="QueryCoverage=58%, HitCoverage=23%, E-value=3e-38, Identity=69%"; Hit description =Putative nucleoside-triphosphatase
MANLVNEWLSILYDQSVQSYFHQKAGVVVLKVVTQGNYYVITKTELAQTKPHHMIMSYDYRFFSSYLHYGLLAARAEVLKSGNGNGYNNCMLEGYQGQYKYGSETFEASASPSGASYSKCKNDVVKSLKVDEACTHLKCSFGGIWNGGGGAGQKKLFVASFFFDMADEVRCAKAYAHACVGGFS

SEQ ID NO: 60504 - protein, 132 aa, Zea mays
  Coding DNA Sequence Number=SeqID_18725
MDRNSLLANVWDTNISLGWYKTDSNSRCTEKPVVPHMPDGEKTTEATAKDVGGGSQPKPPSRRGSARFERLLSGLGAGPLVDVEPDKVKDEIRRWAKKVAALVRQLSFGAWAEKSDGGSSENHGAGDDGYES

SEQ ID NO: 60505 - protein, 504 aa, Zea mays
  Coding DNA Sequence Number=SeqID_18726
  Gene Ontology: Mol. function=catalytic activity; Cellular component =nuclear outer membrane; Biological process=meiotic spindle organization and biogenesis
  Homolog annotation: Hit_ID=Q8BH79; Match level="QueryCoverage=81%, HitCoverage=71%, E-value=7e-23, Identity=24%"; Hit description=Adult male corpora quadrigemina cDNA, RIKEN full-length enriched library, clone:...
  Homolog annotation: Hit description=B230341F08 product:hypothetical protein, full insert sequence
  Pfam annotation: Domain name=DUF590; Domain location=297-482; Score =169.2; E_value=1e-47; Accession=PF04547.3; Description=Protein of unknown function, DUF590
MAMCFMLLLICVSGMELQFQWDQVAAFVRQPDGSLFSWRERYCCFRYLIYGIVNKTNSEIAIKFDGKEFHWKQNEIKRKQLLRNWALNWLDFTWQPIDEIYSYFGTKIATYFAFLGMYTRWLFFPAVFGLTTQLIDFGSLQWLVLPAFFIFVISWAVFFLQFWKRKNSALLARWGINCSLSEYKNLGIELSSLSDSLTVEEKKFCDVSAEKSKLQRNEWFGVLLRIRNNAIIVLAIICLQLPFELAYAHLYEITETEAMKYLLTAVYLVAIQYYTRIGGKVSVNLIKYENNQGEESSSASLVYKVLENLIENSIPYLKYSYKKYIAVHKKKHEKESPVGRSVRLSTRVEKEYLKPSYTASIGAELEDGLFDDFLELALQFGMIMMFACAFPLIFCFAALNNVTEIRADALKLLVMLKRPEPRAAATIGAWLNIFQEGKWRIEPGLAAILIMEHALLLIKFGFSHFVPEEPAWVKANRVRYVAQAQNVCSKQLLRSISKFDGKLD

SEQ ID NO: 60506 - protein, 153 aa, Zea mays
  Coding DNA Sequence Number=SeqID_18727
MTASCPSAGRFCIAILWRPSNASSKEYCAKKLVMRSACTYVADTRGSHVIVSSMNTGHAAIRQARRHRVGQPAVDRELSRRQAPGRHGTPGQPVCERGGSASSLWRSSAINSRRRSSLTQTPLHQYNPESQIPPRHLPFYGARYSISAVPQPQ

SEQ ID NO: 60507 - protein, 127 aa, Zea mays
  Coding DNA Sequence Number=SeqID_18728
  Subcellular localization annotation: CTP_CleavageSite=58; ConfidenceScore=5.46e-01
MLHAAPCPRVWTSQQLRLASCGRAFYRALTLSLCSHLALTRPHLIVSSTRRRSPRPSRAKLVPAPPLTTVVHEPSGHHFVLKCSNPEPLLKLGEGPEHHRRRRRSSVSSGARGLDVSIRDPSSQEHR

SEQ ID NO: 60508 - protein, 212 aa, Zea mays
  Coding DNA Sequence Number=SeqID_18729
  Gene Ontology: Mol. function=transcription coactivator activity; Cellular component=nucleus; Biological process=regulation of transcription, DNA-dependent
  Homolog annotation: Hit_ID=Q94JE5; Match level="QueryCoverage=99%, HitCoverage=98%, E-value=2e-34, Identity=45%"; Hit description =Transcriptional coactivator-like
  Pfam annotation: Domain name=DEK_C; Domain location=4-59; Score=28.3; E_value=2.8e-05; Accession=PF08766.1; Description=DEK C terminal domain
  Pfam annotation: Domain name=PC4; Domain location=79-205; Score=81.2; E_value=3.1e-21; Accession=PF02229.6; Description=Transcriptional Coactivator p15 (PC4)
  Pfam module annotation: Pfam domain module=DEK_C::PC4; Domain location=4-59::79-205
MDEATKKVEATVLEIPRGSDMESVTENKVRTAAADRLGIDLSVSNRKLFVRGVVDEYLLSLSSQEEAKAAEEGDAGRESKDKERKEDEEEDEGKGGGKREYGDQGDLILCRLSSKRRVTLSEFKGRSLVSIREFYVKDGKEMPSAKEKSEEIISAGELICKSTFPPYSNQIHTGADLHPGPPGISMTMEQWEAFCNAAPAIEDAIKKLEDSD

SEQ ID NO: 60509 - protein, 429 aa, Zea mays
  Coding DNA Sequence Number=SeqID_18730
  Gene Ontology: Mol. function=transcription regulator activity; Cellular component=nucleus; Biological process=regulation of transcription
  Homolog annotation: Hit_ID=Q5N8F6; Match level="QueryCoverage=99%, HitCoverage=100%, E-value=3e-92, Identity=48%"; Hit description=BHLH protein-like
  Pfam annotation: Domain name=HLH; Domain location=275-324; Score =48.9; E_value=1.7e-11; Accession=PF00010.16; Description=Helix-loop -helix DNA-binding domain
MAWSETDAALFAAVLGAGRGAPPEHHAAAPGRARGVSPRASARLQDLLERGGAWTYGIFWQESCAGGRSVLGWSDGHCRDGGAPHHDDADRSVGAESARCCGCTRSTAAGTTKGADYALRLDPGHRRRDVLSGVHSAGLRTVVFLPCKGGVLELGSAVPVRETPETLRALQTALAVARPPAREECMRIFGQDLSPGGSARAPRSVDNWAPHPHLAAQATAASALASKEAAAGHKAPEPPRSIDFSKPGKPGHGQAGGEERRPRKRGRKPANGREEPLNHVEAERQRREKLNQRFYALRAVVPKISKMDKASLLSDAIAYIQELEDRLRGGGGGGGGCSAARPDSPDVEVKAMQDEVVLRVTTPLYAHPVSRVFHAIRDAELIVAASDVAVADEAVTHTLVLRSPGPEQLTAETVLAAMSRGMTSATPSP

SEQ ID NO: 60510 - protein, 220 aa, Zea mays
  Coding DNA Sequence Number=SeqID_18731
  Gene Ontology: Mol. function=nutrient reservoir activity; Cellular component=apoplast; Biological process=auxin mediated signaling pathway
  Homolog annotation: Hit_ID=Q94JF3; Match level="QueryCoverage=88%, HitCoverage=87%, E-value=6e-86, Identity=80%"; Hit description =Oxalate oxidase-like
  Pfam annotation: Domain name=Cupin_1; Domain location=63-211; Score =136.9; E_value=5.7e-38; Accession=PF00190.13; Description=Cupin
  Pfam annotation: Domain name=Cupin_2; Domain location=98-173; Score =39.7; E_value=9.7e-09; Accession=PF07883.2; Description=Cupin domain
  Pfam module annotation: Pfam domain module=Cupin_1::Cupin_2; Domain location=63-211::98-173
MASAARSAALRVLLLVAVAIAGALSDPTPLQDTCVADMRAATPVDGFACKPQSAVVDEDFFSRAIASAASTANPFGANSTRATVATFPGLNTLGVSITRVDLAPGGLNPPHSHPRASELVMVLQGEVLVGFTTGANRLFSKVVRENELFVVPRGLQHFQLNTGAGDAVFVAMFDSQSPGVVTPTFAMFSTKPAMPMEVLTKTFLTGEDQVNAIMSKFAGF

SEQ ID NO: 60511 - protein, 175 aa, Zea mays
  Coding DNA Sequence Number=SeqID_18732
  Gene Ontology: Mol. function=hydrolase activity, acting on ester bonds; Biological process=lipid metabolic process
  Homolog annotation: Hit_ID=Q8H458; Match level="QueryCoverage=23%, HitCoverage=23%, E-value=4e-11, Identity=58%"; Hit description =Putative TGF(Transfoming growth factor) beta inducible nuclear protein TINP1
MGCRLIVYHYCLSVLVPTNIQHIVAFSGNASQGGTTLPMIYVLGDSLAPVENNNNLVTLLKANFLRNNIDYLGHKAIGCFSNGKNSIDFLGTKKVGEKQGSRSYHGASCYRQRGSSLNNSMLISSRARVSLQPQGDHIELHQKRHGKHLDHELIGTKGKRFVKKRYAEKAQMKKK

SEQ ID NO: 60512 - protein, 457 aa, Zea mays
  Coding DNA Sequence Number=SeqID_18733
  Gene Ontology: Cellular component=membrane; Biological process =transport
  Homolog annotation: Hit_ID=Q1SD20; Match level="QueryCoverage=77%, HitCoverage=92%, E-value=2e-88, Identity=47%"; Hit description=TMS membrane protein/tumour differentially expressed protein
  Pfam annotation: Domain name=Serinc; Domain location=72-402; Score= -114.0; E_value=8.6e-11; Accession=PF03348.6; Description=Serine incorporator (Serinc)
MAAQVLGLIRLFQFHVDWKKKGAVLKFLGGEGVEMTFGSADMEAGGGGERRHGQQEEQSSDERRARFAEDWGCCACACAGLFLGPNPMVARYMYALIFLVTNLLAWTLRDYGDSALAELQRLKVCQGALYCLGAEGVLRVSLGCFVFFFVMFLSTVKARKVHDCRNSWHSEWWPAKLALWLGLTAVTFLAPSPLVQLYGKVAHFGAGHLQIQAVSIVTYVGSLLGIVLMYVWYAPSPACRLNILFITVTLALVQLMTFVSMSSKASELRHTHNNTCSVWRWRPFITHSWGLEINIYTGEGRVRGAGADGDLRRVPVLVGDQKSFVIAVVVIVAATFSTGIDSKCLQFKQAEGESEEEEEDDIPYGLGFFHLVFSMGAMYFAMIFVGWNANASHTMERQVDDRRRVGEHVGARRQRVAGGNRVHMDDDRARHLEDEAARVVFAKLEVQQTRQQERGGN

SEQ ID NO: 60513 - protein, 111 aa, Zea mays
  Coding DNA Sequence Number=SeqID_18734
  Subcellular localization annotation: CTP_CleavageSite=35; ConfidenceScore=5.26e-01
MKGKGRRAAGSASGLGARCTVPVLDVARSLARGCRASRLGSGRGHERLVRPGRAGEGGAGALLHGRGAAGSWAARTGKQRGRDGQGRGGGYGKRSQGGGRLGDRAGWARLR

SEQ ID NO: 60514 - protein, 125 aa, Zea mays
  Coding DNA Sequence Number=SeqID_18735
  Subcellular localization annotation: CTP_CleavageSite=64; ConfidenceScore=5.52e-01
MKNPPTPLMAMKHPRSSLALPPFPSIKTTAELFFLPTPSSLPPLGSLFLGPSLFVAVKFVAGLSAQHLIGAPSNVKNPCPHALQHHHSLSCLAGDVPAPIVPSLRLDARSSFTVVRSSLRMNEIT

SEQ ID NO: 60515 - protein, 125 aa, Zea mays
  Coding DNA Sequence Number=SeqID_18736
  Subcellular localization annotation: CTP_CleavageSite=64; ConfidenceScore=5.51e-01
MKNPPTPLMAMKHPRSSLALPPFPSIKTTAELFFLPTPSSLPPLGSLFLGPSLFVVVKFVAGLSAQHLIGAPSDVKNPCPHALQHHRSLSCLAGDVPAPIVPSLRLDARSSFAVVRSSLRMNEIT

SEQ ID NO: 60516 - protein, 441 aa, Zea mays
  Coding DNA Sequence Number=SeqID_18737
  Homolog annotation: Hit_ID=Q2R320; Match level="QueryCoverage=99%, HitCoverage=98%, E-value=4e-48, Identity=33%"; Hit description =Expressed protein
  Pfam annotation: Domain name=DUF247; Domain location=30-426; Score =410.3; E_value=2.8e-120; Accession=PF03140.6; Description=Plant protein of unknown function
MATRRMEQCAWVAEVERAVADGGASSEESSRWRQQCIYRVPTCIKNLNRKAYQPQVVSLGPFHHGEPQLRPMDTHKRRALVHFLRRARKPLAAFAGAVAAAGERLEAAYEGLGDEWRVGGGAAERFVELMVTDGCFLLETMRTATGWEVNDYDGEDPVFSAHGLLYNVPYIRRDMLMIENQLPLLVLDRLLAVENGKDGNEDVINRIVLLFLSPTAAWPLTTGTGLALHPLDMFRRSLLCGSPTPSGGPRAPPPDSPDDIIRSAEELYEAGVRFRRSATSSFLDIRFHRGTLYLPAIVVDDTTEYVLLNLMAFERLHVGAGNDVTAYVFFMDNMVDSARDVALLTSRRIVYNTVGSDKAVAKLFSGLSRDVVLEPHSALDDVHREVNAYCRKRRNRWRANLVHTYFRSPWSFLSLAAAVFLLVMTVLQTVYTLLPYYSDKS

SEQ ID NO: 60517 - protein, 115 aa, Zea mays
  Coding DNA Sequence Number=SeqID_18738
  Subcellular localization annotation: CTP_CleavageSite=40; ConfidenceScore=5.29e-01
MANSLRWMGSSVVPLSLCLTPPQQKQRGCMACGSAAMGDSCMTASSPRWSVAWVCHYSGTEARQLQQTVVADRVYCGVALAGRVGITEAARAPNRRMPPQDGNNHNSVASREEEG

SEQ ID NO: 60518 - protein, 62 aa, Zea mays
  Coding DNA Sequence Number=SeqID_18739
MRHAIVQGLKSESEVIDELRGAIRALESGKRPPMLPDFLTGVEVSRWCRSSPRTRLFPGLIT

SEQ ID NO: 60519 - protein, 96 aa, Zea mays
  Coding DNA Sequence Number=SeqID_18740
MTLGLASQHHPRERLCGRTIVVSDTISFPSQGSLFFLNCLKYFCSIGVFCPFSQIVAGKIHPRGKILLRPVWILGIEFYFNKDPFVSLHFEESEFN

SEQ ID NO: 60520 - protein, 121 aa, Zea mays
  Coding DNA Sequence Number=SeqID_18741
MGNSKKGGSSSHHSGDKRKREPTPPSEDFGDSEYSEEEFSSESEGSPAPASPPASSDDSDDSQGIAAEEYSSDEEDSSDSSGEGSSGDGGDGDDDGGDGDGGSDSGKGGGGSGKGSNKASG

SEQ ID NO: 60521 - protein, 304 aa, Zea mays
  Coding DNA Sequence Number=SeqID_18742
  Gene Ontology: Mol. function=transcription regulator activity; Cellular component=nucleus; Biological process=regulation of transcription
  Homolog annotation: Hit_ID=Q6AV35; Match level="QueryCoverage=98%, HitCoverage=99%, E-value=2e-42, Identity=38%"; Hit description =Putative transcription factor
  Pfam annotation: Domain name=HLH; Domain location=222-269; Score =31.6; E_value=2.7e-06; Accession=PF00010.16; Description=Helix-loop -helix DNA-binding domain
MEDGGLVSEAGAWAELGTGGDESEELVAQLLGAFFRSHGEEGRHQLLWSDDQASSDDVHGDGSLAVPLAYDGCCGYLSYSGSNSDELPLGSSSRAAPAGGPPEELLGAAETEYLNNVAAADHPFFKWCGNGEGLDGPTSVVGTLGLGSGRKRARKKSGDEDEDPSTAIASGSGPTSCCTTSDSDSNASPLESADAGARRPKGNENARAAGRGAAAATTTTAEPQSIYARKRRERINERLKVLQSLVPNGTKVDMSTMLEEAVHYVKFLQLQIRLLSSDDTWMYAPIAYNGMGIGIDLRMHGQDR

SEQ ID NO: 60522 - protein, 424 aa, Zea mays
  Coding DNA Sequence Number=SeqID_18743
  Homolog annotation: Hit_ID=Q2QMW0; Match level="QueryCoverage=84%, HitCoverage=77%, E-value=1e-154, Identity=75%"; Hit description =Expressed protein
MAVCTDDAERRLRRGEDGRRKELLPECVVTSLLGGKGTTAEGPRRKGEYIASKVTSVAAQHKHRVALQFIHEMQSKAIQSWEASNSQALPVFSLGVAFVDERSVISASLPGHEIQAAIEDIRSVVSGLSPGDKRVHIASLEEVFSSGSDDKAARLKEVVGVISDETGRDDFVRRLRMLSLQKVALENRYTKIMLGTCASGIACHVLSATVKGQGYALPADVQYVDTRWEVPVVLPLHDCLAQELNLLCEIDSLKTQQLLDRPCSGINGLVSSFVSRLREENSSREHTILRTAQKLKPFSFNKFSANGYHDFLPSRLRPKFQNIDANECTFSEILCLICGSPFSESELLNLENTKLKAQKKIDLYTAHCCQSCHFQILPAATDMYGHFFSLLPKFWTEKVDAASASHSSLRDQIADYLLDEDDGN

SEQ ID NO: 60523 - protein, 307 aa, Zea mays
  Coding DNA Sequence Number=SeqID_18744
  Gene Ontology: Mol. function=molecular_function; Cellular component =outer membrane; Biological process=biological_process
  Homolog annotation: Hit_ID=Q2RBM6; Match level="QueryCoverage=91%, HitCoverage=49%, E-value=1e-102, Identity=66%"; Hit description =Outer membrane protein, OMP85 family protein
  Pfam annotation: Domain name=Bac_surface_Ag; Domain location=13-306; Score=-4.7; E_value=0.0002; Accession=PF01103.13; Description =Surface antigen
MARISFVSDDWLKSSLKEHLMGVSVDLLSTMNHNITYNLAWRKLTDPTRMPSNSAQEELGHNLLSSIKYAYKVDRRDSSIRPARGYAFMSTSQVGGLAPESKYSRFLRQEFDLRMALPLGVLNGALNAGVAAGVIHPLERGSAGSVSPLVERFNLGGNMPLVCHLGGPSSLLGFKTRGLRAATESRTHDPNTPGNGTSPSSKLNGLGGEVAVTAFADLSFDLPLKPLRELGIHGHAFVCAGNLGRLTECDLRKFPATEFLQTFRSCAGWGIVVPTRLFRVEMNYCYILKQLDHDGGKTDIQFNFSSS

SEQ ID NO: 60524 - protein, 113 aa, Zea mays
  Coding DNA Sequence Number=SeqID_18745
  Subcellular localization annotation: CTP_CleavageSite=50; ConfidenceScore=5.36e-01
MASADARLAGIASSIRVIPDFPKPGSKLSLPLPVSPGNSAFFSRRAWQTRADGFYDLEERQAGSATVPGRRAATAPGRAAATAPGRAATAPGFSLSVTEPVVIQNTPKLTLRR

SEQ ID NO: 60525 - protein, 240 aa, Zea mays
  Coding DNA Sequence Number=SeqID_18746
MAWRNLSSIKVHSLLGETTRDDDAFFSTFRDLCLNRSSANDISKCLPAIAAACKAFNAKIDAGLGDATSGSIDLISVARDALASGDPASQARATACAVATVDSSGGRRNCHRVDLRKKVALPDKLRSRLVAQAPKRLVRMCGQILYEIPACRFTELRADKCLGLFRQGKSTFETSRDFKETVSVSVLRDPKSYTETVTRTVPVHVDCCSLSDRCLCQLKKKLGNNTTIPCLAKKELQACN

SEQ ID NO: 60526 - protein, 345 aa, Zea mays
  Coding DNA Sequence Number=SeqID_18747
  Homolog annotation: Hit_ID=UPI0000E49153; Match level="QueryCoverage =62%, HitCoverage=34%, E-value=9e-10, Identity=22%"; Hit description =PREDICTED: similar to telomeric protein RIF1, partial
MDRQVAEIASEPDRAAAYARLLLLQRGCADDASSAAELAAELPSTLLPLLLRDAAADDEAVAASALKCLGFALYHPVLVSTISAQMTQLVLDTLVHIIMSTRMKSACNLGVWCFSVQQLNPLIIEDRADPMLIAIVHALDNPFGSLSTTFEAAQAIMKLGGQSPKRMRDLSSLWVPPVYRRLLSADKAERDMVERCLIKVSCVILPPQPLLSKAVASDLEQKLLSCMVNMLDDPSKKVQTVKSWGWIVSLLGPDAVNNRPLLNKLIKVPEQMFTDLNPQVQVATMATEIVAQQTVISPLKPIEQASAQGQRGFMCPSESELASSIMQAYQGLIGYSTHQMVTMGY

SEQ ID NO: 60527 - protein, 67 aa, Zea mays
  Coding DNA Sequence Number=SeqID_18748
  Gene Ontology: Mol. function=structural constituent of ribosome; Cellular component=ribonucleoprotein complex; Biological process =translation
  Homolog annotation: Hit_ID=P49689; Match level="QueryCoverage=89%, HitCoverage=98%, E-value=5e-20, Identity=78%"; Hit description=40S ribosomal protein S30
  Pfam annotation: Domain name=Ribosomal_S30; Domain location=3-61; Score=124.5; E_value=3.1e-34; Accession=PF04758.5; Description =Ribosomal protein S30
  Subcellular localization annotation: CTP_CleavageSite=46; ConfidenceScore=5.27e-01
MGKVHGSLARAGKVRGQTPKVAKQDKKKKPRGRAYKRMQYNRRFVTAVVGFGKKRGPNSSENLSFVR

SEQ ID NO: 60528 - protein, 133 aa, Zea mays
  Coding DNA Sequence Number=SeqID_18749
MDEKTRVEQGIIWVGWVGEQADADPPRPCTQSWTLARSDPTGTGSAREARQTTAPAPASAWLRRAAPLLPALAVGGMGGHGRLSSQRGQADGLPRSCLRCGALIQQLVLGTIEKRRMILDLTDCFLTFYLETT

SEQ ID NO: 60529 - protein, 320 aa, Zea mays
  Coding DNA Sequence Number=SeqID_18750
  Homolog annotation: Hit_ID=Q2QM77; Match level="QueryCoverage=13%, HitCoverage=8%, E-value=2e-14, Identity=83%"; Hit description =Serine/threonine protein kinase, putative, expressed
MTKLAVAVAAGSVLAALLVYAMIAMKRLDAAEIGPAAREAEAFEQNMDVVGRLRHPNLLRQLLARRRTSQLLARRWSSGRGLSSRNRDVADMLCDYIPSYCAKSCSADDATTASSSSSCSSGSVQLTRHWAAFFHYIHHRFNAAQEVFCSGNYRPMAHALAAAARNRNLNKSPAHALRRLRRCAALLLRRHGVLPRRGPPLAPPPHAQPPLLAPVEPAGARQYKGGVRVAAAAAREAPPPPPRWRRWTPASPARPVRHFNKVLDTRRSVLSHPFATACLDELSIMMPLERKKREGESSPEIGVAATALTAMQTETRAPAD

SEQ ID NO: 60530 - protein, 122 aa, Zea mays
  Coding DNA Sequence Number=SeqID_18751
MEVVEATKAPPASVSSSMTSLASASGPAGGGEFTADDLAAADQLVQLSVSGGGGGDEEDQCCSTSPRSVNNAEDDACRGLVDRRARKRYRLVSELYAATRKVKAAGAGGGGRRRKGRDGVKK

SEQ ID NO: 60531 - protein, 252 aa, Zea mays
  Coding DNA Sequence Number=SeqID_18752
  Subcellular localization annotation: CTP_CleavageSite=74; ConfidenceScore=5.58e-01
MNPYLRSWPRGPSCDLAAPQRGPPTRSPPRVPHPFSSPRPSSPPRAVEALLSPHPRAKSHTPTSLLRRARSTTVCLLRRGVCLCPSVVWRSPPFDVILPRSRPLHSGYRASSVSPWQVPVSSPAYLEARAPRRLGMASVAISAPGAAACARGAWPAWPAACAVRGQPTVSTNSAWPACPQITRAPSARPACGRRAHDSLARPRRSLARILRNPSVSSLPSSSVPAEAPAVKKKEKGIKVNLQEFQDVDEFED

SEQ ID NO: 60532 - protein, 116 aa, Zea mays
  Coding DNA Sequence Number=SeqID_18753
MTAGVIGHGDGGPQRLRRSEGIGAPIHELHAHAVSAAIPPGAVFVGGEIVANPGGSACSCVASRAPPAGPGRLRHPPPGAANSPAGGGVAGGGGALTERGDEVEEADATDPRGRAA

SEQ ID NO: 60533 - protein, 236 aa, Zea mays
  Coding DNA Sequence Number=SeqID_18754
  Subcellular localization annotation: CTP_CleavageSite=100; ConfidenceScore=5.14e-01
MHCPQKVAQQQSGPSAPAKKNVSQSGGGNRAETHYNPGRLNHLEAEAVQETPSMIVASRRNRRSNRPTYSRPDHKNGIPASPRSLRQLRGTSTQFYQGVRGAAGKVAGRCSRSPPLRLSGAPGAFRDAYPWALTVSWVPLSVRPTSVTAIARHRDTAAAELLHVAGRVRNRPSVVEVFPKLPRLTVYFMRRGSNGKIGALGSDSHALRLGSSAVRGESPGLGVGWRRLACSVGWGM

SEQ ID NO: 60534 - protein, 243 aa, Zea mays
  Coding DNA Sequence Number=SeqID_18755
  Homolog annotation: Hit_ID=Q8SA97; Match level="QueryCoverage=45%, HitCoverage=20%, E-value=2e-13, Identity=42%"; Hit description =Ornithine carbamoyltransferase
MAPPVDMASLCPRLGDVEAPPKPRSSLSSMAEAESEPLGRARRRSSAEARAESEPWGRAERSSSSSGAEPESEPWVGRSGVRRLPGLSPSPSPGSGGAEFAVFRDLARVRALPESEPWVGRSGVRHLPGLSPSPSPGSGEAEFAVFWDLARVRALGRAERSFLWCLWQGLTACQSHSVKWHCSRSGAGGAVLLSGRSVERRSDGGHFGSAGGASGEPEICSPSEGGRLGRDGNPPGSAALVRG

SEQ ID NO: 60535 - protein, 215 aa, Zea mays
  Coding DNA Sequence Number=SeqID_18756
  Gene Ontology: Mol. function=carboxyl- and carbamoyltransferase activity; Cellular component=ornithine carbamoyltransferase complex; Biological process=amino acid metabolic process
  Homolog annotation: Hit_ID=Q8SA97; Match level="QueryCoverage=50%, HitCoverage=20%, E-value=2e-13, Identity=42%"; Hit description =Ornithine carbamoyltransferase
MAPPVDMASLCPRLGDVEAPPKPRSSLSSMAEAESEPLGRARRRSSAEARAESEPWGRAERSSSSSGAEPESEPWVGRSGVRRLPGLSPSPSPGSGGAEFAVFRDLARVGVRRLPGLSPSPSPGSGGAEFAVFRGLARVRALVDLRGWDAATFVREVELEAIKIVGKYVPKAEMIKSWDIRSSNVRLNHVFELNSLRYGPYPEGDSTDAGDDRGK

SEQ ID NO: 60536 - protein, 179 aa, Zea mays
  Coding DNA Sequence Number=SeqID_18757
MGMCAGPGEVMSSPELRETYSRMLKVTGGRWLRNYPIPWAADDDYFMSCLARELRIFPYERNIGDVVSTVMEKDRQDAQRKKWKAPLRLVDPCRGAEAGQLTVVPATVPAGLVMAFTDQVASGALTSQLVSERKQLEGRVERLRTQHTEAIKDKSTAKNKNQNLLEKVSTLEKEKEETP

SEQ ID NO: 60537 - protein, 504 aa, Zea mays
  Coding DNA Sequence Number=SeqID_18758
  Gene Ontology: Mol. function=transferase activity, transferring glycosyl groups; Cellular component=membrane
  Homolog annotation: Hit_ID=Q8H038; Match level="QueryCoverage=97%, HitCoverage=88%, E-value=1e-124, Identity=44%"; Hit description =Xyloglucan galactosyltransferase KATAMARI1 homolog
  Pfam annotation: Domain name=Exostosin; Domain location=101-451; Score=327.6; E_value=2.1e-95; Accession=PF03016.6; Description =Exostosin family
MERTGAHSGKRWLPGLLVLAATSWLFVIYFHLAVFRGPPIVSAPRGPLAEDASGGGGGGGDGQRFLLLHHEERLRKVKAPPATRGDALRTARDDDCQGRYVYIHDLPPRFNADILANCRHWYPWMDMCVYLENGGLGRPVDNADGVFADEGWYATDHFGLDVIFHSRMRQYECLTGDSSRAAAVFVPFYAGFDVVQHLWGVNSTAREKDALALDLADWLTRRPEWRAMGGRDHFFLSGRTAYDHQRQTDSDSEWGNKLLRLPAVQNMTALFVEKLPWTSYDFAVPYPTYFHPASDAQVAEWQRRMRATRRDWALLLLPAARAATRTPSGTSSSASAPRPASAGWCGAGRTSGTASSPSTFMRVFQGTRFCLQPTGDTMTRRSAFDAIMAGCVPVFFHPDSAHTQYRWHLPDAHDTYSVLIPEAHVRAGNVSIEETLRAIPQDVAERMTETVIGLIPRLVYADPRSKLETLRDAVDVTVEAVIGRVNKLREEMGRGQGHLLQMQT

SEQ ID NO: 60538 - protein, 59 aa, Zea mays
  Coding DNA Sequence Number=SeqID_18759
MGLDWAAGGHDHDALVLGYEQRLMGQQIVKEVPYKFPRTRAQDKRRHGTNALMHFHVLA

SEQ ID NO: 60539 - protein, 172 aa, Zea mays
  Coding DNA Sequence Number=SeqID_18760
  Gene Ontology: Mol. function=protein binding; Cellular component =nucleus; Biological process=multicellular organismal development
  Homolog annotation: Hit_ID=Q2R4Y1; Match level="QueryCoverage=67%, HitCoverage=69%, E-value=1e-30, Identity=60%"; Hit description=SKP1 -like protein 1B, putative, expressed
  Pfam annotation: Domain name=Skp1_POZ; Domain location=5-65; Score =92.1; E_value=1.7e-24; Accession=PF03931.5; Description=Skp1 family, tetramerisation domain
MGEKKMLTLRSSDCEEFEVEEAVLMKSEIIRFMIEDDCSDNVIPLPNVNSKTLALVIEYCNKHVHDAAKPADAAETTNASSAGGGGEVDLKKWDAEFGKVAPATLFDRVELPFFIRVELPFFDPIRATRMPKMKVRFERGADIRATSINCKTNILAGKREAKNPVRQRNNPK

SEQ ID NO: 60540 - protein, 183 aa, Zea mays
  Coding DNA Sequence Number=SeqID_18761
MPTSKDSDEGGKSSKGKKILSKQEVQSPHILVLGSAAFEGSSSFENDGVKKSTEDDGSLGHEKTEEEPKEQNITVGIDAAEATQTTSKEMDELGFFMRHIGGGELNDKEVSELENKGEFMGYGPGAMLFGGDQMLMCVPDSDKSKIGSNSKQSFKKYTKRKEKKNTDHTSTMKLQNFIKPLEG

SEQ ID NO: 60541 - protein, 146 aa, Zea mays
  Coding DNA Sequence Number=SeqID_18762
MARGPFSLQAGGPDGWTAKAIVTTVKGWYAARPFYRCSCGKWNLGIGSTMDVNHITEMEDGLNDDGMEYPFKGDANASNNDQIVEDHADDAPIASGANAIVQQQVGLRKKQYMYVNDQRVVKQWKLVPTMTVPAMNKDKGPMPMSI

SEQ ID NO: 60542 - protein, 171 aa, Zea mays
  Coding DNA Sequence Number=SeqID_18763
MASSSSISREQQEEERDEGEAGCPLMLWEAPMGEVPAVVPCSIREQWSFGGRLELELERREEQGGRRRSWIRRSVGELDVHGEEEYQEKALVLACVRRSTEVELLFLKAVLAAAIGGVGGGQQSSAHVSLLAGDGRGTLDECFWHFSFGIGPGSLQKICSLMYTLQIVYMT

SEQ ID NO: 60543 - protein, 204 aa, Zea mays
  Coding DNA Sequence Number=SeqID_18764
GWASRRATDSPSAEHDVEGLVTQLMLEEARMQSSVQDMAQFCTDASREHRVQTGRATWTSRDDERCATPQTVAGQRQAVWRDGEGTNREVDGEVRAPANQLQQGPRQDVAMEEREKSRGAMSWEAGRKLEPGHDFGRWSLASELWTTQDESPDELGEMGALEPGAGKKKSELGAMSWGRTPGEGGLGREEWEAAATMGRGCRNA

SEQ ID NO: 60544 - protein, 68 aa, Zea mays
  Coding DNA Sequence Number=SeqID_18765
MASATSRFARRRRRSGWLSVRIRENAIEKEWLEAAKSLLSLGAPDSVRCARLGICEIAALGTSSAAYG

SEQ ID NO: 60545 - protein, 76 aa, Zea mays
  Coding DNA Sequence Number=SeqID_18766
MAQGVLTGDGAHRTPVCGEVRIGAVAELRRETTVEAKHSYYMMYKFGYYKKLEQLEQSEFKTFKKIQKKSLVCLNQ

SEQ ID NO: 60546 - protein, 121 aa, Zea mays
  Coding DNA Sequence Number=SeqID_18767
MLATSRSTIQVLPRRTSAIRKVWMYIRSVERARLEGSDESKVCSDENSFGSSKERSGDDNDNEGGDSGDGDGDDGEGDGDDGKGGEGNDGGDGDGGDGGGKGGSGGVGSGNDKASGKAPLV

SEQ ID NO: 60547 - protein, 156 aa, Zea mays
  Coding DNA Sequence Number=SeqID_18768
  Gene Ontology: Mol. function=L-aspartate oxidase activity; Cellular component=cytoplasm; Biological process=pyridine nucleotide biosynthetic process
  Homolog annotation: Hit_ID=Q6Z836; Match level="QueryCoverage=70%, HitCoverage=17%, E-value=4e-41, Identity=73%"; Hit description =Putative L-aspartate oxidase
  Subcellular localization annotation: CTP_CleavageSite=57; ConfidenceScore=5.42e-01
MTLGFLLLSSRYRKSSMKCRLRLSRLASVLLTTSLVQQKRLHISQASTPTMVGFHPRRNRNSSHSDSRSPSLHSAYFSRPIEHTMLTYSYITDCISTLAYLVRSTTSDSALSPNASPTSLAAPTAPPTSKPPLLRGEKENGACRRGRIIVAERIGA

SEQ ID NO: 60548 - protein, 508 aa, Zea mays
  Coding DNA Sequence Number=SeqID_18769
MACSAPASAGASLETGCHTNLCQGAARVVCLRGALVHTVPRQPPGQNSEEHRQMMMPEFQLQVSQGNNHAVHFSGPPYSNTGASSPVQSLPAQQSQPHQMPQQSHMYGNTHLLHTQGTNQSNPQQQQAYAMRLAKERHMQQMMPQQQRPLSVASAVSAVQNGSPMQQQSQGSATCVIPATQTQHKQQYPAQNAQGSSMLPHQPSATTTHKQKKQQGQQQPRQNQQQRNQGSQQAKLMKSLGRGNMMQQSPVDVIQASGISTSCKDQVPDKNMMQQGPGHFVVSKGSIPLIPQPGNQPNVYTSQMPPSPMQTPDISNQGAVKGSSNHALLTSQQGSLHTPSQLAQQQQQQLRFMNPSQNNMQRLIMQQNRHVNTDGRIELPADQVQHNQVMSSASLARSTDSGSPGISSISQRKQESSHDPSAITSTSQLASSPQDTFVGSDRVLPSSSQSMPQRQMSGGVPVHGYGIGGQVQLQQSRQQLQSQQQQQQQQRPVVQGGVYAHPSNSGQG

SEQ ID NO: 60549 - protein, 106 aa, Zea mays
  Coding DNA Sequence Number=SeqID_18770
MQAACNHTKGAHPFDSDASNVEAQAHTSCNRRAGYYVRETAPPPAPVPRLLDYGTGAATRGNPAHGPTVPTEHIGHGSVSRGEGTGKGDTPKGILLREGSGPRAPY

SEQ ID NO: 60550 - protein, 530 aa, Zea mays
  Coding DNA Sequence Number=SeqID_18771
MGSQPPASRAALEHLATLDPAALAGLPVSSPLTVRSAAVSAHLLYLGTGGGKLLLFSLQDPSTPEFLRLLPIGATLPVSAIVPLPSVARLLVLADGLLLLADPLLSRPVRRLGSLRSVTAVAARRVVLADPSSCSVAISVGKKLLRVDFTLHDADELDVQTREIASVEGVKALAWVDDSVFVATATGYSLYSSTNGQGVDIFSLPESAGHPRVKPLSGGDEVMLLVDNVGVVVDRFGQPVGSSLVFSTTPDYIAEVFPYVIVAGDSKVDVYRRRNAAHLQTIPVARTGQGVLIVAGDDDGIDTELVVIATTYKVFCYRKVSALEQIKASLRRKNYKEAISLLEEFESDGEISKDMISFVHAQLGFLLFFDLRFEDAVNHFLLSETMQPSEVFPFIMRDPNRWSDLLHVSNVASHDIIVPRKRYWGLHPPPKPLEEFIDDGLVTVQQALFLKKAGVDTVVDEDFLSNPPSRADLLELAIRNIIRYLCASRMKNLPSPEMEGVDTLLMYLYRALHLVDDMYNLASSQNSCIV

SEQ ID NO: 60551 - protein, 451 aa, Zea mays
  Coding DNA Sequence Number=SeqID_18772
  Gene Ontology: Mol. function=receptor activity; Cellular component =integral to membrane; Biological process=citrate transport
  Homolog annotation: Hit_ID=UPI00005BD91D; Match level="QueryCoverage =68%, HitCoverage=31%, E-value=3e-26, Identity=28%"; Hit description =PREDICTED: similar to TGF beta receptor associated protein -1
  Pfam annotation: Domain name=Clathrin; Domain location=103-275; Score= -10.2; E_value=0.025; Accession=PF00637.10; Description=Region in Clathrin and VPS
DELESLLDDSGHLRTLAFLYGSKGMCSKALSIWRVLARNYSAGLWKDLSENDSCGTLVTKRSGEEIAAVEAAKILKALSDEDLVLEHLGWVADIDQDLAIAVLTSETRENQLSPEKVVASVDAEKVVIHQRYLQWLIEGQGCDDPHYHTSYALSLAKSAIEAVDMESKYRGKDDSEIDSDAQFVYSVRESLQLFLQASDLYDPEDVLDVIAESELWLEKAILYRKMGQENIVLQILALKLEDSEAAEQYCAEIGRDDAYIQLLGLYLDPQNGKEPMFTAAVRLLHNHGESLDPIQVLELASDTILRTLRARVHHHRQGQIVHNLSRATNLDVRLTRLEERSRHVQLTDESICDSCRARLGTKLFAMYPNDSVVCYRCYRSQQGESSSGHGRSMRKDVIFKQSWLWDYYRMRQGYTARCFMAPKYYVINGVEATIYDANLDTDTGLWCAAQI

SEQ ID NO: 60552 - protein, 98 aa, Zea mays
  Coding DNA Sequence Number=SeqID_18773
MQGGTGDQDPAEQPCEAEWATKTLGATVRGGAGDQVPAEKPCEVKRTTKSLPSNLARWSERPSPDRATLRGGVGDQNPVVQPRETERTTTSLSSNLVR

SEQ ID NO: 60553 - protein, 260 aa, Zea mays
  Coding DNA Sequence Number=SeqID_18774
MYGRLEIGAVSGSLSLKKVINVGFQGVKSILYQSRKDKNDQSGTVEEPNINSNYTFYGRIRKGKGFLPVHKERVDRSSEKHETNGGDPRIQRQSFSPRLRSDGRITCSHRHRLSCRDRRSPRSRHDKLQAPARSRPHLGHPRRELCVSWGLYEPISKLASSGSTLLSLPCLSLSISNAKAIVSLSVARRAAMEIEAVSLRRKGLAEIRCMRVVATASGRTKKPTACMALAPMRERHLCGVRDLHDDVMHDAMLMSHSARE

SEQ ID NO: 60554 - protein, 293 aa, Zea mays
  Coding DNA Sequence Number=SeqID_18775
  Homolog annotation: Hit_ID=Q6K5X7; Match level="QueryCoverage=70%, HitCoverage=30%, E-value=6e-23, Identity=42%"; Hit description =Transport protein-like
MAKFQISQEKTMSQDQERCRKTSLSCFATSSDWFRSIMSYYQTDTVSRDTEDFDGAKPSGAVTVDATHDTESAKQAATLAFQTYADEEPVQSIESQTTTANHLQKPDIELIHALQHQDGSSILSRRKSGAYFEMQSVERQAVQEESHLATSSEILASTDKLAECQETITILSKQLQALKMPTASGPPDTPPFAFPGRARRSPTTSHSRSRASSPRPPRLPVPLPPRPRTPQVLSKKDEGEEENDADVGGKDSMQIVVVHPVFVAEPRPNDGGSADPTEREEEARHEPTGQDRV

SEQ ID NO: 60555 - protein, 86 aa, Zea mays
  Coding DNA Sequence Number=SeqID_18776
MATGSVAWYIVKKLDYFKFSERDYMALEVSFLEVAISTFETTPRTAWLEHAQADTNLADRRVHRHDYIHLRAMPMPSCDSGTIRYG

SEQ ID NO: 60556 - protein, 142 aa, Zea mays
  Coding DNA Sequence Number=SeqID_18777
  Homolog annotation: Hit_ID=Q9AUL0; Match level="QueryCoverage=48%, HitCoverage=23%, E-value=8e-15, Identity=55%"; Hit description =Putative glutamine synthetase
MEDVRRDVEVPQRADVVMRGDEVTTVFYAHQSQLLRRVPRADGGDGESWHVYHVVGEEIPTDVEAASFDGFVIFGSCVDTHDDEPWILDLVDLIHLLHATGKRILDVCFGHQVPIPYPSMRASPVPAYSLFGSVAVGSLVLP

SEQ ID NO: 60557 - protein, 548 aa, Zea mays
  Coding DNA Sequence Number=SeqID_18778
  Gene Ontology: Mol. function=pseudouridylate synthase activity; Cellular component=nucleus; Biological process=tRNA processing
  Homolog annotation: Hit_ID=Q10LR0; Match level="QueryCoverage=96%, HitCoverage=96%, E-value=0.0, Identity=70%"; Hit description=TRNA pseudouridine synthase family protein, expressed
  Pfam annotation: Domain name=PseudoU_synth_1; Domain location=81-198; Score=44.1; E_value=4.8e-10; Accession=PF01416.10; Description=tRNA pseudouridine synthase
  Subcellular localization annotation: CTP_CleavageSite=61; ConfidenceScore=5.89e-01
MAAATAAAATASASCLLRRSISSAFLAKRAVPSIPRTTLCYSSSASARLKPTPSLSPPVTSANDGGGGMRWESARKKRVVLRIGYVGTDYRGLQKQQELGVDSTIESVLESAIFKSGGILESNYGKLQKIGWERSSRTDKGVHSLATMISLKMEIPDRAWEDDPDGIALASFINSNLPDNVRVFSILPAQRSFDVRRECLYREYFYLLPAEIIGIKDDYSSEEMQEHLSEFNKILKGFEYLENNRIFHELNHNMQVIGGRTYMLKSERDMAGNHPFHNYTARAKYRKVLAGRHRRAKGASSALKSMSSDTGMAESSSEESTSPDHDEDLNISSIFDSGIPEDTRVNGILKLSEDRLQIQARWLHEPDESDRLNASHFRDIITCSCGDLQTSSGIQFVELTICGVSFMLHQIRKMVGTAVTVKRGLLPRDIIELSLAKFSRIVLPIAPSEVLVLKDNSFCTKSKGGRIVRPGIQSMNKSEATRKGVEEFYRAALLPEVAKFLDPSLPPWKEWLENLDRFSGIPGSQLDEVREAYRAWRDDYDRAKMARN

SEQ ID NO: 60558 - protein, 370 aa, Zea mays
  Coding DNA Sequence Number=SeqID_18779
  Gene Ontology: Mol. function=uroporphyrinogen decarboxylase activity; Cellular component=chloroplast; Biological process=chlorophyll biosynthetic process
  Homolog annotation: Hit_ID=O81220; Match level="QueryCoverage=99%, HitCoverage=100%, E-value=0.0, Identity=86%"; Hit description =Uroporphyrinogen decarboxylase, chloroplast precursor
  Pfam annotation: Domain name=URO-D; Domain location=43-368; Score =538.6; E_value=6.5e-159; Accession=PF01208.8; Description =Uroporphyrinogen decarboxylase (URO-D)
MATACPPLSLPSTSLFRGRGGSGGGLAQDGGRAAAGERNQREEGREATRLAHEAGRESYQLLCERYPSFRERSENVDLVVEISLQPWKVFKPDGVILFSDILTPLPGMNIPFDIVKGKGPVIYDPLRTAAAVNEVREFVPEEWVPYVGQALNILRQEVKNEAAVLGFVGAPFTLASYCVEGGSSKNFTLIKKMAFSEPAILHNLLQKFTTSMANYIKYQADNGAQAVQIFDSWATELSPADFEEFSLPYLKQIVDSVRETHPNLPLILYASGSGGLLERLPLTGVDVVSLDWTVDMAEGRKRLGSNTAVQGNVDPGVLFGSKEFISRRIYDTVQKAGNVGHVLNLGHGIKVGTPEENVAHFFEVAKGIRY

SEQ ID NO: 60559 - protein, 198 aa, Zea mays
  Coding DNA Sequence Number=SeqID_18780
MDQTVKTHSSPTRRTGDGAAPTYGGALADDPSNRVLVPYIRHREVLSDAIMRVNTYRDLQGRGIVRWRLCTAQGGATAPSGRHRGIPVELAVNPEQHSHHSFTPGLEKVLGTTIDVDDGLIEDSPAAALYPVLLLLAARKVRATTGSGGVLGFGACFMATREVGGAPARPRMAESSAELLQASGDGVCARGEDLQGID

SEQ ID NO: 60560 - protein, 206 aa, Zea mays
  Coding DNA Sequence Number=SeqID_18781
  Homolog annotation: Hit_ID=Q6QP54; Match level="QueryCoverage=40%, HitCoverage=29%, E-value=1e-18, Identity=58%"; Hit description =Putative kinase
MAPPVDMVGPRPRLGDVEAPPRLRSSLSSVAEVESEPLGRARRRPSAEVRVESEPWGRAKRSSSSSRAEPKSEPWVGRSGVRRLPGLSPSPSPGSGGADPSPSPRSGGAEFAVFRGLARVRALGRAERIGATQAALSFCQAGQRSGKVTARFGQGCFLAKTGPRASREYVRRWRRASGETEILRGRLPLSELYADGGYQLRIRGLE

SEQ ID NO: 60561 - protein, 102 aa, Zea mays
  Coding DNA Sequence Number=SeqID_18782
MGRVEDFMLEMVEELQHIIGANVAPVCLEVPLERLRALGDEAYRWWMTVGHGTALEKVTWDFFLESFRSKFMGEQYLEARRCEFMDLVHGTLSVDEYEAKFV

SEQ ID NO: 60562 - protein, 358 aa, Zea mays
  Coding DNA Sequence Number=SeqID_18783
  Gene Ontology: Mol. function=RNA-directed DNA polymerase activity; Biological process=RNA-dependent DNA replication
MAMVTLFPNFTMSLQDPNLLDALKFQIQIIGAEMVESAIHQLDQPIRSTKSQIITRSDGMSEIKFDHSHLKQLPTPPVFSTQMMLQPLEPDNIVPGLEAPLIQSFKSDGKPVYFFKDPNIGHCPWDINYSCEGCQDSIFEDLDEEIRRSHRNKSRKKSSQSEFYKRWMDGDPNIGPLGEDNGKFVHLVDYSAQRPKPQSSKIQDQSPPDLPQPPKEDPKNQQWLLKPLKQPCYKRINKWVKKHNQLQKCAQEEKIVIPPEPKILEVQMYERTSSYEQDFPPLEEFSKREYIHAPKIPSKLQADAEGRQVKIAAVEAIQNWQTENALAQNTTLMKIDQKVNKIDSEVSEIGKKLTKVQR

SEQ ID NO: 60563 - protein, 65 aa, Zea mays
  Coding DNA Sequence Number=SeqID_18784
MVVRTDGEIEFEEENKNEPKMPSDEEEDLELPIEAFLNGELEEDIYVCQPKGFVVVGKEYQVYKL

SEQ ID NO: 60564 - protein, 239 aa, Zea mays
  Coding DNA Sequence Number=SeqID_18785
  Gene Ontology: Mol. function=sequence-specific DNA binding; Cellular component=nucleus; Biological process=regulation of transcription, DNA-dependent
  Homolog annotation: Hit_ID=Q9M6N9; Match level="QueryCoverage=99%, HitCoverage=100%, E-value=1e-111, Identity=86%"; Hit description =MADS-box DNA binding protein
  Pfam annotation: Domain name=K-box; Domain location=71-182; Score =69.7; E_value=9.2e-18; Accession=PF01486.8; Description=K-box region
  Pfam annotation: Domain name=SRF-TF; Domain location=9-59; Score =109.7; E_value=8.3e-30; Accession=PF00319.9; Description=SRF-type transcription factor (DNA-binding and dimerisation domain)
  Pfam module annotation: Pfam domain module=K-box::SRF-TF; Domain location=71-182::9-59
MGRGKIEIKRIENATNRQVTYSKRRTGIMKKARELTVLCDAQVAIIMFSSTGKYHEFCSPGTDIKTIFDRYQQAIGTSLWIEQYENMQRTLSHLKDINRGLRTEIRQRMGEDLDSLDFDELRGLEQNVDAALKESYLPTSFADPFSRLIFQYHVISTQTDTYKKKVKHSHEAYKNLQQELGMREDPAFGYVDNTGAGVAWDGAAAALGGAPPDMYAFRVVPSQPNLHGMAYGFHDLRLG

SEQ ID NO: 60565 - protein, 63 aa, Zea mays
  Coding DNA Sequence Number=SeqID_18786
MAGARPRSSLSLLFSGRARPCLSLDCAARLWTINNRVMRKKNQVDPKRGLICKLNLMNQPEDG

SEQ ID NO: 60566 - protein, 362 aa, Zea mays
  Coding DNA Sequence Number=SeqID_18787
  Gene Ontology: Mol. function=pseudouridine synthase activity; Biological process=RNA processing
  Homolog annotation: Hit_ID=Q69K07; Match level="QueryCoverage=93%, HitCoverage=50%, E-value=2e-38, Identity=60%"; Hit description =Ribosomal large subunit pseudouridine synthase C-like
  Pfam annotation: Domain name=PseudoU_synth_2; Domain location=2-249; Score=-4.2; E_value=1.1e-05; Accession=PF00849.12; Description=RNA pseudouridylate synthase
MDITIAKDIIFVHRLDRDCSGVLVLGRTQFSASLMHAIFREKTADALGDGTQQVLQRKYVALVIGRPRHPKGLLSAPLAKNQGNMFDLPLGYGLHTNLYKSSVAPIHCSDEERHQIDEVLACHIKERWHRRPRQRQTSRCWEEVVLQDGRSERLTVCAGSNTASVQDALTEYRVIESFPQDIKSDVDRNKFVQVMGVGIGSVSSKICGAVKLLLVKSTTICLLMILGYTWLELFPRTGRKHQLRVHCAEVLGTPIVGDYKYGRQAHQNWMPLPMPQTIDKEMLKKRKLPFGLTLGGGSVAEQQPQLHLHCKQMILPDISAAMQQLRSSDADHDFSDLEKLSFVAPLPLHMQLSWKILLSVGK

SEQ ID NO: 60567 - protein, 74 aa, Zea mays
  Coding DNA Sequence Number=SeqID_18788
MGEDVELRHPTQREKKEGPPQGRMVVDLEMCGVTGTHCLSRALYGGIYKCLSAQRLNVRTHVPSGTGFIPEIFL

SEQ ID NO: 60568 - protein, 133 aa, Zea mays
  Coding DNA Sequence Number=SeqID_18789
MTLQHTRHGVLQRFSVKARSEKRRRQGLSWKSGEGEGARRDAKVREQHAREAEQGACATASGEQRPWARAEADKGRAQAWRACGEEEADGHGLGAACCGQKARDKADREMCIPLEKIRLGFRSSMRIGTPTTV

SEQ ID NO: 60569 - protein, 213 aa, Zea mays
  Coding DNA Sequence Number=SeqID_18790
  Gene Ontology: Mol. function=pseudouridine synthase activity; Biological process=RNA processing
  Homolog annotation: Hit_ID=Q69K07; Match level="QueryCoverage=84%, HitCoverage=39%, E-value=3e-58, Identity=67%"; Hit description =Ribosomal large subunit pseudouridine synthase C-like
MAIRMPALIFRRRAAAAAPKPIQQYLAGLSTAVEHVIPEDNGHIAGGEENKKRWVELPPFAPLDANATARAISRGDGGEGACSNATAIRWVRHCCPHVPASLVQKLFRLRKVKKNLVTADTSSTDSITLQLRLRRVSAKDELVPGDILFLPVNIQESSVTEKTKKFGNKNEIDFLRDLEIYKDRAIIVLNKPPGMPVQVDNFISLIICSSQKF

SEQ ID NO: 60570 - protein, 177 aa, Zea mays
  Coding DNA Sequence Number=SeqID_18791
MSEYGMRLRDEKKKQKKKDEERVVRNVSTNQDLNFSCVATFQVPEKVPERPKDNFQLQYLPNERFFHTINIGKDEITLHEPAVLKRSPHFDPITCYSLIVVDKVITKGSFLWLYMKFEFYLTKVNSIMELRLHYAPDERRFVLSGKGKIDPYSSAYKEGCTRTKIELSSHKKLLRKL

SEQ ID NO: 60571 - protein, 334 aa, Zea mays
  Coding DNA Sequence Number=SeqID_18792
  Gene Ontology: Mol. function=transporter activity; Cellular component= intracellular; Biological process=transport
  Homolog annotation: Hit_ID=Q5NBA0; Match level="QueryCoverage=89%, HitCoverage=98%, E-value=1e-138, Identity=81%"; Hit description =Putative sec14 like protein
  Pfam annotation: Domain name=CRAL_TRIO; Domain location=116-285; Score=56.5; E_value=8.8e-14; Accession=PF00650.10; Description =CRALTRIO domain
  Pfam annotation: Domain name=CRAL_TRIO_N; Domain location=30-101; Score=43.3; E_value=8e-10; Accession=PF03765.5; Description=CRALTRIO, N-terminus
  Pfam module annotation: Pfam domain module=CRAL_TRIO::CRAL_TRIO_N; Domain location=116-285::30-101
MGAAQPAWRQLDLDLASRRLKLVYSSNGGTTEKIPSPEEQREKINELRKELGEHSSAAIKDFLSDASLARFLRARNWNVQKASKMMKAAVKWRLAFKPENICWDDIAEEAETGKIYRADYKDKHGRTVLVLRPGLENTTSAIGQIKYLVYSLEKAIMNLTEDQEKMVWLTDFQCWTLGSTPLKVTRETVNVLQDCYPERLGLAILYNPPRIFESFWKIVKPFLDHETRKKVKFVYSNDKESQKIMAEVFDMEELDSAFGGKNPATFEYNSYAEQMQDDDKKMGSSHGSANSLLGSAGKEANGADSDASSEASFYSGTDSPTHENGEHSIAKKNG

SEQ ID NO: 60572 - protein, 676 aa, Zea mays
  Coding DNA Sequence Number=SeqID_18793
  Gene Ontology: Mol. function=calmodulin binding
  Homolog annotation: Hit_ID=Q6YU05; Match level="QueryCoverage=87%, HitCoverage=93%, E-value=0.0, Identity=76%"; Hit description =Putative calmodulin-binding protein
  Pfam annotation: Domain name=Calmodulin_bind; Domain location=144 -425; Score=602.1; E_value=4.9e-178; Accession=PF07887.2; Description= Calmodulin binding protein-like
MDSGMQCDTHRRMGDGRTEAKAREGIFRVKKAIGVHPTRSPSEQPPLFEPDINRRTLVCQEPVVIVDRGRASNLGSGEPATNETFFSVIVEALKMDSLQKLCSSLEPILRRVVSEEVERALAKLGPARIQGRSSPKRIEGPDGRNLQLQFRSQLALPIFTGGKVEGPESFAKLDILVLEGDFSKEEDEDWTEEEFESNIVKEREGKRPLLTGDLQVTLKEGVGTIGELTFTDNSSWIRSRKFRLGLRIAPGFCEGIRVREAKTEAFPVKDHRGELYKKHYPPALKDDVWRLEKIGKDGAFHKKLNASGIYTVEDFLRLLVRDQQRLRSILGSGMSNKMWDSLVEHAKTCVLSGKHYVYYARDSRNVGAIFNNIYEFTGLIADDQFISAENLTDNQKVYADALVKKAYEDWMQVVEYDGKALLSFKQKKKTVTTRSDVASASTSNPASYGSANSQKQLSLPAKAGQTSSAGTMNEDGTRNAYNANGNQSARYAANTQSIPANVGMQYDGSAVSPEIQFSGSSLQSQSSRGSNMLALGPPQQHQSFEFPALGQPVQPTGLNPFEEWPQQQENRGGGVDDYLMEEIRMRSHEILENEEMQQMLRLLSMGGAGTSLAEDGFNFPPYMPAPSPNVSYEDDRTRAPGKAVVGWLKIKAAMRWGIFVRKKAAERRAQLVELDD

SEQ ID NO: 60573 - protein, 547 aa, Zea mays
  Coding DNA Sequence Number=SeqID_18794
  Gene Ontology: Mol. function=ferrochelatase activity; Cellular component=chloroplast; Biological process=porphyrin biosynthetic process
  Homolog annotation: Hit_ID=O22101; Match level="QueryCoverage=99%, HitCoverage=97%, E-value=0.0, Identity=79%"; Hit description =Ferrochelatase-2, chloroplast precursor
  Pfam annotation: Domain name=Ferrochelatase; Domain location=134-458; Score=625.5; E_value=4.5e-185; Accession=PF00762.10; Description =Ferrochelatase
MGRVEAGPSHFPKRPAPQNSASDNFVCHLHAIWVLSKVHSLVVATQMSYDVCIIVSVICDHVELLANRVNLSRTHTVKPTSAGDRSGISVKCNLGWSSQPSPDLRHHFRGYSSASEAVLTSQSDVRKLFVGNEKIGVLLLNLGGPETLDDVQPFLFNLFADPDIIRLPRLFRFLQKPLAKFISEVRAPKSKEGYASIGGGSPLRQITDAQAEALREALHGKDVPANVYVGMRYWHPFTEEAIEQIKRDGITKLVVLPLYPQFSISTSGSSLRLLESIFREDEYLVNMQHTVIPSWYQREGYIKAMATLIENELTKFQEPQKVMIFFSAHGVPLAYVEEAGDPYKAEMEECIDLIMEELEKRGITNPCILAYQSRVGPVEWLKPYTDETIIELGQKGVKSLLAVPISFVSEHIETLEEIDVEYKELALESGIKHWGRVPALGCEPTFISDLADAVIESLPYVGAMAVSNLEARQSLVPLGSVEELLAAYDSKRDELPPPVIVWEWGWTKSAETWNGRAAMLAVLALLVLEVTTGEGFLHQWGILPLFR

SEQ ID NO: 60574 - protein, 161 aa, Zea mays
  Coding DNA Sequence Number=SeqID_18795
  Subcellular localization annotation: CTP_CleavageSite=59; ConfidenceScore=5.78e-01
MAGSLLGSWAAAWWRSNSRGIFGRRAGCAARSRVCGVARSVPCSAVSAWRARGRLRSVRASRRVARLEQGRVLAGRVGQVRPWRVERDARDADGASGALRSRVGRQGAVAGLGAARLRLLRAGGERETRGGERVPSGRERFGEGEAEAAATKEQGRRSYSA

SEQ ID NO: 60575 - protein, 578 aa, Zea mays
  Coding DNA Sequence Number=SeqID_18796
  Homolog annotation: Hit_ID=Q2QRD1; Match level="QueryCoverage=47%, HitCoverage=34%, E-value=2e-69, Identity=60%"; Hit description=HAT family dimerisation domain containing protein
  Pfam annotation: Domain name=zf-BED; Domain location=310-360; Score =32.4; E_value=1.5e-06; Accession=PF02892.5; Description=BED zinc finger
  Subcellular localization annotation: CTP_CleavageSite=75; ConfidenceScore=5.33e-01
MPMVIFTKLQKTVIHLSQIRPSKAPSARRSDRPSPIPTGEWRLTGVAASPAVTGVGEQPCASCDRSGGHRSRGLRCGSASAEAPTGVAASPAPLRERERRGADRSRGCLPASAPCPCVPASAAEQPASAAERDRRPDTGAAARGCLCALPRCVPAEPRPPLRPAPCPHELQHSGKAATVAPPPRPPGPPTAAGTAGADPPAPPRPPGQGVSLPPRPPLRPCVPAGPAPATDGQLESGTISMDGNSNRIDNNSSQSFAVADPLTLSSTDREIALDADTGTGTAATPSTATATASTASTDTICHKRGRKSTSDVWNDFEQLFKDVNGKKVRYAAKCLYCKSQLTASSTAGTGHLKRHRSTCASKAQRAAKTQSLIQFNADGSVRSWDYNPDIARTELCRLICTLDLPLGIGSTAAFERYIKHAHSPRFTAVCRQTTTRDFVKFYNQSRTSLIDVLKSSVSCVALTSDIWSGNAKEDYISVVAHYVNADWVLEKRVIGMRLIDVSHNGANIADRVKTVIADFGLTDKASKVWFGYGREMEFDLSNVETPNPIQEHVLCFYPNTLPAAYDTTFAHRDTLGSW

SEQ ID NO: 60576 - protein, 146 aa, Zea mays
  Coding DNA Sequence Number=SeqID_18797
  Homolog annotation: Hit_ID=Q2QMZ1; Match level="QueryCoverage=47%, HitCoverage=6%, E-value=4e-10, Identity=56%"; Hit description=HAT family dimerisation domain containing protein
MGRGGEEVRATTSAMGPDRAVRVEQAVPCQPTCLASGPGTALLHWVVPARAHPIRVGPGANWAKKTGLGPGMSDQIDPVWQHGDNIYPGFKYKYYKKQWKGVVLHIARNTLHRVGEMRKVVAMFHRTLPIIFSGSLTKSMIKGKQE

SEQ ID NO: 60577 - protein, 139 aa, Zea mays
  Coding DNA Sequence Number=SeqID_18798
MGKSKKGGSSSHHSGDKQKREPTPPSEDFGDSEYSEEEFSSRSEGSPVYTSPPTSSEDSDDSQGIAVEVWTYIRVVERSELEGSDESEVSSDEEDSSNSSEEGSDGDGDDEGDSDDGGNDKGDGKGDGSSRASGKAPLA

SEQ ID NO: 60578 - protein, 132 aa, Zea mays
  Coding DNA Sequence Number=SeqID_18799
MALVPGDEGESRDRRRDTTRLRRVGYPIGGCSNPRGGDLGSTRVDLPAAGSAGNSPPRPPRRFMLEMRTGSSVAGSDFSGEVAAAGAGLYLAERSEMEEAVRSRESEDHPGTWNLKSQASCALDHFFYPAMF

SEQ ID NO: 60579 - protein, 1047 aa, Zea mays
  Coding DNA Sequence Number=SeqID_18800
  Gene Ontology: Mol. function=zinc ion binding; Biological process =regulation of transcription
  Homolog annotation: Hit_ID=Q6RZU6; Match level="QueryCoverage=87%, HitCoverage=68%, E-value=0.0, Identity=42%"; Hit description =Hypothetical protein H9-8
  Pfam annotation: Domain name=PB1; Domain location=945-1027; Score =74.4; E_value=3.6e-19; Accession=PF00564.15; Description=PB1 domain
  Pfam annotation: Domain name=RWP-RK; Domain location=684-735; Score =104.5; E_value=3.1e-28; Accession=PF02042.6; Description=RWP-RK domain
  Pfam module annotation: Pfam domain module=PB1::RWP-RK; Domain location=945-1027::684-735
  Subcellular localization annotation: CTP_CleavageSite=51; ConfidenceScore=5.18e-01
MGDRRTGSRHYASARTLSVGAPSSSPSRQCGGKVRDVVGEPAGEGVVGEVVAVGRGGVLLIGETGLVRMFDAVLVIGTGRILFSQKTVLFFISCPELNTVLQIHISLLGVDKDLCLNEWSKTMDVPTPPNRAGCNSNISNIGSPMQSFDDPFGGAAMTSFDGYSELSSPSVADHIFSLLNDPSSVQHMFALWSSSGSSPRASAVREDMSFDTYPGPMDVTASLAQRINSASVFNPTEVDRGLKDSDGLVPNNGSQQGSSIIPRSVGNILADRMLMALSLFRKSLSDGVLAQVWMPVEHNGRVVLSTSEQPYLLDQDLAGYREVSRNFLFSVKEEPGLHLGLPGRVFISGVPEWTSSVTYYSKPEYLRMEHALLHEIRGSLAMPVYDPSKGSCCAVLELVTNKEKPDFDAEMDIGVNLQTTTDRSNQKVYSENQKYASTEILDVLRAICHAHMLPLALTWIPTSNGTANGFCVAKNIRLDSQPGKSVLRIHESACYVNDAKMQGFLHACAERHLEKGQGIAGRALKSNLPFFSPDIREYSIEDYPLAHHARKFGLHAAVAIRLRSTYTGKDDYILEFFLPVNCKGCGEQQMLLNSLSSTMQRICKSLRTVSEAETDSVSATEPMYEKTNGSCLPTGNSESSSHDDQPITESAFHDLSSGDKQGDREPAKARSSSKRVAEKKRSTSEKNFSLDVLRKYFSGSLRDAAMSLGVCPTTLKRICRQHGISRWPSRKINKVNRSLKKIEKVIKSVHGVDRSLQYDPATGSLVPATSLPDKMPTSSAGVKTVEEKSSPEPGQDFSSPDGWQRESSQLHASSIPTRVGDEVQMLAINNEGSRNYASGIANIAQHSNSEDAHGPLYPVGAVNSSRTGETGYIDSPTSLHMDSVEGQTTVRDSRSVQQADVTMATKEQTLPSTSGTTDSSSGSASSQPAFKGNPGRALKVSSSDALTVKATCNGDTVRFKFLPAMGWYHLLEEVAKRFKLATGAFQLKYKDDEDEWVILANDADLQECVDVLDSIGSRSVKLQVRDLPCLVSSSGSSSCCLQVEGSA

SEQ ID NO: 60580 - protein, 216 aa, Zea mays
  Coding DNA Sequence Number=SeqID_18801
  Gene Ontology: Mol. function=GDP-L-fucose synthase activity; Biological process=cellular metabolic process
  Homolog annotation: Hit_ID=Q67WR2; Match level="QueryCoverage=52%, HitCoverage=35%, E-value=5e-27, Identity=61%"; Hit description =Probable GDP-L-fucose synthase 1
MPYYYRPKPNEINKLIISLTTNQYVHLFILTVLILINCIGIIISRIAIGVAEEEQLANRAQRDIDKVDLDLEVVSDEVGGEGGVGMDASNIGGHEDHIARALGVGGEEGLKVSLAGEVKLGVGVGHDAGEDKHEEATHDGLTDKIVAPDDEDLCVLVDEEGRVCMARGCGAGRGRATVMQGEGEGVGVALTSGCDGRSGRWTLGVCMVEGGGSGGR

SEQ ID NO: 60581 - protein, 118 aa, Zea mays
  Coding DNA Sequence Number=SeqID_18802
MLLAHIKAMIRNADGDSNTMELLTAARGQWRELATEDSVFVVSGEEIPSSGAPRREIPPRRPPHQPGRVVANHQRSRAHPGSPSALQLAPRRSLAAANSPEVGNDGTGCIGLGRTRRL

SEQ ID NO: 60582 - protein, 229 aa, Zea mays
  Coding DNA Sequence Number=SeqID_18803
  Subcellular localization annotation: CTP_CleavageSite=64; ConfidenceScore=5.48e-01
MPHLPFKHLPHAVPPHHTPLLSSTPLPPIPAAPSPIPVPSWAALSVIAPPARDSASPQHRRARRAFLVSNYLILGCASGCGFLTLSLRLAPSVDGFLLILLHALTVAAAVAECAVIAAPDPFRAAAATPSTDAPSLTTSEPAAVTHLPQRIYSDTSIVLREEDGAVIPPAMVAASASASSASSGSRSRSPSCSGTTFYVDRECGGNPMRRSARSGGEDGAGTWPWPFQV

SEQ ID NO: 60583 - protein, 246 aa, Zea mays
  Coding DNA Sequence Number=SeqID_18804
MAKNTQQPRKDGGARSGGMSSSKKSRWYQRAVEVLLLLVWKQPAAGGAKASPTKAAAASGVTAAGKGTALATGPGKLRRSSSLNVAASFTRVCLCAPISSYNSESLYCFPSRRGGAAPKLQLPARVVRVRVGVRAAAGRGRPAAGKGGGGGEGARRVFRGKSLTDDVLMRRFVVDEEAARRRDEMEVVRRRQAAVSRRRRLGPSPLSRMALADAESKAEEEPEAPAAAAPAAAARGTDDRVAAAGA

SEQ ID NO: 60584 - protein, 316 aa, Zea mays
  Coding DNA Sequence Number=SeqID_18805
  Gene Ontology: Mol. function=oxidoreductase activity; Cellular component=microsome; Biological process=metabolic process
  Homolog annotation: Hit_ID=Q6K1Y8; Match level="QueryCoverage=88%, HitCoverage=95%, E-value=1e-101, Identity=68%"; Hit description =Putative carbonyl reductase 3
  Pfam annotation: Domain name=Epimerase; Domain location=44-308; Score= -46.9; E_value=0.0043; Accession=PF01370.11; Description=NAD dependent epimerasedehydratase family
  Pfam annotation: Domain name=KR; Domain location=42-185; Score=-47.4; E_value=0.00013; Accession=PF08659.1; Description=KR domain
  Pfam annotation: Domain name=adh_short; Domain location=42-195; Score= 49.5; E_value=1.1e-11; Accession=PF00106.15; Description=short chain dehydrogenase
  Pfam module annotation: Pfam domain module=Epimerase::KR::adh_short; Domain location=44-308::42-185::42-195
MWTHMHDKTAGRMSSSANCSHGRTYGLLVEKLNNRAWWSRETVAVVTGANRGIGHALAARLAEHGLTVVLTARDGERGEAAAAPLLARGLAVVFRRLDVSDPASVAEFAAWIRDALGGLDILVNNAAVSFNEIDTNSVEHAEAVLRTNFYGAKMLTEALLPLFRQSSATSRILNVSSQLGLLNKVSDPSLRALLLDEDGLTEAGIEAMVSRFLAQVKDGTWGGQGWPKVWTDYSVSKLALNAYSRLLARRLQARGARVSVNCFCPGFTRTGMTKGWGKRTAEEAADVAARLALLAPAELPTGTFFKWCTPQLYSKL

SEQ ID NO: 60585 - protein, 162 aa, Zea mays
  Coding DNA Sequence Number=SeqID_18806
MSQPPDLIWTSQISPIIEMNRHNPTVHPFFFPPTPERDGAAHTRGGAIAGARQIGATMLLAHIKAMVRNADGDSNTMELLTVAGGQWRELATEDSGFAVSGEEIPSSGAPRREIPPRRPHHQPGRVVANHQRSRAHPGSPSALQLAPTTEIPGGGKLPRGRQ

SEQ ID NO: 60586 - protein, 424 aa, Zea mays
  Coding DNA Sequence Number=SeqID_18807
  Gene Ontology: Mol. function=RNA-directed DNA polymerase activity; Biological process=RNA-dependent DNA replication
  Homolog annotation: Hit_ID=Q0ZCD0; Match level="QueryCoverage=56%, HitCoverage=43%, E-value=4e-46, Identity=45%"; Hit description =Integrase
  Pfam annotation: Domain name=rve; Domain location=267-409; Score =11.5; E_value=0.00065; Accession=PF00665.16; Description=Integrase core domain
MNFENLNQGNGANLTQNPILIADDRDRALRHDTENLRNPRKDHCKALTLRSGKTLEPNSIEVEKEPVDAQDSEEVTPSVEILVSPKIGSAKPDKSIRFSDTIDGYSAVSDLEDLIVEKEPNYVKDPLEQILTSDPPNNEEGDEYLALLETNQRGFNLQSCFESLELEKRDYAQPKASIEEPPKLELKMLDRLSGRDYYCFLDGYSGYNQITVALKDQYKTTFAFPYGTKVTVYTDHSAIKYLLAKKDTKLRLIRWVLLLQEFDLEIQDRKGLENQVADHLSRLEQQEGNYSLIPIREMFPNEHILKIKLLGDALQKMKYIRFYTIVTQLRVRDTSELLDKYGVKHKVTTAYHPQTNGQAELPNKEVKGILEKVVCPNRRDWSKRLDDALWANRTKYKTPLGISPYKLVFGKACHLPLELEHKAY

SEQ ID NO: 60587 - protein, 95 aa, Zea mays
  Coding DNA Sequence Number=SeqID_18808
MEPEAEPNIETSMFRAQPPRPDLRNELSKLMDIMQHMQWQQQAYWKYSKKCLKKGCEGYLAFVLNTKDPELKIESVAVNGPIGIERIGSSIAGIN

SEQ ID NO: 60588 - protein, 107 aa, Zea mays
  Coding DNA Sequence Number=SeqID_18809
MSQVADSKRDEEDVVQRVPLEAVAVLNAMGSRGKDERDQTERDAGVQWLERMRQGVGTRTSSRGGWASGPRRRQAGLVKPTFTSHWGEDKQDEKKTKKSPEMSGTFT

SEQ ID NO: 60589 - protein, 56 aa, Zea mays
  Coding DNA Sequence Number=SeqID_18810
MRHGSLTLGVVEALDATRATTVTAEEARTTAKEMEKKAATTAKLAAIAMDKANMTL

SEQ ID NO: 60590 - protein, 118 aa, Zea mays
  Coding DNA Sequence Number=SeqID_18811
  Subcellular localization annotation: CTP_CleavageSite=16; ConfidenceScore=5.07e-01
MAACSAHLSLVFFHARAFRSSCACCRELLCPAAVVLPALIWPCSASLQALVSSLSSSTSCLAHPLCHAPLHQLAPAHASSRARAVPTHRRAPASYARSRSIPAVKLPFQFSSVALSCA

SEQ ID NO: 60591 - protein, 675 aa, Zea mays
  Coding DNA Sequence Number=SeqID_18812
  Gene Ontology: Mol. function=protein serine/threonine kinase activity; Cellular component=membrane; Biological process=protein amino acid phosphorylation
  Homolog annotation: Hit_ID=Q5F1Y5; Match level="QueryCoverage=88%, HitCoverage=86%, E-value=1e-142, Identity=43%"; Hit description =Putative wall-associated kinase 4
  Pfam annotation: Domain name=Pkinase; Domain location=355-626; Score =145.1; E_value=1.9e-40; Accession=PF00069.15; Description=Protein kinase domain
  Pfam annotation: Domain name=Pkinase_Tyr; Domain location=355-623; Score=114.8; E_value=2.5e-31; Accession=PF07714.7; Description =Protein tyrosine kinase
  Pfam module annotation: Pfam domain module=Pkinase::Pkinase_Tyr; Domain location=355-626::355-623
MEARCVHLVIVGVLLVLAAAQEATAIAVPGPQCQSQCGGVDIHFPFGIGDNCSRSPRFNVSCQEVQDGIYKPFLSGVFELLNISLLHGTIRELNPISTYCYNSPSGRMESRTSGHDAVSSTFRFSDVHNRFTVIGCNTLAIIYDRTGHRLPERTAIPKGMDYYNVSFDASFNTSRIWSFSRCSYAVLMEAAAFRFSTAYIKTTRFNDTGAGQVPVVMDWAIREREASSCEVAQQNNGTGSYACVSSNSECVDSQNGPGYLCNCTQGYQGNPYLPGGCHDVDECLALSSAGAILIVAAAVAIFTRRWQRIVQKRLRKRYFHKNKGILLEQLFSSSANNNGTKIFSLDDLQKATNNFDRTRVVGNGGHGTVYKGILADQRVVAIKKSKLVESTEIEQFINEVAILSQINHRNVVKLHGCCLESEVPLLVYEFISNGTLYDLLHHRDRELPWEARLRIAAEVAGALTYLHSAASVSILHRDVKSMNVLLSDSYTAKVSDFGASRSIPIDQTHLVTAVQGTFGYLDPEYFHTGQLNEKSDVYSFGVILLELLTRKKPIVDGDSGYKVNLSSYFLWETERRPLEEIVDVGIIGEASTEAILGMAQLAEECLSLTREDRPTMKDVEMRLQMLRCQQDVAPRAHPAKRTKMISHAIPMAASQHGSRQYSQEQEFILSSRVPR

SEQ ID NO: 60592 - protein, 40 aa, Zea mays
  Coding DNA Sequence Number=SeqID_18813
MAEAVEPWMLSCRSHSRFLSLASEKVRIKDDYFWIAIEIS

SEQ ID NO: 60593 - protein, 116 aa, Zea mays
  Coding DNA Sequence Number=SeqID_18814
  Homolog annotation: Hit_ID=Q852L4; Match level="QueryCoverage=42%, HitCoverage=25%, E-value=2e-17, Identity=84%"; Hit description =Expressed protein
  Subcellular localization annotation: CTP_CleavageSite=35; ConfidenceScore=5.15e-01
MVRTGADCACLILTGNVPFSLPINRTLAVSLPKLCSSTSVPLQCRDTATQIPAPGPIAFAPALPPLRKDLCLLCSRHASTHPTGIVRPSGGSHGDPSGGGLAAVLPEASGGAQLRC

SEQ ID NO: 60594 - protein, 151 aa, Zea mays
  Coding DNA Sequence Number=SeqID_18815
  Gene Ontology: Mol. function=peptidase activity; Cellular component =voltage-gated potassium channel complex; Biological process=lipid transport
  Homolog annotation: Hit_ID=Q852L5; Match level="QueryCoverage=87%, HitCoverage=59%, E-value=8e-27, Identity=52%"; Hit description =Putative protease inhibitor
  Pfam annotation: Domain name=Tryp_alpha_amyl; Domain location=1-67; Score=6.4; E_value=0.019; Accession=PF00234.12; Description=Protease inhibitorseed storageLTP f
  Subcellular localization annotation: CTP_CleavageSite=15; ConfidenceScore=5.09e-01
MDYMSGNATAPDGPCCSAVSGMLRASPSCLCMVVGGTAATLGVAVDGDRALRLPAACQVQAPPANQCDVAGAPVPSPVAGTNTPGAQAAAAPSDANNVTPAGAPLAVRRSDSKASPLRRSGSTLPSSDGDNGRPGTTFVFAAAALALLHRL

SEQ ID NO: 60595 - protein, 225 aa, Zea mays
  Coding DNA Sequence Number=SeqID_18816
MACHQGGADLALAHLAPYLGSDMTSKHIRGQCGHVENQRKEDSKKIGEVQHANQFMFPGYGYPPAYPFPTIPLVSNIQAEGYQTKPAGTSYRTSEDYLKQSSSTEMSQDIPSRPLTMTPQEKIEKLRRRQQMQALIAIQQQQQQFGQQGPGSDTMVSQAYTPGNKNPDSLGSSIVIDENTNKVISPEMIPTDHDRVHKSSAISDDPFIEEKIYYQLQDALGKAIC

SEQ ID NO: 60596 - protein, 42 aa, Zea mays
  Coding DNA Sequence Number=SeqID_18817
MSDQGSAHLKFFATRRPGDEQATEDPGVQQIEVAEQKLIEGK

SEQ ID NO: 60597 - protein, 106 aa, Zea mays
  Coding DNA Sequence Number=SeqID_18818
MTRVWMGMRNEKRQESRRRQLEEERTARGSVPASSGAFPAVRDAIVGTREIAQLGFGFGGGYRDGGRHLSRMFNWNDEQHQSRIEPSRSVHCFVEETYECGVEERK

SEQ ID NO: 60598 - protein, 458 aa, Zea mays
  Coding DNA Sequence Number=SeqID_18819
  Gene Ontology: Mol. function=RNA-directed DNA polymerase activity; Cellular component=intracellular; Biological process=RNA-dependent DNA replication
  Homolog annotation: Hit_ID=UPI00004C1732; Match level="QueryCoverage =98%, HitCoverage=33%, E-value=0.0, Identity=79%"; Hit description =UPI00004C1732 related cluster
MPGIPRDVAEHSLDIRAGALPVKQPLCQFDEEKRRAIGEEIHKLMATGFIKEVFHSEWLANPVLVKKIGGKWRMCVDYTGATYQRCMNHVFGEHIGRTVEAYVDDIVVKTRKASDLLTDLETTFKCLKAKGVKLNPEKCVFGVPRGMLLGFIVSERGIDANPEKIAAITNMGPIKDLKGVQRVMGCLAALSRFISHLGERGLALYRVLRKTERFTWTPEAEEALGNLKVLLTSAPILRPVYFISEVLSETKICYLQIQKQLYAVILTRRKLRHYFESHPVTVVSSFPLGEIIQYREASGRIAKWAVEIMGETISFAPRKAIKSQVLADFVAEWVDTQLPAAPIQPELWTMFFDGSLMKIGAGAGLLFISPLGKHLRYVLRLHFLASNNVAEYEALVNGLHIAIELGVWRLDARGDSQLVIDQVMKNSHCRDPKMEAYCDEVRCLEDKFYGLELNHVAR

SEQ ID NO: 60599 - protein, 369 aa, Zea mays
  Coding DNA Sequence Number=SeqID_18820
  Gene Ontology: Mol. function=methionine adenosyltransferase activity; Cellular component=cytosol; Biological process=one-carbon compound metabolic process
  Homolog annotation: Hit_ID=P17562; Match level="QueryCoverage=98%, HitCoverage=100%, E-value=0.0, Identity=80%"; Hit description=S -adenosylmethionine synthetase 2
  Pfam annotation: Domain name=S-AdoMet_synt_C; Domain location=243 -357; Score=186.4; E_value=7e-53; Accession=PF02773.6; Description=S -adenosylmethionine synthetase, C-te
  Pfam annotation: Domain name=S-AdoMet_synt_M; Domain location=119 -241; Score=332.4; E_value=8e-97; Accession=PF02772.6; Description=S -adenosylmethionine synthetase, cent
  Pfam annotation: Domain name=S-AdoMet_synt_N; Domain location=5-104; Score=217.6; E_value=2.8e-62; Accession=PF00438.10; Description=S -adenosylmethionine synthetase, N-te
  Pfam module annotation: Pfam domain module=S-AdoMet_synt_C::S-AdoMet _synt_M::S-AdoMet_synt_N; Domain location=243-357::119-241::5-104
MAGLDTFLFTSESVNEGHPDKLCDQVSDAVLDACLAEDPDSKVACETCTKTNMVMVFGEITTKANVDYEKIVRETCRNIGFVSNDVGLDADHCKVLVNIEQQSPDIAQGVHGHFTKRPEEIGAGDQGHMFGYATDETPELMPLSHVLATKLGARLTEVRKNGTCPWLRPDGKTQVTVEYRNEGGAMVPIRVHTVLISTQHDETVTNDEIAADLKEHVIKPVIPEQYLDEKTIFHLNPSGRFVIGGPHGDAGLTGRKIIIDTYGGWGAHGGGAFSGKDPTKVSYAIGVPEPLSVFVDTYGTGAIPDKEILKIVKENFDFRPGMIIINLDLKKGGNGRYLKTAAYGHFGRDDPDFTWEVVKPLKAEKPSSA

SEQ ID NO: 60600 - protein, 71 aa, Zea mays
  Coding DNA Sequence Number=SeqID_18821
MDRASKRGLNYQRLLEGRLNALLLLCMCAFPAPARSQNTTLATAAPASVEGFNCTANRTYPCQAYALYRAG

SEQ ID NO: 60601 - protein, 501 aa, Zea mays
  Coding DNA Sequence Number=SeqID_18822
  Gene Ontology: Mol. function=actin binding; Biological process=actin cytoskeleton organization and biogenesis
  Homolog annotation: Hit_ID=Q5SMN4; Match level="QueryCoverage=99%, HitCoverage=91%, E-value=1e-163, Identity=58%"; Hit description =Formin homology 2 domain-containing protein-like
MPYIGGILKQLLGRHSIDSFMVFNFEGSKKDNQIASIFSYYDMSVMGYPRNYEGCPLLTMEMIHHFLRSSESWLSLSQDNFLLIHAEHGGWPILAFALAALLVYLKRYNDERKALEAVCKQAPDGLAEFFSPLDPVPSQLRYLKYVSKRHKSLESWPPVDRMLNLNCIIIRKVPNFDGQGGCRPIFRIYGLDPLAPNDRGTKLLFLTPKTSDFVQLYTQEDCEIIKVNVHCPVQGDIVIECVSLDEDFEHEVMMFRAMFSTAFIEDNLLVLDRNEIDILWDTKHRFPVDFRVEVIFSDMEIGTAVHKSGLSSEEKESLSKVGDAFSHLEWSSKSVHITNEDSKQKGLQTEHDGFEKIPLEETGTSSASAGNSSRTVQIHHIEPAENHSSLASVHSSPEPEASGSGPNFQGGQLSNDTSAQEEHEVDDTKVEPNPEIPRDAEAGDADAAATAAEWSDNNSDVFLSDTHTPSSSTPSSPPKFDEDILEAGMVGTRSQLTELKI

SEQ ID NO: 60602 - protein, 145 aa, Zea mays
  Coding DNA Sequence Number=SeqID_18823
MEPFVAAQGLVIVLQRSHARAYDDPLNKPNVQTTKNLRENKSTGAELPSLLPPAPPPSVPPPRYIATTGSTARNVSSLPDSSSPTRFGYPAGRRVLCPVPASAAGRMSLFRRLFYRRPPDGLVEISGNILGAFAFLAQYSVILLF

SEQ ID NO: 60603 - protein, 295 aa, Zea mays
  Coding DNA Sequence Number=SeqID_18824
  Homolog annotation: Hit_ID=Q1S0J6; Match level="QueryCoverage=45%, HitCoverage=39%, E-value=2e-32, Identity=57%"; Hit description =Ubiquitin; Apoptosis regulator Bcl-2 protein, BAG
MKESSPPPPDPAASAVAVKEDEWEVRSGGMLVQRWSPDADAPAGAPVPTIRVKVKFNGVYHKIYIKSQASFDKYSELKKMLSSRMGLHPEDQNLVYKDKEWDSKAFLDMADVKDRSKMVLLEDPAAQAKRLLEQRHADKAERAAKSISRISLDVDKLTKASKGCRCICGGGEGGASCGVDEHRARRVMGPRTGARWRPLPISVWGARAWYGLVGAVARIVGRQWRPSIDGEQRGRWVGMEGRMNRGWKGARRAGGVRGACAVERRRWGGGWGIRDRDGIGRTVHHSALWTPTMHT

SEQ ID NO: 60604 - protein, 101 aa, Zea mays
  Coding DNA Sequence Number=SeqID_18825
  Homolog annotation: Hit_ID=O24587; Match level="QueryCoverage=38%, HitCoverage=3%, E-value=3e-10, Identity=76%"; Hit description=Pol
MKDLSPLPFSKSYPFPNEQHTCLMAKEKKKKMFTFYIKNKDSHNTIIFGDGNQGKTLCSMSSRETCGNKISKQERDDDVETIGASSYESLRDKSKTQETAS

SEQ ID NO: 60605 - protein, 74 aa, Zea mays
  Coding DNA Sequence Number=SeqID_18826
  Subcellular localization annotation: CTP_CleavageSite=46; ConfidenceScore=5.03e-01
MDRIPRLVRSIPRPLSTAVLPPASSLDARWRRAPLGNQAGAVKRVNGGGVVGWLCGRVGRLSLDSAKIELSSDN

SEQ ID NO: 60606 - protein, 132 aa, Zea mays
  Coding DNA Sequence Number=SeqID_18827
  Subcellular localization annotation: CTP_CleavageSite=36; ConfidenceScore=5.07e-01
GASTAKIRTKNSGVRKTENTATTAKKSREMSRSLTPAKKARTLLHEEAELLDGVLGVGPHLPREEAIPSTDYAGPARSRRREARWKIQSAVGGRPPEGVRDSASQCMTVCSDFGAEGKRVTPYKKVMLIPHF

SEQ ID NO: 60607 - protein, 724 aa, Zea mays
  Coding DNA Sequence Number=SeqID_18828
  Gene Ontology: Mol. function=protein binding; Cellular component =nucleus; Biological process=negative regulation of ethylene mediated signaling pathway
  Homolog annotation: Hit_ID=Q6Z796; Match level="QueryCoverage=85%, HitCoverage=100%, E-value=0.0, Identity=73%"; Hit description =Putative F-box protein
  Pfam annotation: Domain name=F-box; Domain location=166-214; Score =18.8; E_value=0.02; Accession=PF00646.23; Description=F-box domain
  Pfam annotation: Domain name=LRR_1; Domain location=297-324; Score =7.9; E_value=9.5; Accession=PF00560.23; Description=Leucine Rich Repeat
  Pfam annotation: Domain name=LRR_1; Domain location=349-372; Score =1.9; E_value=1.3e+02; Accession=PF00560.23; Description=Leucine Rich Repeat
  Pfam annotation: Domain name=LRR_1; Domain location=429-452; Score =3.7; E_value=58; Accession=PF00560.23; Description=Leucine Rich Repeat
  Pfam annotation: Domain name=LRR_1; Domain location=455-478; Score =2.6; E_value=93; Accession=PF00560.23; Description=Leucine Rich Repeat
  Pfam annotation: Domain name=LRR_1; Domain location=535-557; Score =2.9; E_value=81; Accession=PF00560.23; Description=Leucine Rich Repeat
  Pfam annotation: Domain name=LRR_1; Domain location=588-608; Score =6.9; E_value=15; Accession=PF00560.23; Description=Leucine Rich Repeat
  Pfam annotation: Domain name=LRR_1; Domain location=615-635; Score =4.4; E_value=43; Accession=PF00560.23; Description=Leucine Rich Repeat
  Pfam annotation: Domain name=LRR_1; Domain location=641-666; Score =4.8; E_value=37; Accession=PF00560.23; Description=Leucine Rich Repeat
  Pfam annotation: Domain name=LRR_1; Domain location=667-690; Score =9.1; E_value=5.8; Accession=PF00560.23; Description=Leucine Rich Repeat
  Pfam annotation: Domain name=LRR_1; Domain location=693-717; Score =0.7; E_value=2.1e+02; Accession=PF00560.23; Description=Leucine Rich Repeat
  Pfam module annotation: Pfam domain module=F-box::LRR_1::LRR_1::LRR _1::LRR_1::LRR_1::LRR_1::LRR_1::LRR_1::LRR_1::LRR_1; Domain location
  Subcellular localization annotation: CTP_CleavageSite=70; ConfidenceScore=5.19e-01
MRCHAPGLLVRLGNGDGCNGRGRSVVSSTIPTEVPLLLPSFASFFSPVAGGDRVPFFLLRRAVNASGPLRRSRSGGDRAPVRSPGLDSIGRGRGSFGLGKFEDMPALYAYYGDGGCLVSAPAELAGLFCRGAVQQRKRTLVTASAVAAAAAEFVRAAKKQRQLPLPSLDALPDECLFEILRRVPGGRGRGASACVSRRWLALLGSIRASELGQAAAAAADTPSLPDLNEEFVMEEDNEESPAGSKLAVRGSHPTRGVTDQGLSAVARGSPNLSSLALWDVPLITDAGLAEIAAGCPSLERLDICRCPLITDKGLVAVAQGCPNLVSLTIEACPGVANEGLRAIGRSCVKLQAVNIKNCPLVGDQGISSLVCSATAALTKIRLQGLNITDASLAVIGYYGKAITDLTLTRLAAVGERGFWVMANAAGLQNLRCMSVTSCPGVTDLALASIAKFCPNLKQLYLRKCGYVSDAGLKAFTESAKVFENLHLEECNRVSLVGILAFLLNCREKFRALSLVKCMGIKDICSAPAQLPLCRSLRFLTIKDCPGFTDASLAAVGMICPQLEQVDLSGLGEVTDNGLLPLIQSSEAGLVKVDLSGCKNITDVAVSSLVKGHGKSLKKINLEGCSKITDAILFTMSESCTELAELNLSNCMVSDYGVAILASARHLKLRVLSLSGCSKVTQKSVLFLGNLGQSIEGLNLQFCDMIGNHNIASLEKKLWWCDILA

SEQ ID NO: 60608 - protein, 84 aa, Zea mays
  Coding DNA Sequence Number=SeqID_18829
  Gene Ontology: Mol. function=hydrolase activity, hydrolyzing O -glycosyl compounds; Biological process=carbohydrate metabolic process
  Homolog annotation: Hit_ID=Q69Q39; Match level="QueryCoverage=71%, HitCoverage=13%, E-value=9e-12, Identity=62%"; Hit description =Putative elicitor inducible beta-1,3-glucanase
MSDAQLDAAYFALEAAGYSGMEVRVAETGWASTGDATEAGANMGNTARREVDADVQWRLVLANDMKRLRNKKADELYLVICCIL

SEQ ID NO: 60609 - protein, 199 aa, Zea mays
  Coding DNA Sequence Number=SeqID_18830
  Gene Ontology: Mol. function=hydrolase activity, hydrolyzing O -glycosyl compounds; Biological process=carbohydrate metabolic process
  Homolog annotation: Hit_ID=Q69Q39; Match level="QueryCoverage=55%, HitCoverage=22%, E-value=1e-12, Identity=43%"; Hit description =Putative elicitor inducible beta-1,3-glucanase
MKMSCEMRFLLQLPILQQPMSSLQKHRVDEDAERAHHPSETNDGDGAAAQAGPDPHPLREHLRRRAQGGGRVPSHGHARASTSWSRGGHPQRVAQGHMAANPAKAMDRWTGDWLNENVHPYVLPVHAHRRHRRGQRGAGRAGRRARRGARRRHPQQRSMLPLVDALRMLRRDATIELSTPDSEAVFANSYTPSLRLHLL

SEQ ID NO: 60610 - protein, 196 aa, Zea mays
  Coding DNA Sequence Number=SeqID_18831
MEFVAAVIESEVESSCGRRIPGIIALATAKDPCPRRPEIRARPPFHDSPEDNLRRETQSRLPEATFRRETQARLARGQHQTEDVVTARPRPTLSGRRSHLGRETHSRLARGHPWAGDAVTPRPRPTSGGRGSHASPEAIPERETQSQFVRGQSHAGDIVTSDGRHSHASPEATLKRETQSRFARSHPQAGDASSYD

SEQ ID NO: 60611 - protein, 96 aa, Zea mays
  Coding DNA Sequence Number=SeqID_18832
MGRALSTLMHPAWRPRPIRHVTGAPVTTCEKLHCHLRQCRAFSTEEPVPRLEATLHMAQQCQPSTSVTGELGSFNEKDPLGMNGKTGVVSSLAGRN

SEQ ID NO: 60612 - protein, 86 aa, Zea mays
  Coding DNA Sequence Number=SeqID_18833
MASSFFCEYEIDRQPFESNKEEMKKLGQRMRWHFKRIVDQYGRKRSLCQILYHLKLGQKLPLGAEEFAGRRTKLPFSKKLAKFENT

SEQ ID NO: 60613 - protein, 287 aa, Zea mays
  Coding DNA Sequence Number=SeqID_18834
MMSGTRWLVIAGARLGLASSAHGQREWGRGRCSGVDRGSAGQRQEGGNRSVVFSVFQNLNPQSPNNTVAPNYLEHTQAKFEKFSQKFDTILAQIFSGLGRETLAFWRRDNSLSEAQNHMTSTHKRQSSVKGTNPTWQSCPNSQRSAPYRRYNRSRRNHATCSTAAVMPGARQPVRPLRSTPPVHRACAFKSHPRTCNTLLRACPDCPGPVLSSDELCAARQATRALGHHGQPFPTTPSLALAPRRLPREVEKLSQASAEALPHRKSVRNLTGLRSTATARRPGHSRT

SEQ ID NO: 60614 - protein, 82 aa, Zea mays
  Coding DNA Sequence Number=SeqID_18835
MSNPKERASASSANGKKVEKKKKGETYIGKEWNSDSNSSNSNDEGLANIAFDKFSIFPNKQNSRVGLRWVKTDAAQDPATKS

SEQ ID NO: 60615 - protein, 707 aa, Zea mays
  Coding DNA Sequence Number=SeqID_18836
  Gene Ontology: Mol. function=RNA-directed DNA polymerase activity; Cellular component=mitochondrion; Biological process=RNA-dependent DNA replication
  Homolog annotation: Hit_ID=UPI00004C1731; Match level="QueryCoverage =94%, HitCoverage=45%, E-value=0.0, Identity=77%"; Hit description =UPI00004C1731 related cluster
  Pfam annotation: Domain name=RnaseH; Domain location=213-416; Score= -33.3; E_value=0.072; Accession=PF00075.14; Description=RNase H
  Pfam annotation: Domain name=rve; Domain location=419-578; Score =108.6; E_value=1.8e-29; Accession=PF00665.16; Description=Integrase core domain
  Pfam module annotation: Pfam domain module=RnaseH::rve; Domain location=213-416::419-578
MGPIKDLKGVQRVMGCLAALSRFISRLGEKGLPLYRLLRKAECFTWTLEAKEALGNLKALLTNAPILVPPAAGEDLLIYVAATTQVVSTAIVVERREEGHALPIQRPVYFISEVLSETKIRYPQIQKLLYVMILTRRKLRHYFESHPVTVVSSFPLGEIIQCREASGRIAKWAVEIMGETISFAPRKAIKSQVLADFVAEWVDTQLPAAPIQPELWTMFFDGSLMKTGARAGLLFISPLGKHLRYVLRLHFLASNNVAEYEALVNGLRIAIELGVQRLEARGDSQLVIDQVMKNSHCHDPKMEAYFDEPEAPSAPEGEALHVEEERNGVPPNRDWQTPYLQYLHRGELPLDRAEARRLARRAKSFVLVGDEKELYHRSPSGILQRCISIAEGQELLQEIHSGACGHHTHLPTQALQTIPITWPFVVWGLDLVGPLQKAPGGYTHLLVAIDKFSKWIEVRPLNDIRFEQAVAFFTNIIHRFGVPNSIITDNGTQFTGRKFLDICEDHHIRVDWAAVAHPMMNGQVERANCMILQGLKPRIYNDLNKFGKRWMKELPSVVWSLRTTPSRAAGFTPFFLVYGAEAILPTDLEYGSPTARAYDDQSNQTNREDSLDQLEEAQDMTLLHSARYEQSLGCYHARGVRSRDLQVGDLVLRLRQDARGRHKLTPRWEGPFVIAKVLKPGTYKLANSQGEVYSNAWNIRQLRRFYP

SEQ ID NO: 60616 - protein, 261 aa, Zea mays
  Coding DNA Sequence Number=SeqID_18837
  Homolog annotation: Hit_ID=Q6QP51; Match level="QueryCoverage=43%, HitCoverage=45%, E-value=8e-07, Identity=37%"; Hit description =Putative growth-regulating factor 1
MTVAILAKENSVACPALTAVPLDRVRLTAAKSSLRRHRKLRLPDPGLGLSLDPGRRTPPRPTPGLGHSLGLGFGRRSPPCPTPGLGLSLDPGRRTPPRPTPGLGLSLGLGRRSPPRPTQGSDLALTSEDELHLARPQGPDSTSTSEGPPRGRNADKEFEESLGMLEQMTEKLELTWDKLAAVRVIEGWCVAIDCDVVKWLTAWHNGEERRHAGDGHAATSPESRRRRDSKRTIAGGEGLSWRPDPFTVPSNSSSVRLTAKV

SEQ ID NO: 60617 - protein, 506 aa, Zea mays
  Coding DNA Sequence Number=SeqID_18838
  Gene Ontology: Mol. function=RNA-directed DNA polymerase activity; Cellular component=nucleus; Biological process=RNA-dependent DNA replication
  Homolog annotation: Hit_ID=UPI00004C1732; Match level="QueryCoverage =94%, HitCoverage=32%, E-value=0.0, Identity=76%"; Hit description =UPI00004C1732 related cluster
MGAVPDPVPNPDYYHKRTELPNVTDSDVIGAFLAGTTCRDLVSKLCRKTPTRASELMDIATKFASGQEALEAIFRKDKQPQGHQPEDVPEASTQRGTKKKGKKKSQAKCDAADADLVAAAEYKNPRKPPRGANLFDKMLKEPCPYHQGPVKHTLEECVMLRRHFHKAGPPAEGGRAHNNDKKEDHKAEEFPEVHDCFMIYGGPAANASARHRKQERREVCSVKVAAPVYLDWSDKPITFDQGDHPDRVLSPEKYPLIVNPVIGNVRLTKVLMDGGSSLNIIYAETLGLLRIDLSSVRAGAAPFHGIIPGKRIQPLGQLDLPVCFGTPSNFRRETLTAGRPCYAKFMAVLNYTYLKLKMSGPNGVITVGPTYRHAYECDVECVQYVKALAKSEALIADLESLSKEAPDVKRHTGNFEPAKTVKSVPLDPSNDASNPSDMPGIPREVAEHSLDIRAGARPVKQPLRRFDEEKCRAIGKEIHKLMAAGFIKEAASAEEAALGNLLTAYG

SEQ ID NO: 60618 - protein, 261 aa, Zea mays
  Coding DNA Sequence Number=SeqID_18839
  Gene Ontology: Mol. function=microtubule motor activity; Cellular component=microtubule associated complex; Biological process =microtubule-based movement
  Homolog annotation: Hit_ID=Q9C7B9; Match level="QueryCoverage=66%, HitCoverage=18%, E-value=1e-55, Identity=65%"; Hit description =Kinesin heavy chain, putative; 55116-47986
  Pfam annotation: Domain name=Kinesin; Domain location=9-140; Score= -132.0; E_value=5.3e-06; Accession=PF00225.13; Description=Kinesin motor domain
MAVMAGRGRRRGLALLEEEASRAGKGPGGPAAEVRAGADGGGRAPAAEIRAGPVVGLCQGRPVASLCQGLAGDGHAPTPVAEDGKATHIPYRDSKLTRLLQSSLSGHGRISLICTVTPASSNSEETHNTLKFAHRSKHIEIKASQNKIIDEKSLIKKYQKEISSLKEELQQLRRGMMGNGGILPTDQEDLVNLKLQLEAGQVKLQSRLEQEEEAKAALMGRIQRLTKLILVSTKSSISSNVSGKTNFRRRHSFGEDEQLFF

SEQ ID NO: 60619 - protein, 215 aa, Zea mays
  Coding DNA Sequence Number=SeqID_18840
  Homolog annotation: Hit_ID=Q9FG03; Match level="QueryCoverage=35%, HitCoverage=7%, E-value=5e-25, Identity=68%"; Hit description =Kinesin heavy chain-like protein
  Subcellular localization annotation: CTP_CleavageSite=24; ConfidenceScore=5.79e-01
MSSSRPTRSSISPFRSRRSAPAVSAAGPPPPARTSSGGRPSTPSSTASGRPTTPSSSGGRPATPSAAFARPATPSSSSARPATPSSTASARPTTPSSISSRVAVRAPLVDAANAKENIMVTVRFRPLSPREINKGDEVAWYADGDNMVRNEYNLSIAYAFDKVFGPATTTRHVYDIAAQHISIPMLASRNISDELHKQQIWAVDNAEKELFLHME

SEQ ID NO: 60620 - protein, 495 aa, Zea mays
  Coding DNA Sequence Number=SeqID_18841
  Gene Ontology: Mol. function=cytokinin dehydrogenase activity; Cellular component=endoplasmic reticulum; Biological process =electron transport
  Homolog annotation: Hit_ID=Q5Z620; Match level="QueryCoverage=94%, HitCoverage=95%, E-value=1e-164, Identity=60%"; Hit description =Putative cytokinin oxidase
  Pfam annotation: Domain name=Cytokin-bind; Domain location=206-475; Score=495.4; E_value=6.6e-146; Accession=PF09265.1; Description =Cytokinin dehydrogenase 1, FAD and cy
  Pfam annotation: Domain name=FAD_binding_4; Domain location=62-205; Score=34.5; E_value=3.7e-07; Accession=PF01565.13; Description=FAD binding domain
  Pfam module annotation: Pfam domain module=Cytokin-bind::FAD_binding _4; Domain location=206-475::62-205
MTARAAYLASFLIVTSFLPTSSSHSHVPAVTDALDIVSKISTEHDATIKASMDFGHIVRAIPSGVFHPTSPSDIAALIRLSLSQPKPFAVAPRGRGHSARGQALAVGGVVVDMRSLHDHDHDHRAGHGRYRMNNAVPGAWVDVGGEQLWIDVLHATLEHDLAPRVWTDYLHITVGGTLSNGRHRRAGVPARAADLQRTGEMISCSPGKNSDLFYAALGGLGGCGSGFDYVEGQVQLNRTLTEGRRSSSFFSAPELDQLARLAVATGSAAIYYIEGAMYYDDDTTTASSVNQKLETLLEELSFVPGLAFVRDVSYVDFLDRVGRDEQKLRSAGVWDVPHPWLNIFVPRSRILDFDAGVFKGILKGTRPVGLILMYPMNKDRWDDRMTTATPDEDVFYAVGLLRSAVAAADLEQLERENAAVLEFCHREGIGYRQYLPSHASLDGWRRHFGEKWSRFAALKRKYDPRAILTPGQGIFFSAGHDLTDQQTGSDSRNVL

SEQ ID NO: 60621 - protein, 102 aa, Zea mays
  Coding DNA Sequence Number=SeqID_18842
MANPIHLYRGGEAGSAALTPAAALAPARNTTRLRPDPNVSVPARYEVQGGIKWGRITEDEDPAGATLWCCPEKLDADEEAEPRSDLNPAQIRLSVLYLTGRV

SEQ ID NO: 60622 - protein, 286 aa, Zea mays
  Coding DNA Sequence Number=SeqID_18843
  Homolog annotation: Hit_ID=Q6QP51; Match level="QueryCoverage=34%, HitCoverage=35%, E-value=2e-19, Identity=56%"; Hit description =Putative growth-regulating factor 1
  Pfam annotation: Domain name=zf-CCHC; Domain location=37-54; Score =26.3; E_value=4.5e-05; Accession=PF00098.13; Description=Zinc knuckle
MVTKTTKMLKKLNREGIKFDSRKKKFFSSKRKPISEMDCYNCGELGHLAHQCNKPKKNKLKGKKEDDNNDEKKEKRFFKRKDGSKRGSTKRKMERHILLVTGSPTLSLQVDLLQVKKRMMKKLPPSPGTSLHHHHRYHRLLTYASWLEPRAKQGAPPRPTSGLGLILGRGRRSHPRPTLGLGLSLGLGIRSPPSPTSGFGLSLGLGRSHILARPQPRPQEKSPPRPISASDRLRHWGYIITLPLASCLRLRRNKTGVPSKITPDPCSNASCASTGLKYFSAGHVST

SEQ ID NO: 60623 - protein, 83 aa, Zea mays
  Coding DNA Sequence Number=SeqID_18844
  Gene Ontology: Mol. function=DNA-directed RNA polymerase activity; Biological process=transcription
  Homolog annotation: Hit_ID=Q1L6B6; Match level="QueryCoverage=66%, HitCoverage=8%, E-value=4e-20, Identity=85%"; Hit description=RNA polymerase II second largest subunit
  Pfam annotation: Domain name=RNA_pol_Rpb2_4; Domain location=23-66; Score=30.9; E_value=4e-07; Accession=PF04566.3; Description=RNA polymerase Rpb2, domain 4
MSAGRKSARLPLVVRRASWGSGVFLDMREKIDVNTEVGVVRDIRLKELRLYTDYGRCSRPLFIVEGQRLLIKKAHIRALQQRV

SEQ ID NO: 60624 - protein, 186 aa, Zea mays
  Coding DNA Sequence Number=SeqID_18845
  Gene Ontology: Mol. function=phosphoprotein phosphatase activity; Cellular component=nucleus
  Homolog annotation: Hit_ID=Q2QM47; Match level="QueryCoverage=48%, HitCoverage=8%, E-value=1e-35, Identity=78%"; Hit description =Serine/threonine-protein phosphatase BSL2 homolog
  Subcellular localization annotation: CTP_CleavageSite=67; ConfidenceScore=5.20e-01
MDVDSRMTTESDSDSDAAAAAAAHGGSAGGSGSGSETSSSSAPSTPGTPGTPGAAGPRPAPGYTVVNAVIDKKEDGPGCRCGHTLTAVPAVGEDGTPGYIGPRLILFGGATALEGNSATPPSSAGSAGIRLAGATADVHCYDVSSNKWSRRTAPLSLSTNPNPEPVPMSLHALATAPYTFMYEYLS

SEQ ID NO: 60625 - protein, 42 aa, Zea mays
  Coding DNA Sequence Number=SeqID_18846
  Gene Ontology: Mol. function=oxidoreductase activity
  Homolog annotation: Hit_ID=Q8LB59; Match level="QueryCoverage=94%, HitCoverage=15%, E-value=1e-10, Identity=68%"; Hit description=Minor allergen
WMTITQIAHHRMLFIPIGYTFGSDMFDMDDIREGNPYGVGVK

SEQ ID NO: 60626 - protein, 246 aa, Zea mays
  Coding DNA Sequence Number=SeqID_18847
MRQCEGHALAVDRGGARRHQRLGHRPHWLWLWDSSLVPAAYFTADSPARCRICGATAVELGAGMGLLGIAATVCLGAAHCVLADVVALLSGLKGNTFANRRRCGNVHDSGRLDIAPARAVYCDGVGGGGSVAGGAALLSAASRKRRRPIGATPAHSGVQEEEEPQQGDDPTATRALFAELDERGTTSELENLALNIQGLGKRRLDGSEKQGGHARSQQQRGFETTELTDDFFGGATERRDEGQCRG

SEQ ID NO: 60627 - protein, 95 aa, Zea mays
  Coding DNA Sequence Number=SeqID_18848
MAEKENSPPQRHKEPQEETETQAMSTPRAVQFGDGDKKSTPDGVCAREREVNVNASISSNPVLSSSIMTIISKPTEALVWLTYEPSSAAQAQMIT

SEQ ID NO: 60628 - protein, 228 aa, Zea mays
  Coding DNA Sequence Number=SeqID_18849
  Gene Ontology: Mol. function=protein dimerization activity; Cellular component=nucleus; Biological process=regulation of transcription, DNA-dependent
  Homolog annotation: Hit_ID=Q8S976; Match level="QueryCoverage=99%, HitCoverage=43%, E-value=9e-43, Identity=36%"; Hit description=Auxin response factor 10
  Pfam annotation: Domain name=Auxin_resp; Domain location=184-227; Score=-22.4; E_value=0.033; Accession=PF06507.4; Description=Auxin response factor
  Pfam annotation: Domain name=B3; Domain location=48-153; Score=77.5; E_value=4.2e-20; Accession=PF02362.12; Description=B3 DNA binding domain
  Pfam module annotation: Pfam domain module=Auxin_resp::B3; Domain location=184-227::48-153
MPPVGAAVYYFPQGHAEQAGAAVDLRAAAGVPPFVLCYVVSVRLMADPDTDVLTASDANNGDVFSVLANCAKAVFPELDYSLGTPKQFVCVRDVHGVEWMFCHIWRGSPKRHLLTAGWNNFVNTKKLRFGDSVVFMREEDSKIHVGLRRTNRLFGAMQGNGGGPAGAVVGPSDGKVSTEDVVAAARLAGAGLWFEVVYYPHVASSEFCVSVAAVKESMQVPWFPGLQL

SEQ ID NO: 60629 - protein, 238 aa, Zea mays
  Coding DNA Sequence Number=SeqID_18850
  Gene Ontology: Mol. function=tyrosine decarboxylase activity; Cellular component=cytoplasm; Biological process=metabolic process
  Homolog annotation: Hit_ID=Q8RUN2; Match level="QueryCoverage=87%, HitCoverage=98%, E-value=2e-85, Identity=75%"; Hit description =Expressed protein
  Pfam annotation: Domain name=Lysine_decarbox; Domain location=57-190; Score=251.2; E_value=2.2e-72; Accession=PF03641.4; Description=Lysine decarboxylase family
MTMGMPTVPSRFRRICVFCGSSQGRKKSYQDAAVELGEELVSRNIDLVYGGGSVGLMGLVSRAVYNGGRHVIGVIPKTLMPREITGETVGEVKAVADMHQRKAEMARQSDAFIALPGGYGTLEELLEVIAWAQLGIHDKPVGLLNVDGYYNSLLSFIDKAVEEEFISPTARHIIVLAPTPNELLDKLEEYSPRHEEVVPKTKWETEQLSCCKSCEIPPGLKEGTPIVQAQRGTMHALN

SEQ ID NO: 60630 - protein, 75 aa, Zea mays
  Coding DNA Sequence Number=SeqID_18851
  Subcellular localization annotation: CTP_CleavageSite=57; ConfidenceScore=5.41e-01
MNKNPGNRNAITNGTPVPPPQTGSEQKKPNRRAWCAQPPSGYKRPPTFAQTNGREGRAAMQAACNRARWTRFSDF

SEQ ID NO: 60631 - protein, 124 aa, Zea mays
  Coding DNA Sequence Number=SeqID_18852
MATQLSLFKMTVEALSDGSRLSASLPSDAEILAHRGHGSSQGCSWGCRPICVSKPRLPSNASRAGFVEFPSSPVLREDLVPLLKKAVEKEAARAQAEQQRKDKKDRVEKKQRAEREMCRDTYNE

SEQ ID NO: 60632 - protein, 151 aa, Zea mays
  Coding DNA Sequence Number=SeqID_18853
MAARCGNEPHGLDAYEPRPENTAPVRGAAGSSSGPVKAQREGAMVKLGTGAQSDVEGRSTTGGRTWSSAWGNGVMGGRARRDPSGHGEVTAGPDLVEASREGTRRRRGRKSRDGRRAFVGGVQGEARWRKQREGEMGPMAGRLGKMASWDQ

SEQ ID NO: 60633 - protein, 115 aa, Zea mays
  Coding DNA Sequence Number=SeqID_18854
MASHLGIENPTEGDGSMYLRLRFDMNDVSVWSSLDALRQLISALTDFCGHMCQQDRRMKPLKHCTVLEEQGGSKFMETGTVYIWRDGDAGSHLEGVDKTTVKERIWVSEAQASAS

SEQ ID NO: 60634 - protein, 257 aa, Zea mays
  Coding DNA Sequence Number=SeqID_18855
  Pfam annotation: Domain name=PAM2; Domain location=159-176; Score =25.7; E_value=0.00016; Accession=PF07145.5; Description=Ataxin-2 C -terminal region
MQRMRCSYAQATDRPAQCRGLTSDAPPHYTPGPCSLQIVHLLLRSGRRSVAAAPTESLRPTPDLAAVNKYPTSPASASFENTSFPAFYPNNLTSCGSPLSLAATAPTSFPLWYCCWLAAALGGGGGGTETLALALMSQQEAVDPPSATDERLGGLPRSGSTSRLNAQAPEFVPRAAAVPPPPPQQKVVRLFAPPPHAAFFVAAPRPPPPPFEYYAAVATGGGGRFGPPAAAAEQEAEAEQPPRDGSFDDPVPKIRKQ

SEQ ID NO: 60635 - protein, 410 aa, Zea mays
  Coding DNA Sequence Number=SeqID_18856
  Homolog annotation: Hit_ID=Q0GPH8; Match level="QueryCoverage=28%, HitCoverage=26%, E-value=3e-07, Identity=38%"; Hit description=BZIP transcription factor bZIP56
  Pfam annotation: Domain name=DUF1664; Domain location=2-85; Score =20.8; E_value=4.8e-07; Accession=PF07889.3; Description=Protein of unknown function (DUF1664)
MGLNAIQYNSMTIPPLTVLVAKKHLAGRIDRVDCSLDECQVITEATREEVTIIHGDLSAFQKEMETVHLVVRSLETKLGRLAYTQVDIYITDSFFSQRLNYISNLILKCLRIGQHEEYMICVNSLKDWIRARKLILVRQVTSSTSRPAIESSERIIRVVRSSTVMSASGLSLLAGTTIPPKRVMCTLIRQLVYLLLLSMKMLLTEDEGLSFTKWQSWSLQPASKKDSKCRREQGRWGWIQRSRKRAVPWREQILDRREREVVVCVEVRGARSCKWRELDDEVSVGIRAPAMTPTPCDATAAAWRSQSSRAARCRCSRCPGGWRLGTRTQNSRTVRVRCWSYSREERIGRRTAWARTAERSGSGAVIHAWDPGAGDLRARRMRDLGRGGGGGGPSIRAIWWRNLPSAGVAE

SEQ ID NO: 60636 - protein, 158 aa, Zea mays
  Coding DNA Sequence Number=SeqID_18857
  Subcellular localization annotation: CTP_CleavageSite=99; ConfidenceScore=5.22e-01
MDDCAGSAPLCCPCPRRPAPDPLLPGVTPTADPNSPAVLRPCTKAPATRATRAPTPSSTRALRAPSSSSSIAGRRRHSRGTDSDRHFVVKLSPFATPCSADLDANYNFSLAPVQDLLSPWYRPLSRPLNPPPSPLLPPAFAVLLGSRLQGPRLPFRER

SEQ ID NO: 60637 - protein, 142 aa, Zea mays
  Coding DNA Sequence Number=SeqID_18858
MVLDLWSRRRCRTLVAVVPCGRGGGVQERSLRLRLPHPTAPSDGKPTMSKTMWPSTVAHATVLTGNSVGRKETYSRWHEQRLGRGAVAAAGEEMRVSVVFGVVRDMVRALPGAEIEAWRGGVDVFFRVVRGAQPIATETTKG

SEQ ID NO: 60638 - protein, 173 aa, Zea mays
  Coding DNA Sequence Number=SeqID_18859
  Homolog annotation: Hit_ID=Q6K2Y3; Match level="QueryCoverage=41%, HitCoverage=6%, E-value=2e-16, Identity=57%"; Hit description =Putative guanylate binding protein
MEGGAAIQRRNAVKRHLQQRQQEADFLDKKVIASTYFSIGAFLVLACLTVSLLILPLVLPPLPPPPSLLLWLPVCLLVLLVVLAFMPTDVRSMASSYLNRRQVSTDDGGSVFIGEDTYNGSQQGTESEDYTKFTVLKLKQELTKHGFGAQLLQLKNPNKKDIVALYEKHVVGK

SEQ ID NO: 60639 - protein, 75 aa, Zea mays
  Coding DNA Sequence Number=SeqID_18860
MRLPACEALEEKGRVVSRREQGLGDDGGVATCGHGGDGLGDDGARSRRCAWEPNRRSLLKDYITGRESLQLKVYS

SEQ ID NO: 60640 - protein, 42 aa, Zea mays
  Coding DNA Sequence Number=SeqID_18861
MSRAFDYYYIKDYDVISVPEVTQRSTGSNDQFVILVTVGDHK

SEQ ID NO: 60641 - protein, 190 aa, Zea mays
  Coding DNA Sequence Number=SeqID_18862
  Homolog annotation: Hit_ID=UPI00004C1732; Match level="QueryCoverage =80%, HitCoverage=12%, E-value=9e-10, Identity=26%"; Hit description =UPI00004C1732 related cluster
MWDVVGVVATVEDDWKFQPPKVSWDCRLRCVDFSMSSLYAMLVVRYGDKALQELALLELVLDGEAMILTRRVHQLLEMVATVLGQRPSWSICCDDFFTAPRMVVPSTLVRVLTTFPHFSARLASVPWALSYAENGSHVIISVSELGRYVNPVALAFVAALWAPRIRLTSLSPNTASGSHIPGPSSPRNNP

SEQ ID NO: 60642 - protein, 52 aa, Zea mays
  Coding DNA Sequence Number=SeqID_18863
MALDDASALCGMVLGDMLLEIDHHGGEFAIRSLVFGVEIGVVAERDGESDPP

SEQ ID NO: 60643 - protein, 444 aa, Zea mays
  Coding DNA Sequence Number=SeqID_18864
  Subcellular localization annotation: CTP_CleavageSite=35; ConfidenceScore=5.52e-01
MRGGPPTLSTSDLSVVDGASTNELTGLPVPTSLPVQGMLATPSPSVCLIMMTSCAVSLRGVSTAGVFPLIGASPEGRGVLVLLPSLPSLGATVVITQPEAATSLVVASFSSTRVVVPPPPEGHPSPPPRCRGGRGGWKARAEEFLSVQWEVEQLHVVATHLVAKQRKLVELRSRAERLESEEAQLRSKGEGARTEADHLWGDETQLLAVLRELRKMLSQADDAKRTAKEMKAVAEARVREVSLAHNGAIVASAEAAIMLSERSAELQGFCLVVCQVCSHLSPLPSIEVPLVDRMWSLPRHEERVIAESVFHGSGLALGQMVSHFDEIDTVVIVEAFFVDRSDEELDAIDDQVHPCQSARRNGGREDPAGRPWSLASSASDLPPAPRPLLAFTSFCNNVLGQDLCVACCLHFEPFALRILALVVLVEFIDLCGGGSFCVDWRDFR

SEQ ID NO: 60644 - protein, 576 aa, Zea mays
  Coding DNA Sequence Number=SeqID_18865
  Homolog annotation: Hit_ID=Q5DMX1; Match level="QueryCoverage=76%, HitCoverage=71%, E-value=4e-70, Identity=37%"; Hit description =Membrane protein-like
  Pfam annotation: Domain name=F5_F8_type_C; Domain location=157-284; Score=4.0; E_value=0.055; Accession=PF00754.15; Description=F58 type C domain
  Pfam annotation: Domain name=Sad1_UNC; Domain location=166-290; Score= 197.8; E_value=2.6e-56; Accession=PF07738.3; Description=Sad1  UNC -like C-terminal
  Pfam module annotation: Pfam domain module=F5_F8_type_C::Sad1_UNC; Domain location=157-284::166-290
MSRKRREGGGGGRGAGPVDHHGGGKGSEAGAAATDAVSMDGGLRESFYEEHGMRDSYCKVRPLEAYVLPYHNDSCQSSYSHSQTAQEAPSSSALASPQYNATTGGNASSPEAAFVGLDEFRSRMMQGKAENDTGPPTDGGVAHRLEPNGAEYNYAAAAKGAKVLAHNKEAKGAANILGGDKDKYLRNPCSAADKFVVVELSEETLVDTVALANLEHYSSNFREFEVYGSTSYPTEAWELLGRFTAENAKHAQRFVLPEPRWTRYLRLRLVSHYGSGFYCILSYLEVYGVDAVERMLQDFIAGAGAGAGAEADASRDRAPIDFANRDADCNDTTAQQDGNGGAGRNDSTAGDGKSNSSRSGDAKLPPQVAALASPTGRIHSDGVLKILMQKMRSLELSLSTLEEYTRELNQRYGAKLPDLQNGLSQTAVALEKMKADVHDLVDGKDSVAKDLDDLKAWKSTVSGKLDDLIKENQEMRQVPFPRGAARRGGSSDRQWSVEEMRGVQETLQNKELAVLSISLFFACLALFKLACDRVFCLFAGKGREEPDAEEHTRSSRAWMLVLASSSFTTLIVLLYN

SEQ ID NO: 60645 - protein, 117 aa, Zea mays
  Coding DNA Sequence Number=SeqID_18866
MARSGRKRNCPGHLYTEERRSVAPGLQIWPRITAAQAGSVLLPSAGSYPSARMQEANPTDGPHESARIPGQHAPDRSAHKPVKARARACGLESWAHLLISSFLLFGVSIRVWDKRLR

SEQ ID NO: 60646 - protein, 97 aa, Zea mays
  Coding DNA Sequence Number=SeqID_18867
MARSGRKRNCPGHLYTEERRSVAPGLRIWSRITAAQAGFVRLPSAGSYPSARMQEANPTDGPHESARIPGQHAPDRSAHKPVKARACACGLESWAHL

SEQ ID NO: 60647 - protein, 45 aa, Zea mays
  Coding DNA Sequence Number=SeqID_18868
  Gene Ontology: Mol. function=pyruvate dehydrogenase (acetyl -transferring) activity
  Homolog annotation: Hit_ID=Q9ZQY1; Match level="QueryCoverage=93%, HitCoverage=11%, E-value=1e-13, Identity=93%"; Hit description =Pyruvate dehydrogenase E1 beta subunit isoform 3
MLGAARRQLGSGPMLGQVLRRLRPAVAAEVARGYSAAAKEWFVGQ

SEQ ID NO: 60648 - protein, 276 aa, Zea mays
  Coding DNA Sequence Number=SeqID_18869
  Gene Ontology: Mol. function=helicase activity; Biological process =viral genome replication
  Homolog annotation: Hit_ID=Q6YTQ6; Match level="QueryCoverage=86%, HitCoverage=16%, E-value=1e-69, Identity=51%"; Hit description =Helicase-like protein
MPFSSSGPPSNDVRTIPYLDECDAPRRKRRHTSYPNRSYYGTPDYECSYCHAVFWYAERVRSNQQDSSMRYSNCCKGGKISIPPFKPRPKPLASLARFDGDATSRKFIRNIRQHNCLFAFTSMGAQIDNSVNDGRGPPLFKFCGQVHHRIGTLLPDDGSPPRFIQLYIYDTTNEVQNRINALDSGDRTQDNFDPVIIRNLIKMLDDHNPFVKKFRMARDRLADNPNEEFTIRLIRAKEGDPIQYNLPTTDELAILVVGDFTLDTFKRDIIIETQNK

SEQ ID NO: 60649 - protein, 558 aa, Zea mays
  Coding DNA Sequence Number=SeqID_18870
  Homolog annotation: Hit_ID=Q0MVR3; Match level="QueryCoverage=84%, HitCoverage=90%, E-value=0.0, Identity=92%"; Hit description=DNA damage signaling and repair protein
  Pfam annotation: Domain name=FHA; Domain location=101-186; Score =45.1; E_value=2.4e-10; Accession=PF00498.16; Description=FHA domain
  Subcellular localization annotation: CTP_CleavageSite=25; ConfidenceScore=5.26e-01
MSKTGGSRLSMTGCYSSKGKFRPPRCSEPPTAAVALWRAEAPSGTSLLFLLFAADLQRIPEKELRRVYELGKAEEEMVWVLDPVDTVRGIQKRYIFAAGTYKVGRKDCDVIVQTDTSISRVHAEIAIEKMVAWDPHSGAPASPSFVRVIDRSKYGTFVNKVHGTQGSRLHKDEDMMLTDGDAVTFGTGAYATRKWSNECTHVLVDGSCSLTPELLDAVMAKKQIMLGDWFEAMAEKNIHTEIPSCTQYIPNLTLDGMVIKMVDINLIQNFLEGYTFILGSSDKVYQFGEKLHGLLESTGAKYVHIDDFCANSQDSAAGDTDHQILVVPARYPLEFSKIRVLFTLSKISDIKLFAAILSGRLEATSIEPPAFIVTSSNSTDATIVADSDVEMETATSNPTGAANKSQHHTENISDDEKQTTNITNEVARKGNVIHPKHPESVEDLKPMEEDVKVIEKTATYRSTGRDEDARILSKAPKDEKLDTSRDGASDVIFSQNLVVRRSLPQSAPAAPAEIGGVNFKRFRKREMVSGNSFKDLIPFAREPYRQVLKRLPVSPKGY

SEQ ID NO: 60650 - protein, 378 aa, Zea mays
  Coding DNA Sequence Number=SeqID_18871
  Gene Ontology: Mol. function=transferase activity, transferring hexosyl groups; Biological process=carbohydrate biosynthetic process
  Homolog annotation: Hit_ID=Q7XHW0; Match level="QueryCoverage=96%, HitCoverage=54%, E-value=2e-98, Identity=57%"; Hit description =Putative glycosyl transferase protein A
MKAQPLLLPALKRRRGPRVAVLALVLCSLLVPLAFLFDRAPSGYVTTEERHRQEVVLPLLDHVAEKRRPSGSGADTRQDALEKKVPGSSAGVIHQQTPDKNISKVIRQQTPEKTISKGSAGVVHQYKQIGSHSTSDGAKPKELLFHVISHFSYFKASFVAVVLILAKKVKRLMKWKKSKSCQLEFGSYCLWSIEHKEVMKDYTVKRLKDQLFVARSYYPSIAKLQGQEALTQEMKQNIQDHEKILSVSTVDADLPSSINRRMKQMEQTIVRAKSCTVDCRSVDRKLRQILYMTEDEAHFHMQQSAFLYNLGAQTLPKSHHCLSMRLTLEYFKSSSLDSDDSPGRFSSPEYRHFVILSRNVLAASVAINSTVSSCKVFG

SEQ ID NO: 60651 - protein, 826 aa, Zea mays
  Coding DNA Sequence Number=SeqID_18872
  Gene Ontology: Mol. function=ATP-dependent helicase activity; Cellular component=intracellular; Biological process=DNA recombination
  Homolog annotation: Hit_ID=Q7XHW1; Match level="QueryCoverage=99%, HitCoverage=96%, E-value=0.0, Identity=69%"; Hit description =Putative ATP-dependent DNA helicase recQ
  Pfam annotation: Domain name=DEAD; Domain location=1-144; Score=52.3; E_value=1.6e-12; Accession=PF00270.19; Description=DEADDEAH box helicase
  Pfam annotation: Domain name=HRDC; Domain location=471-550; Score =24.1; E_value=0.00012; Accession=PF00570.13; Description=HRDC domain
  Pfam annotation: Domain name=Helicase_C; Domain location=200-276; Score=101.8; E_value=2.1e-27; Accession=PF00271.21; Description =Helicase conserved C-terminal domain
  Pfam module annotation: Pfam domain module=DEAD::HRDC::Helicase_C; Domain location=1-144::471-550::200-276
  Subcellular localization annotation: CTP_CleavageSite=59; ConfidenceScore=5.21e-01
MATGSGKSICYQIPPLVTKKTAVVVSPLLSLMQDQVMSLKQKGVKSEYLGSTQTNSSVSNEAEKGTFDVLYMTPEKAISLPSRFWSNLQASGICLLAVDEAHCISEWGHDFRTEYKQLHSLRNLLVGVPFVALTATATESPHVVVGSFDRHNLFYGVKTCNRSMSFISELVKDVSKRSDVGESTIIYCTTIRDTEQVHEALVTSGIKTGIYHGQMGSRAREESHRSFIRDEVLVMVATIAFGMGIDKPDVRCVIHYGCPKSLESYYQESGRCGRDGLPSICWLYYQRSDITKADFYCSEAKNETQRKAIMDSFMAAQKYCLLATCRRRFLLQYFGEEWNIDCGNCDNCTAVKNERDLSKEVFLLLSCIKSCGGRWGLNLPIDVLRGSRAKKIVDNNYDKLQMHGRGKDYSSNWWKALGGLLIAHGTNVDLSIHSIILLTAEMIELEEHGSSHHKEGGLNLVPTLESEKFSEDESKLYQRLLNVRMKIAQDIGTAPYAVCGDQTIRNFAKMRPSTGARLANIDGVNQHFISRFSNIFIQNIAELSKELNLPLDNSPFPPPPPTNPAAENIAGIPKPVQNNLPGILGDAKLTAWELWHKQEYSFLKIAYFRRAVPIKEQTVIAYILDAAREGCEMDWSRFCREVGLTPDIATAIRLAISKVGSREKMKPIKEELPENVTYDMIKTFLTIEGCGLSEQVFGNGTADGVSSRIAESPISSCHASEAGGNGVPAAAEASDANPSAKRGQTVCAEEPATKLQRTYEHGAELTGTATATVDSVLDLVASCNGVSLEDVAKHFKGSKRESVLEILEGLESEFTIYKKNGNYMVL

SEQ ID NO: 60652 - protein, 612 aa, Zea mays
  Coding DNA Sequence Number=SeqID_18873
MAAVKASEARGDPPLLQVVELSRIVAVEGAGTLSSADLARILVSNLCFAHNSPSLWKLLGQAVVSRLLCPLHVLALLTPRVLPQRRAQPEAYRLYLELLKCHVTSSLLSMEAGPNRDKIGKSIAEALQLSKVYGFSGTEFGHVVIMFVLAVVSKLIDSIFEDCGFPSAMVEGQESVNAIDGPQPMDLDVKMGSTENQNEHREQLRRKNTLIALDVLHMMTADRKIQSFLRLIFLNMPERFSSLRQRLSSIEAQKVSLETLLPSGHKINELLINFWRVCKTDYQPNNKHILGVLGNMGSGGSLLGQLTGAGRPACWIIFDIYVENAIDGRHLSVISAIRIIKEMTKTMQVLNEASWQETFKALWISALRLVQRAREPLEGPIPHLDARLCMLLALIPLSVAAILQEESDMLGAEGNKILPQRQGLISSLQDLIQYSGLLVPPSSVVNAANAAASKAAIFKANYEAGVGNSSMMDQTDSSMKAAGNMLHLIIEACISRKLIDTSAYLWPGYVVPSGTLKDTALPQESPWLNFMKGSRLSGPLIDALVASPASRVREMTFHSWDTTHPQIHSVPISTHAYLAGSGATVAAVVCAAVAGQWRWSDCGCGHGVDWIG

SEQ ID NO: 60653 - protein, 116 aa, Zea mays
  Coding DNA Sequence Number=SeqID_18874
MALARLTGWDLAHDWSGLPLHKPHEQCLLNNPCTFNAMSRGIVVLEIWPVIGNLTARLLTSLSACVATSKIDQRMVDTVTTRMEKTDAFSGGSHRVCGEGRHRRHNRMEEDVILGV

SEQ ID NO: 60654 - protein, 130 aa, Zea mays
  Coding DNA Sequence Number=SeqID_18875
MQAKVRQMILEEEQKARELEQQIAEMQGKDLCHQQSAIALNQNLHRPHSLHLPKYNDNADPTQYIMSYQVAILIDFLGEELSDAPPRGLAQQEPRWSPCLAGPGGRGLARQGYGRLPRLTDLLDRETLVG

SEQ ID NO: 60655 - protein, 389 aa, Zea mays
  Coding DNA Sequence Number=SeqID_18876
  Gene Ontology: Mol. function=metal ion binding; Biological process =metal ion transport
  Homolog annotation: Hit_ID=Q7XHW0; Match level="QueryCoverage=23%, HitCoverage=14%, E-value=7e-39, Identity=82%"; Hit description =Putative glycosyl transferase protein A
IFKYLNKVVVLDDDVVVQRDLSFLWNIDMGDKFEVKDELSLRAAAFPLSLLSFQHLIYPLDEKLTLAGLGYDYGIDEEVARRSASLHYNGNMKPWLELGIPEYKKYWKRFLVRGDRFMDECNCEKCYKKIQKVLCKLQSKEKINKIDYENTKNKVTVVGAFDPKKLSKTLRCKACDVIRDITIVKPPEVKKPAAEEKKKPEEEEKKKKPEEEEKKKPAEEKNKGGEEKAAKPAAAAPPSTTVNLQFTNICGICYPWPCSDPAHRGGFHHPQQLPQPWLPCGGMAPAPAPAPAPPVHTHPQPPCGGAPQKWAPCGGPPLCGGCAWCLGGGIGCWSPPPQQPMCCPGPSLCRGCNGCKIVRETKFSYEEYPSSACAIIELHPALLLLVLEG

SEQ ID NO: 60656 - protein, 247 aa, Zea mays
  Coding DNA Sequence Number=SeqID_18877
  Gene Ontology: Mol. function=ribosome binding; Cellular component =ribosome; Biological process=rRNA processing
  Homolog annotation: Hit_ID=Q94C43; Match level="QueryCoverage=35%, HitCoverage=20%, E-value=6e-20, Identity=55%"; Hit description =Thiosulfate transferase
  Pfam annotation: Domain name=PRC; Domain location=104-195; Score =17.3; E_value=0.0054; Accession=PF05239.7; Description=PRC-barrel domain
MAQDDPVVSAQWMHEHLVMPDVKVLDASWYMPVENRESWKEYQVFSISYLIFLFEIIVGAKVFWYPQVAHIPGALFFDLDGIVDRTTDARQIVGSAVLVKARDRPEIEDDEFYSLDLYCQGKLVGTVGQGFNFGGGDLLQVIMGSSEGTTVDPDSENQDSISSREHVWTPFAEDIVPDVDMGSREMRITPPKGLLELNSRSDKRSKKERHAMVRSASSFSSIHARIYSHDLHLKRNKECVRSIVLKC

SEQ ID NO: 60657 - protein, 320 aa, Zea mays
  Coding DNA Sequence Number=SeqID_18878
MSENRLWLEHLIGPTILAKGHSHRCPPCNKSGRGRHTLSVCRFRQVVTRVDECWKDPPIGIRAMLSKMSKTKPKNDTSEDGVVIQLCARPKLPAATTSQRAPCLHPAPAPPPHRAQARAPPPARPALATAAARNRPRTSLRHTRASRRLAGPPRPTPPAPRLRLLTPHRAPSSPPAPLSVDGRVATAVALSLAVHVRRWKGRYSPCPRLRNPWTPPAPETCPPREPLAHLATRPTPVSFSSSSRRSYYSPPWRAGKSSVGSLCYVGDESARALSVGEELMAKRPCRWVYRIDGLPYLCVGKTGRQKLLKQKGCVVCITGL

SEQ ID NO: 60658 - protein, 141 aa, Zea mays
  Coding DNA Sequence Number=SeqID_18879
  Subcellular localization annotation: CTP_CleavageSite=15; ConfidenceScore=5.33e-01
MTHILQHTGVQIPPVQSAPPPALQTAIVQAIQAGPPLPSVGPSSSLLRPVTLVFSSLVISSISTQSPVPPAPAVTIAVVAVSVTSSAPAAPAAQPPSESVPAPASTTDPGSETDSDPQLAFALLPRPRPDAPPPPPSSSGL

SEQ ID NO: 60659 - protein, 82 aa, Zea mays
  Coding DNA Sequence Number=SeqID_18880
MVGTSAVTARRQPGSVEHLYAKAVRPGRERGIDGDGCHVWGRSTLTCRTIQEMVDGVTWPTTLPPGWTVEWDVAPAGEEHEE

SEQ ID NO: 60660 - protein, 325 aa, Zea mays
  Coding DNA Sequence Number=SeqID_18881
  Gene Ontology: Mol. function=nucleic acid binding; Cellular component= intracellular; Biological process=chromatin modification
  Homolog annotation: Hit_ID=Q6K9W9; Match level="QueryCoverage=88%, HitCoverage=92%, E-value=3e-30, Identity=56%"; Hit description =Putative finger protein EPF1
  Pfam annotation: Domain name=zf-C2H2; Domain location=131-153; Score =19.8; E_value=0.0097; Accession=PF00096.16; Description=Zinc finger, C2H2 type
  Pfam annotation: Domain name=zf-C2H2; Domain location=231-248; Score =1.0; E_value=8.3; Accession=PF00096.16; Description=Zinc finger, C2H2 type
  Pfam module annotation: Pfam domain module=zf-C2H2::zf-C2H2; Domain location=131-153::231-248
  Subcellular localization annotation: CTP_CleavageSite=74; ConfidenceScore=5.40e-01
MQTSSEVVTTKKRIATTTLLMTPTPTSSSTDDHSSTAVIKRKQRTKRPRPSAPASSSESTTTEEEEDMAHCLILLAAGAAHASDPSPALLPSSTAPHQSQAPPPRAERYTSRKYTEAAATPDGVRAGFYVYECKTCNKCFPTFQALGGHRASHKKPRLAAVNVDGTTTTTTATTMTASPSPPPPLAIAVQPPPPPRQTTPIEFPDVAVATALSLSSSSSVAAAASGKPRAHECSICGAERWAGHMRRHRPLNAPDRAVTVATGNSNSKKEGINLELDLNLPAPSDEEAVVSLLPPPAVMLGLGQFNDGSKAGHMLTASALVDCHY

SEQ ID NO: 60661 - protein, 166 aa, Zea mays
  Coding DNA Sequence Number=SeqID_18882
  Homolog annotation: Hit_ID=Q3SC78; Match level="QueryCoverage=46%, HitCoverage=29%, E-value=5e-20, Identity=52%"; Hit description=ACI14
MPATRPPLPARLQHPAARAPPPPLAVICVGDVHGYITKLESLWSNLQAALPVNALATALVIFLGDYNDFGPHTRRRHVFLYGNHDLAFAVFVGALPPPDGSPFFGHLRSAISLSSLSRCSLPRRPVPHPTAEGFGDPAPLNRARSACHRGLWHVLTTLTPHLFSLS

SEQ ID NO: 60662 - protein, 443 aa, Zea mays
  Coding DNA Sequence Number=SeqID_18883
  Homolog annotation: Hit_ID=Q6K9W5; Match level="QueryCoverage=85%, HitCoverage=94%, E-value=1e-108, Identity=59%"; Hit description =Putative AT-hook protein 1
  Pfam annotation: Domain name=AT_hook; Domain location=165-177; Score =17.5; E_value=0.022; Accession=PF02178.9; Description=AT hook motif
  Pfam annotation: Domain name=AT_hook; Domain location=226-238; Score =12.6; E_value=0.15; Accession=PF02178.9; Description=AT hook motif
  Pfam annotation: Domain name=DUF296; Domain location=256-377; Score =164.4; E_value=3e-46; Accession=PF03479.5; Description=Domain of unknown function (DUF296)
  Pfam module annotation: Pfam domain module=AT_hook::AT_hook::DUF296; Domain location=165-177::226-238::256-377
VCSRLLLPLAAVVPVGGDSKGGNMSKKNNLAKRKKQYEFDLQREKEAKEKQAKKLQAKKSKMKHRGIGAPGVPGHSAVLHDPPPAGYRQHLDAVSAGYAFQTPQVGGSHIGQGYHHVEASPHVAQYSSGGGTSSGGDMDIGMGSAVCTNVKGELGSGPAQDEQVKKKRGRPRKYKPDGAVTLGLSPSSSLTPHSASLGMGTMISAPGSGFGSEGSGASGLGAPSEKRGRGRPPGSGKMQQLASLGKWFLGSVGTGFTPHVIIIQPGEDVAARIMAFSQQGPRAVCIISATGAVSAATLHQDSESGSVVTYEGRFEILCLSGSYLVVDEGGGARTRSGGLCIALCGPDNRVIGGSVGGVLMAAGAVQVIVGSFMYGGGSKKNKVKAELDAEPEEANAGDQEVALAEHSSMAPHPAMSGGGGWASGMMRQMESRTPNIDINSIRE

SEQ ID NO: 60663 - protein, 317 aa, Zea mays
  Coding DNA Sequence Number=SeqID_18884
  Homolog annotation: Hit_ID=Q6QP51; Match level="QueryCoverage=15%, HitCoverage=22%, E-value=2e-12, Identity=71%"; Hit description =Putative growth-regulating factor 1
MQAACNRTKGAHPSDFDASSMEAQAHTSWTGKGDTPKGILLHEGNGPRAPLLLRGSKAGPSEGFNSRLRALVLHAHYWSEVRRPAPRKGSTAASGHSGSAPTTDQGTARVAPTAVPLDRVRLTAAKSGLGRHRKLRLARPRARTRARPRKTMNSASPDPGLGLGLGPGRRRTPPRPTQGSDSGSAPEDDELRLARPRAWTRARPRKTTNSDSPDPGLGLGLGLSRRSPSRPTQGLGLNLDLGRQTRPRPWRSLRLALPRARTDHVTGGAIITLPLASSGYGEQDRRPIWLAPVKQIMMTPRALRDDGGSQPPYGSKE

SEQ ID NO: 60664 - protein, 124 aa, Zea mays
  Coding DNA Sequence Number=SeqID_18885
MDRLLLSHPPLPAAGTDGDLLELDVLWLAAPSTVGLGILVKGKCALGPFLRILEQKKEEKKRGEKDLAVCSQDSARSGAPDCPVCTEQCPVRQVDSERTGRSREFADGVRLKFTGLSGVHRTVR

SEQ ID NO: 60665 - protein, 91 aa, Zea mays
  Coding DNA Sequence Number=SeqID_18886
MDCGRGGGPEHVELEEVAVGARRGEGWAGEREAIHRIRSCSGDHRHGGSSACEVEAGWACANKGHATPARLGEVATLQIMPSTFFFFDEGK

SEQ ID NO: 60666 - protein, 141 aa, Zea mays
  Coding DNA Sequence Number=SeqID_18887
MDHLLLSRPHLPMAGADGDLLELDPASTSHIRAPPHRWRSAMLVIPGAGADAIDRLLLSRPPLLAAGADGDLLELEPASISHVKAPPHLRRSAVPVIPRAGADAMDRLLLSRPPLPTVGTDSDLLELDVLWPAARSVVHSP

SEQ ID NO: 60667 - protein, 108 aa, Zea mays
  Coding DNA Sequence Number=SeqID_18888
MGRCGRESRRWSIASAPAPGITGTADLLRCGGAPACELEVGWACMNEGHAAPARLGEAGCGGWEVFIAPNHLVAVGQGCRRWAHRTVWCAIGQLHQTVRCHTGQSTAL

SEQ ID NO: 60668 - protein, 313 aa, Zea mays
  Coding DNA Sequence Number=SeqID_18889
  Gene Ontology: Mol. function=DNA binding; Cellular component =chromatin; Biological process=DNA integration
  Homolog annotation: Hit_ID=Q7XYU4; Match level="QueryCoverage=52%, HitCoverage=48%, E-value=7e-70, Identity=74%"; Hit description =Integrase
  Pfam annotation: Domain name=rve; Domain location=182-308; Score=5.1; E_value=0.0023; Accession=PF00665.16; Description=Integrase core domain
MVVVMIEEHRHYLSNVISALVEEELVRKGCEPFLACVSVSNSGDSIATDIRIVKDILNIFPEELPSLPLNREVEFGIELLPDRFVVVFIDDILVSSRIEDEHDEHLRVIIQTLREKQLYAKFTILREAHGSPYAMHPGENKMFQDLRELYWWPGLKSEVTDFVGRCLTYQQVKAEHLQSVKIPLWKWERVTMNFANRLPLAPTKKDSIWVIKYQLTKFAHFILVRTDYSLQKLAKLYISEIVRLHGVPISITSDRDPRFMSRFWRKLHEALGSRLDFSIAFHPQTNGQFKRVIQILENMLRHYRSDLTHIVPV

SEQ ID NO: 60669 - protein, 74 aa, Zea mays
  Coding DNA Sequence Number=SeqID_18890
MATRMSTRCIHGWGTRGQGKGRRGAQAKSSSTGSLPNLDTSEKPVSPATETEPHDRMVGDDYAKDFGEGRWAQY

SEQ ID NO: 60670 - protein, 130 aa, Zea mays
  Coding DNA Sequence Number=SeqID_18891
  Subcellular localization annotation: CTP_CleavageSite=43; ConfidenceScore=5.03e-01
MRGSSGELLWSLGARILQAGGWRKASGTATSTMRLLKAEKAVWVSSAKGTLSAPNTPTRDYGPLSAKWNQDRAAPDEHSRPGNLGARYLSPWVQTPLGFPALAAKGALKLCGTPRNRWSARGSCRTPSRR

SEQ ID NO: 60671 - protein, 1008 aa, Zea mays
  Coding DNA Sequence Number=SeqID_18892
  Gene Ontology: Mol. function=DNA-directed DNA polymerase activity; Cellular component=DNA polymerase III complex; Biological process =DNA replication
  Homolog annotation: Hit_ID=Q75K66; Match level="QueryCoverage=97%, HitCoverage=91%, E-value=0.0, Identity=59%"; Hit description =Putative DNA polymerase III gamma chain
  Pfam annotation: Domain name=AAA; Domain location=372-561; Score= -9.4; E_value=0.0011; Accession=PF00004.19; Description=ATPase family associated with various cellular activities (AAA)
  Pfam annotation: Domain name=DNA_pol3_delta; Domain location=416-681; Score=-56.8; E_value=0.0017; Accession=PF06144.3; Description=DNA polymerase III, delta subunit
  Pfam module annotation: Pfam domain module=AAA::DNA_pol3_delta; Domain location=372-561::416-681
  Subcellular localization annotation: CTP_CleavageSite=84; ConfidenceScore=5.61e-01
MAAPDPCRCRCRGPTSAATRTSPTASTSATTTGHAHGGAGAGGASSSGWRRSPASVASATLMRDLLALQRSRSLRDPSTRRSVESSRVAADPDAGSGDDVDLPAKSRRSAGALKALLDQLAENPHPHPKPGRRPPRRFKRRAGRRATAVSKPPDRAAALSVNSSSQEAVCGNKYLFHGGGDDDDGAEELQQHLPQDLRNVCGIPWNWSRLHHRGKSIIDMAGRSLSCGLSDSRSAAGRKSEAGAASGGHVNASRPLFPAKSERLASSTSSDSDALPLLVGAATSGARNHIGAISGSYSGELGIFSNQTSQMDSDLLSESQSGQKSQASQHGRGRHRSLTQKFAPKTFKDVVGQSLVVQALSNAILRRKIGLVYVFYGPHGTGKTSCARVFAKALNCLSSEHPRPCDSCTVCIAHNLGKSRSLMEIGPVGNIDIDGIVDVLDNVMLSPAPSHYRVFIFDDCDTLPADTWSAISKVVDRAPRRVVFILVSPNLELPHIILSRCQKFFFPKHRESDIVNTLQWICTSESLDVDKDALKLIASRSDGSLRDAEMTLDQLSLLGQRISLTLVQELVGLVSDDKLVDLLDLALSADTVKTVKTLRDITETGVEPLALMSQLATIITDILAGSYAFNRERPKRKFFKRPTLSKEDMGKLRQALKILSETEKQLRVSSDKTTWLTAALLQLAPDKQYLLPSSSTSTSLNHGLLVGSFPDRGIGRSSAVEHKCNLAGTSYGEGTVEHTENGHVLSTSSVKGNEGTKNRKADNEMIWQAVLESIQSDTLRKMMAKEARLNSVSLGTAPTVQLIFSSRINKFKAENYRAQILQAFESVLHSAIILEIRYESKNDTKAGHVPSMFPYPENDSSNVTLRSFTKHSPLSSRGENLITRLKKDSAVKGANSSKTTWMQSDPHILTEGEIIEVGPSHMHWHAQTNSGVLDINGRKKENVWEEEASSSPNQESVTNQKGRNGNRQRQQNSIVKGKVSLAHVIGRAEACSQQGGWSRRKAISIVKS

SEQ ID NO: 60672 - protein, 134 aa, Zea mays
  Coding DNA Sequence Number=SeqID_18893
  Gene Ontology: Mol. function=oxidoreductase activity; Cellular component=mitochondrial outer membrane translocase complex; Biological process=aromatic compound metabolic process
  Homolog annotation: Hit_ID=Q65XC6; Match level="QueryCoverage=92%, HitCoverage=35%, E-value=9e-52, Identity=74%"; Hit description =Putative dimethylaniline monooxygenase
MEVHILPREMLGHSTFGLSMWLLKWLPVHVVDRVLLCIARAMLGDTARLGLKRPASGPLQLKSLSGKTPVLDVGTFAKIKSGDIKVRPAVRQVSGRAVEFADGELEEFDAIVLATGYKSNVPFWLKIGKLQFFL

SEQ ID NO: 60673 - protein, 160 aa, Zea mays
  Coding DNA Sequence Number=SeqID_18894
  Homolog annotation: Hit_ID=Q6QP51; Match level="QueryCoverage=84%, HitCoverage=53%, E-value=1e-13, Identity=43%"; Hit description =Putative growth-regulating factor 1
  Subcellular localization annotation: CTP_CleavageSite=30; ConfidenceScore=5.45e-01
MAPLVTWSVRALGRARRRLLRGRGRVRLPRSRLSPSPGSGEAETVFRGRGCVRPLGQARRSPSSSVEVESEPRGRARRSPSSSVELEPEPWGRARRSFLWPPEAGLSRCQPHSVEWHSSRSDAGGAVLLSGRSVERQSDCGHFGSIDRSAVTLQNHTLVN

SEQ ID NO: 60674 - protein, 125 aa, Zea mays
  Coding DNA Sequence Number=SeqID_18895
  Subcellular localization annotation: CTP_CleavageSite=53; ConfidenceScore=5.08e-01
MNVCELTLAVSHPPQVKNRNFVTASCLASSGHTTSPATPTAYLIDGLPCSNLAAGAAKSPANLPGVCGKTGAGEQDYKTHQLPPPTTVCSQEKAQGSTSSLHASPQQDCRRVAGVGPCSPGTSGV

SEQ ID NO: 60675 - protein, 134 aa, Zea mays
  Coding DNA Sequence Number=SeqID_18896
MAKRCSQPKLQQGIYRVDGSRDIGDQPRAAIGSSASPDPRARAQARHWTTDSASPDLWARTQPRRWTTDSASPDPGVGHSLGLGRRSPPRPTQGSDSASTSEDGLDLDLGGASASPDLGLGPTTSQGGPSLPYP

SEQ ID NO: 60676 - protein, 209 aa, Zea mays
  Coding DNA Sequence Number=SeqID_18897
  Gene Ontology: Mol. function=nucleic acid binding; Biological process= DNA integration
  Homolog annotation: Hit_ID=Q7XBC6; Match level="QueryCoverage=97%, HitCoverage=11%, E-value=4e-55, Identity=60%"; Hit description =Putative copia-type pol polyprotein
MSGDHAKKEMETGEKPTTSQGSTSSEKSRTKRREKKKISSNKGKEKKSSSHHKEKKEKSSSHKPHRSGDKQKRMRKVVYYETDTSSTSTSGSDAPSVTSKRQERDKDYDEDEVAQIEHFNSQATTILLASLSREEYNKVQGLKSAKEIWDVLKTAHEGDELTKITKRETIEGELGRFRLRKGKSHTHVQPAQDLGEPSAHLGSVNGMTR

SEQ ID NO: 60677 - protein, 121 aa, Zea mays
  Coding DNA Sequence Number=SeqID_18898
MDTLTDDVPGAVLVQDRLQVAATTDRLQVAVADQAQGGQVSKEMNNLAARRLSFDVWLDEPHVTSVDSSSHSLSTPTKTSYIPPMYSYFKPICADETKPVVGMSFDSTDDVEEFYKAYARV

SEQ ID NO: 60678 - protein, 68 aa, Zea mays
  Coding DNA Sequence Number=SeqID_18899
  Homolog annotation: Hit_ID=Q656M9; Match level="QueryCoverage=89%, HitCoverage=12%, E-value=4e-22, Identity=87%"; Hit description =Chromatin remodeling protein-like
MASSQHVEMEAAKLLHKLIQESKDEPAKLATKLYVICQHMKLSGKEQSLPYQVISRWIFTLLLLEMRK

SEQ ID NO: 60679 - protein, 123 aa, Zea mays
  Coding DNA Sequence Number=SeqID_18900
MGMGMPEPHIPGVPDPVAPVLEPPAPEIPEPESPTPVFIPQPLWMTSVHCSSGLTFKFPCMPRNLLRASGLNEVIVTYIDVRCQRVLRLYCAEWHVTAEVYGPDVFGGQVVIGRHCHRRSSQL

SEQ ID NO: 60680 - protein, 754 aa, Zea mays
  Coding DNA Sequence Number=SeqID_18901
  Homolog annotation: Hit_ID=Q656M9; Match level="QueryCoverage=50%, HitCoverage=78%, E-value=1e-105, Identity=56%"; Hit description =Chromatin remodeling protein-like
METVVNQHGIDMDALRSSRIPFAGGPQAGDSSGVMSKDKEVIGNQSPMVGSDASQSSGQAGLWQLPSGSTDMIRHGASISGRVPTGPNRGDFSAADIHQGSMSQKSGRSSGIESPASLQMEDTRSMNSHDSLKSDEKTSKKTSSKRKRMDSKGAGDLRSEDNSKSDVISTGQNTRKGKQVGKAGRQGQPSMGIEHEQQPHKLQGGTGQVPPIHGGAPFLRTRSEGPSGRTMDKTKPSNPFSMGQIPNFPEGLASTGAPIELQKSIQGGASLFNPGFGWNQNPQVQTLKNSQGSIHNLVRSGVTVEGKSHARKASFTEYINASEHGIRTSFSGTHPRKVHLEIALGRGPPAESDSAGQRGSEGRVSDALGKENGSSRENSGVFCRQTDISRLPATSAGSIAEDDSLSKDPENATKKIKLAEQEKSLMEVENVQQASVMQGTSSEMRSQETASQNPYRPQQSYYQGDTRRIASDIHRTDAEILNQNLSWGGQGSTALGGTRQLLNQETKESLAPSKSHHMPVDGYNSNIQGIDRTPEIAGAGNDVENCSHVADIVPEQAADEGDEDLSEHEDLLSSPKHTMTEKWILDYQKRIYNEKQKRTLEQHKESVNSSEDLSAKTKSVIELKKLQLLPLQRRPNTSDLERIKSLKKHRHGRRVKQLEKIEQKMKEERQKRIRERQKEFFADIEAYREKLEDNFKVKRERLKGFNRYIKEFHKRKERIHREKLDRIQREKINLLKNNDVEGYLRMVKERCTSL

SEQ ID NO: 60681 - protein, 1550 aa, Zea mays
  Coding DNA Sequence Number=SeqID_18902
  Gene Ontology: Mol. function=peptidase activity; Cellular component =cell surface; Biological process=homophilic cell adhesion
  Homolog annotation: Hit_ID=Q5QE81; Match level="QueryCoverage=81%, HitCoverage=81%, E-value=4e-67, Identity=25%"; Hit description=SYD chromatin remodeling ATPase
  Subcellular localization annotation: CTP_CleavageSite=39; ConfidenceScore=5.07e-01
MKIAHVAVADKPVEKQTASRRRRKKTSSSEDTGVSTRQRSAMKRSYYNTSVAVDDIGSAVIPNEKSGITKERDVSSIQSTSNELPNINSPLYEKSGYDSQPSTPIAVPINEDTLPSGFDTCTNSMITLATSANSAEDDKPVDLHLNAPVSVDSQNQEQHMTGKDHLAVCSRIFATQLQTDTANPAIDHKPGTAQFEPSASLPQNSGKDATALPSEVDSAAPNRASSRRRKGSTREPRTRSNSASAASERRARLTGLKQAEDIKKLEMSATPTTTVCISSVEQQGAASLSAKITNASVSEGQKNPGNYMPSAISIPVGSHVLGLGATSIEETTATMITQAPAVSKSERRKLPGGSQQGIQFESSASKTKMVSAVEPAPANVECMQGTEVNSSEQTIVSATEPAPANDEHMQEQPTNIVSSVESEPSNDEEHTKHEVFLATTGDNMLASSAGTEILRDTVEHAACQPEAVCTDGTARQSELSQLDRKAFHDASYKYTHGSTKDDGILPSEGTSVDVTGSKQDDVNIVGTQTDDVSRGSSHFPVILQSTESDRPPGQVKNLESRMEQVKTEEALVNSSGGNQTHSLGDEPSHNTSLARNSPSEHSNERCSDQVIGENFKSKENIVEVHSGINTDGPDEALNALHTQSKEASMTDIGVPTDGDRCEGKGTSVEVCADMNTDGPVATQDASSTKSDKESCMMECGVSTDGCPTVCKTHNDLQGHVSCEETFVRTGGDDTTHITNANYGSNNESEATIASPVETTQKLMEGSTVIVSENSDLNKQCHTLHTRNDPPANTLLIVESNKVTCDAEIVCASRLESSGIEAETVGIQESALTDFEGTKGTGDLGDRTNSQLHDDVHGTSCSTIALVSEKEPSEDLTTGSHSEASNLLAAVEQTQETTVENQEIIDAVVFMDACKAEPVGDFTIAKGAEQTVEMVHYVDKQSAVLDYVETQTKRTSVCGSTLNESPQAAGLEEDCSVLKHGDPTSSELLTVAPNPIGETSVIQVEPEARNSDGYCTTEAGSALSETVMGLEPNKETAVPMQENIGEANDNFNNCEAHNNSEIHAFEVSMETQSSEVKEVSSIQSGAANLSTQTTALPDVTGQTSMASTGELVSTNEHIHMQGTEINSEQQTKMVSPAESAPANDEHVQDIVILSSEQQTKMVLAAEIDALCVQETAIIDLGGARGTVDLNDIRTQVPALPGRDVLGDEIKGSEQAKIESIAEIETVGVKENVIADHKETGIEVDAHVLEQAKMVSALEPDSTPDVESAGNMAGQRWAPMKRTWLVAGERQLGDLDTQKLFLPGRLGNDFKTMNISSGADVDLITSQRKTDSEGTIFTDPPVTTLVTAESDKEPSGADDVGMIVVQEAASVDDHNRAQGGEAHCSEQIKMASIAQAVSSMALVGYSSSEDSMVDAAARVTDADFVDSKAAGVYRQETMPTQTTSTLPENMDSPATAATMVESKFAASSEHVAGPEPIDETSVMQVELATSTGDGCAADGHNLVSSETVVEVKLAQEIVVPSPGGSIEANNTSTISEVYKDTQSRASGEACND

SEQ ID NO: 60682 - protein, 82 aa, Zea mays
  Coding DNA Sequence Number=SeqID_18903
  Subcellular localization annotation: CTP_CleavageSite=42; ConfidenceScore=5.53e-01
MARRGQQPVAGMAWPGAPALQRGGPMACQRGTLGGSAARQPPASRRGSPAQRPGASRPVVESSLETGHRACATACEWGVVGV

SEQ ID NO: 60683 - protein, 123 aa, Zea mays
  Coding DNA Sequence Number=SeqID_18904
MELAAITVCVDELPLRMSRLPPQSTRVILTVVASGWALCGGTLMMHMEFSGVIRGKRCRNSSPCARRRRDSTLLRGQQPPHIQHRSKGPYGILIQSKPRSNPKRPFLIEGSENPNTPSVAPIA

SEQ ID NO: 60684 - protein, 295 aa, Zea mays
  Coding DNA Sequence Number=SeqID_18905
  Subcellular localization annotation: CTP_CleavageSite=79; ConfidenceScore=5.12e-01
MALPRGAVAKRAASIAIADRWAHVSVNQRLALVSTHAHLTRPSNDRWGRCRSGRSRASSAVGLRCQRLRVCSHARPLPRGAVGSATSSPSSRNNLRTEPVGFVANGHPRFMGSGAQRPRRLGRIFNSPPCGLHAPINFTRVVPSPLYGFTGEPIWREDRTCVGRSVVGLHHLRPALGDRPVGESSAQGCSSRLSLGGIVLRISGILRRSGSSAAPPPRTVGRLATSSIAGEAPVFLFSRSSSRCSTLCFSQLMDRAPGGRSAARMPLPRGAPLLSRGCEVGEALLTVHRKPRAKI

SEQ ID NO: 60685 - protein, 151 aa, Zea mays
  Coding DNA Sequence Number=SeqID_18906
  Homolog annotation: Hit_ID=Q6QP51; Match level="QueryCoverage=34%, HitCoverage=30%, E-value=3e-16, Identity=81%"; Hit description =Putative growth-regulating factor 1
MQAACNCTTGMHPFDFDASSMEAQAHTSCNRHAGYYVRKTAPPLTPMSRLLDCGIGAATRGNPVHGPTVPTKHIGHRDRERGYSERDPSPRRKRAPSPPTDQGFEGWPLGRVRQPPQSTRALRPLLIRGSKAGPSEGFDSRLRPLGLRAHY

SEQ ID NO: 60686 - protein, 504 aa, Zea mays
  Coding DNA Sequence Number=SeqID_18907
  Gene Ontology: Mol. function=RNA-directed DNA polymerase activity; Cellular component=mitochondrion; Biological process=RNA-dependent DNA replication
  Homolog annotation: Hit_ID=UPI00004C1731; Match level="QueryCoverage =91%, HitCoverage=30%, E-value=0.0, Identity=81%"; Hit description =UPI00004C1731 related cluster
  Pfam annotation: Domain name=RnaseH; Domain location=1-123; Score= -14.4; E_value=0.0013; Accession=PF00075.14; Description=RNase H
  Pfam annotation: Domain name=rve; Domain location=215-375; Score =104.2; E_value=3.9e-28; Accession=PF00665.16; Description=Integrase core domain
  Pfam module annotation: Pfam domain module=RnaseH::rve; Domain location=1-123::215-375
MFFDGSLMRTGAGAGLLFISPLEKHLRYVLRLHFPASNNVAEYEALVNGLHIAIELGVRRLDARGDSQLVIDQVMKNSHCRDPKMEAYCDEVRRLEDKFYELGLNHVARRYNETTDELAKIASGRTTVPPNVFSRDLHQPSVKTDDTPEPEEASAQPEAPSAPEAPRALVGNAFRQGFYWPTAVADATRIVRTCQGCQFDARQTHLPAQALQTIPITWLFAVWGLDLVGPLQKAPRGGFTHLLVAIDKFSKWIEVRPLNSIRSEQAMAFFTNIIHRFGVPTSIIIDNGTQFTGKKFLNFCEDHHIRVDWAAVAHPMTNGQVERVNGMILQGFKPRIYNDLNKFGKRWMKELPSMVWSLRMTPSRATGFTPFFLVYGAEAILPTDLEYGSPRTRAYDDRSNQTSREDSLDQLEEARDMALLHSTRYQQSLRCYYARGVRSRDLQVGDLVLRLRQDARGRHKLTPPWEGSFIIAKILKPGTYKLANSQGEVYSNPWNIRQLCRFYP

SEQ ID NO: 60687 - protein, 107 aa, Zea mays
  Coding DNA Sequence Number=SeqID_18908
MAVAKRMKLDKMQITKQPIYCLQHVVYQTETTPCLSCLLIFRAARNVTRSSARKAALDKEVDEYKFTYAIMLIDRDDNKDKERIHDSRSRERERKEGDRRLLREMGV

SEQ ID NO: 60688 - protein, 138 aa, Zea mays
  Coding DNA Sequence Number=SeqID_18909
  Subcellular localization annotation: CTP_CleavageSite=80; ConfidenceScore=5.41e-01
MARRGQQPVAGMAWPGAPALQRGGPMACQRGTLGGSAARQPPASRRGSPAQRPIHALAFTAVRQNSVSPRVSSSLHSTVYVALVAVEMSFVYPGLLSVYFVRSLDDVRLPLNDSRLPPVYLVYPPALINFLFNCRLVN

SEQ ID NO: 60689 - protein, 60 aa, Zea mays
  Coding DNA Sequence Number=SeqID_18910
MAVALVGRGRGGEGAEALGEVVGVMGEMGGGFGEGVGAGMGQVGLARWVGRRALGCAGWG

SEQ ID NO: 60690 - protein, 98 aa, Zea mays
  Coding DNA Sequence Number=SeqID_18911
MVTMTMTNTMMLMSAMAMTTMTMIMMWGFGLNKNDIHKKDGDRHKGKSSAQYGKREEKREKQNARAQDKVIARTFCFVDQDIVKFITRFRIDGRAIKT

SEQ ID NO: 60691 - protein, 90 aa, Zea mays
  Coding DNA Sequence Number=SeqID_18912
  Gene Ontology: Mol. function=DNA topoisomerase type I activity; Cellular component=chromosome; Biological process=DNA unwinding during replication
  Homolog annotation: Hit_ID=Q9SKZ9; Match level="QueryCoverage=85%, HitCoverage=9%, E-value=5e-24, Identity=64%"; Hit description =Putative DNA topoisomerase III beta
RGEGKDRSFIASALSGGRMSTRKGSTDVHEFDGTFQGSYANFKVTSVIGHVLSVDFPPAYQNWEGTDPMDLFEAPVLRSECNPKLTLGGI

SEQ ID NO: 60692 - protein, 330 aa, Zea mays
  Coding DNA Sequence Number=SeqID_18913
  Gene Ontology: Mol. function=inositol or phosphatidylinositol phosphatase activity; Cellular component=intracellular; Biological process=vascular tissue development (sensu Tracheophyta)
  Homolog annotation: Hit_ID=Q6ZK18; Match level="QueryCoverage=98%, HitCoverage=28%, E-value=1e-113, Identity=61%"; Hit description =Putative inositol 1,4,5-trisphosphate 5-phosphatase
MKAGKVFQGMREAVINFPPTYKFQKHQPGLGGYDSGEKKRIPAWCDRVLYRDSRSVSVAECSLECPVVASITSYVACMDVTESDHKPVRCTFSVDIARVDELIRRQEYGEIIESNEKVRSLLQDGCFVPDTTVSISEITLEKQEDIVFQIANKCETSRAAFEILCDGQSTKEDGTKSELLPRASFGFPLWLEVQPAVGLIKPGETVEITLHHEDFYTQEEFVDGIPQNWWCEDTRDKEAVLRINITGNSSTKTKTHTINVQHRCPPPSAPPPAMNQQPVAAAPPSNVLASEGHSSKRSSKKSQSKHREQQQDYPQFGTSEVHDLCRMRCP

SEQ ID NO: 60693 - protein, 563 aa, Zea mays
  Coding DNA Sequence Number=SeqID_18914
  Gene Ontology: Mol. function=DNA topoisomerase type I activity; Cellular component=chromosome; Biological process=DNA unwinding during replication
  Homolog annotation: Hit_ID=Q56YZ6; Match level="QueryCoverage=78%, HitCoverage=57%, E-value=0.0, Identity=60%"; Hit description =Putative DNA topoisomerase III beta
  Pfam annotation: Domain name=Topoisom_bac; Domain location=3-288; Score=-60.1; E_value=7.9e-08; Accession=PF01131.11; Description=DNA topoisomerase
  Subcellular localization annotation: CTP_CleavageSite=67; ConfidenceScore=5.19e-01
MAPRLSFWVELVSASTLTLWRPKAKVSPCFTPLSLKDKKGVIRLTSPYRLNNYGRSIGLRPGPRYPRTESTAYPSSFDFRGALAALLNNPLWSNDVRKLLDAGFVKPRQGHDAGDHPPITPMRSATEASLGTDAWRLYQYICQHFIGTVSPDCRYTRTAIEFTSGGETFHCVGYRVTSKGFTSIMPWLAVSENSLPAFKKGDSVSIHKADIYEGSTTPPDYLTESELISLMEKNGIGTDASIPVHINNICERNYVQLNASKALIFLEGEFWKKIENMDALFEAQFSPLADSGRLLSKCGKCGRYMKYISTQPMRLYCITCEDVYYLPQNGSIKLYKEIVCPLDGFELLLFSMVGPDAKSFPLCPFCYNCPPFEGIDKLFGALKLDDTGKVGKGAGMPCFLCPHPTCKQSMITQGVCACPECSGTLILDPVSAPKWRLYCNMCNCIVLLPHAAHRITTTDKKCLTCESTIIEVDFNKKTTPLQDGATLHEGCILCDDLLHSLIEMKHGSEGTAIMTTTCVSFEFGLGRTRQVMMKHEHVCFFVTAAKTAPALEHRNFTGISSKT

SEQ ID NO: 60694 - protein, 158 aa, Zea mays
  Coding DNA Sequence Number=SeqID_18915
  Subcellular localization annotation: CTP_CleavageSite=30; ConfidenceScore=5.44e-01
MARNRRAPTAPPPAFHPWRSLRARPRSLLSAAPTPVLLSRAPTLCCPLSRILHGVVGQWLHGDGLGQPRGGRDAARRWLLAADLRLEELTPATTTAAPSPRLRHTTSSIPSFSRKSPPPPQSPFASRPRRGRPSNPPFPLFPTILAPNLASTESDQPG

SEQ ID NO: 60695 - protein, 91 aa, Zea mays
  Coding DNA Sequence Number=SeqID_18916
  Subcellular localization annotation: CTP_CleavageSite=38; ConfidenceScore=5.61e-01
MAGRTAPASLPSFSLTPDSLAAPLSWISSWTLPRPTVRRSRRRTLRHGTEPVPTRHRPPPPRAPPRRDERARPRAHHHHHASTPLVHLLAR

SEQ ID NO: 60696 - protein, 184 aa, Zea mays
  Coding DNA Sequence Number=SeqID_18917
  Subcellular localization annotation: CTP_CleavageSite=58; ConfidenceScore=5.74e-01
MAKATPAAALAASLKMVAPAIPSLPPRPRLLLATLQRRPSAHISSTPVVARVAALDLRSSAGNAASAMVDTLLVAAATPLVPPTHPWTMGHNYYNPWTDAIYVAGATSSLFLFFTSSCWADLAVTRSHRRNARTVGCPAAAYGPPPGYVGPVSSPPGWDQHTLATNFQTMTLQRPQDWYFGTGA

SEQ ID NO: 60697 - protein, 453 aa, Zea mays
  Coding DNA Sequence Number=SeqID_18918
  Gene Ontology: Mol. function=kinase activity
  Homolog annotation: Hit_ID=Q94CG5; Match level="QueryCoverage=95%, HitCoverage=46%, E-value=3e-53, Identity=32%"; Hit description =Kinase interacting protein 1
MADESKAISSVPKSVEKADEPKAVSSVPKSVEEVNEPKAVSSVPKSAEEANKPRAVSSVPKSAEEGSVSRESSKVSDDYEELKAMAKVVGQASSLIANTVPKSDSKEHEYAELSRCLEETKKKLLELEANHQNELFELTLQLKELKNSNSKKDEEIRSLRLKVSRNQSGIAKTNNADQSEEFECIPASATTSAIPAEEKEVKEVKEVKQEKEKKEVALGQLLDSEKSAVEERFRTNIDELLEENLDFWFRFSSTLYEVQKYQTGVKDLESEVLKLEERSENQEGSSTSKYSVKSDVRPLYKHLREIQTELSLWVEKSMSLKEELKNRFTSLCEIQEEITKALKASAEDEEFRFTSFQAAKFQGEILNMKQENNRVGDELQAGLDLAAALQRDAEKALTKLSEDWGVQGSKSRHSSGQQDPRSNVPLRVLYLWCQTKETKDFHLFRGSGPTEVP

SEQ ID NO: 60698 - protein, 386 aa, Zea mays
  Coding DNA Sequence Number=SeqID_18919
  Gene Ontology: Mol. function=transcription factor activity; Cellular component=nucleus; Biological process=regulation of transcription, DNA-dependent
  Homolog annotation: Hit_ID=Q52QU2; Match level="QueryCoverage=99%, HitCoverage=88%, E-value=1e-106, Identity=49%"; Hit description =AP2/EREBP transcription factor
  Pfam annotation: Domain name=AP2; Domain location=122-174; Score =42.1; E_value=1.8e-09; Accession=PF00847.10; Description=AP2 domain
  Pfam annotation: Domain name=AP2; Domain location=203-268; Score =118.7; E_value=1.7e-32; Accession=PF00847.10; Description=AP2 domain
  Pfam module annotation: Pfam domain module=AP2::AP2; Domain location =122-174::203-268
MADESPIFTSFHYQAPKLEDFLGDSSSMVRYSDSQAETQEDSSLTQIYDPSVSTYFDHHQDLNQITGFQTFSTNSGSEVDESSSRGRTQLTGVELPGHSIESSGNNTTNNNKAIVSVDSDNKKIADTFGQRTSIYRVYLGGYDKEEKAARAYDLAALKYWGPTATTNFPISDYSKELEEMKHATKQEFIASLRRKSSGFSRGASVYRGVTRHHQQGRWQARIGRVAGNKDLYLGTFATEEEAAEAYDIAAIKFRGVNAVTNFEMSRYDVKAIAQSSLPIGGAAKRLKLSLESEPKPIVNQKQQPPPPRCSSNSNIISFAPMKQPVSAIPCGIPFDAAAATAAFYQQNIYQHLQTANTSVSEPPGSSSTTVMSQSAAEFFLWPHRSY

SEQ ID NO: 60699 - protein, 696 aa, Zea mays
  Coding DNA Sequence Number=SeqID_18920
  Gene Ontology: Mol. function=oxidoreductase activity; Biological process=metabolic process
  Homolog annotation: Hit_ID=Q0WM29; Match level="QueryCoverage=39%, HitCoverage=44%, E-value=1e-117, Identity=73%"; Hit description =Methylmalonate-semialdehyde dehydrogenase [acylating], mitochondrial precursor
  Pfam annotation: Domain name=Aldedh; Domain location=4-385; Score =60.7; E_value=2.7e-18; Accession=PF00171.12; Description=Aldehyde dehydrogenase family
GFSFLPLGMDAQSQAAFSGQKKMLPPPPGIFQDREELIEHVRDFGASQGYVVTIKKSRKDRRVILGCDRGGIYRNRRKIDEKIVEHACGVATLQMGEFVPNASNGIDTFCIREPLGVCAGICPSNFPAMIPLWMFPIAVTCGNTFVLKPCEKNPGASTILAALVKEAGLPDGVLNIVHGTDDIVNYICDDEDIKAISVVGSNTAGIHIYARAAAGGKRIQSTIGGKNHAIIMSDASIDATLNALVAEGFGAAGQGCMGLSTAVFVGGSMPWDEELKLRAKALKVNVGSDPGADVGPVISKEVKDKINRLVQCSVDAGARLLLDGRNIVVPGYENGNFIGPTIICDVASNMECYKIRMVAQQWRDLPSVGVSSGLHLSSETDMTSRGVSSGLHPSSERDSLYHRVSPAVSQESEGNSPNHTMLLSTSERDLSNPTITSPPPTADGELPNHGASLVLPPTSEMDMENQDMSRTMSQGRKRDISSQGVSSITPYQSERVYTQQSQWKESSAPSERIYIPITSHRNNNAAPTVQRSDTAIGLTQERAYMPTSHKNDGLVPVSNRNRSISPASDQIYMMATTHLNDTMGQRIQRTDAPIFPTSERIYVPATPHRSDHMGSTSQRNDVALRPGSESLYMPATSRRNDNIASASHQADSMPQNSESMYMAPIVQRMYAQNTIISMDDYPNQGPTMTLPTSHRI

SEQ ID NO: 60700 - protein, 324 aa, Zea mays
  Coding DNA Sequence Number=SeqID_18921
  Gene Ontology: Mol. function=DNA binding; Cellular component =intracellular; Biological process=DNA integration
  Homolog annotation: Hit_ID=Q0ZCB6; Match level="QueryCoverage=55%, HitCoverage=35%, E-value=1e-33, Identity=40%"; Hit description =Integrase
MASLYELSQIECSHKDDHFPLSSLTKFYGNDFDLYANNLDKLLKRCEDTHLVLNWEECQFMATEGIVLGHRITSQGIQVDKAKVEIIEKLPPLTNVKEFDIKIKDRNGLENQVTDHLSRLEADSEDGNIFQTVDAFLEDKLFAVDATHWYANLVNYLVCGKLPLSIKGYKKERFLRDVVKYHWNEPYLFKVCNENIIQQCVPEEEMLSILKHYHDAPYRGHFGVVVDYVSKWVEAVAVPKDDAEIVFKIFEKHILTHFDTPRALSSDQVWAVKQVNIEYEAVRKKRLLDITELEEIRRNAYKNAYENAAIYKEKTKRWHDKIIF

SEQ ID NO: 60701 - protein, 82 aa, Zea mays
  Coding DNA Sequence Number=SeqID_18922
MVKRHACVSGVWAFKIGTHDRVPARVRARGHKAVSPDSVSHTVETHARVDEHRLFYKPFFHPIWHVPTLNVAHLQAISRHPN

SEQ ID NO: 60702 - protein, 190 aa, Zea mays
  Coding DNA Sequence Number=SeqID_18923
MTATPVDDRGPSSPIEDGALPADDEDEDLPSVLHPSDEGAELKGGSVYVPKKLMLHPGISVLGVGEAWEMGSLGPLGLRLVPDVGDVSLGRALAGLVSPHCLSSATEAAEDDGQCNVSAHGTLDPSITIHESSTLKVYSRRRQRDPLRQVPSAHEDTLVESRHDKDTTPVSDFVTMVTKKMDDLLPRRHP

SEQ ID NO: 60703 - protein, 225 aa, Zea mays
  Coding DNA Sequence Number=SeqID_18924
  Subcellular localization annotation: CTP_CleavageSite=68; ConfidenceScore=5.35e-01
MDGSEPPVPPLPGAHTHRHSPSLDFALNPANTSTNHTLLAPGRTVHTISVSQAGRSKFQRWSNASPISSSSGGSWVAPCSYKEAALSSGGSPASTPPLGATVLPRSCGAPLPGAGFGYHALGCPLQVAQRAVRPHPENQVGRVPVWQRLGKMQDPGLHGGVSQGFKRKESIWRPIAPSQPTTGGELLSPPFMAQGPGESIPLVIGGERKRRWEKRRWAAVGDVHD

SEQ ID NO: 60704 - protein, 165 aa, Zea mays
  Coding DNA Sequence Number=SeqID_18925
  Gene Ontology: Mol. function=binding
  Homolog annotation: Hit_ID=Q5QMW8; Match level="QueryCoverage=76%, HitCoverage=10%, E-value=2e-44, Identity=70%"; Hit description=HEAT repeat-containing protein-like
MEVATGGAGGASRHVEVQTGMGKGPVAPGRLLLIKTIIRKAAFNHLPAMGIRDLLLPSIQNLLKDLDALDPAHKEALEIISRERSGGTLESISKVMGAHLGIASSVSSFFGENSLLTKKEGGEEHDPAGPTAPEQNLQAQPESTRFGRIMRSGFGDILRGQSKGQ

SEQ ID NO: 60705 - protein, 231 aa, Zea mays
  Coding DNA Sequence Number=SeqID_18926
  Gene Ontology: Mol. function=kinase activity; Cellular component =spliceosome; Biological process=mRNA processing
  Homolog annotation: Hit_ID=UPI0000DA43ED; Match level="QueryCoverage =68%, HitCoverage=96%, E-value=5e-12, Identity=28%"; Hit description =PREDICTED: similar to keratinocytes proline-rich protein
MPPPVDVVGPRPSLGEVEAPPRSRSSLSSEVEVESEPPGRRRRPSADDRAKSEPWGRAKRSSSSFGAEPESEPWGRAKRSSSSSGAEPKSEPWGRAKRSSSSSGAEPESEPWGRAERSSSSSGAEPESEPWGRAKRSSLSSGAEPESEPWGRAERSSSSSGAEPESEPYGRAKRSFLWRLRPDLAAVSLTLSSGTAVGAAQAALSPCQTGQWSGEVTAVTSALSTGERASG

SEQ ID NO: 60706 - protein, 438 aa, Zea mays
  Coding DNA Sequence Number=SeqID_18927
  Gene Ontology: Mol. function=binding
  Homolog annotation: Hit_ID=Q5QMW8; Match level="QueryCoverage=99%, HitCoverage=49%, E-value=1e-157, Identity=56%"; Hit description=HEAT repeat-containing protein-like
MKSREGANSQVAALRKSLEAAHKDIKDKEKMRKELNDCRAEITALKMYIEGTQSIKQLFVGTSDGVKSHSFANSVGASSLNNEDEDSKGSEAITNKLASAVNITDDTQKDRQVLESSAEGSSVSETPVSFTAVENDSYGTSKEDKSVSNISSNNALETIKIVSDALPKIVPYVLINHREACVELAKSVGEMRTETELLPQCWEQSCGELAVYVRPEIRDSLILSIVQQLVEDAATVVREAATHNLALLLPMFPNLDKYYKVEELMFQLVCDPSGAVVEVALKELVPAVVRWGDKLDQISRVLLAHILASAQVLKKAIQTCPFASADPTSSTPENFSASCLKSYATGDSEWSAFEWMHTDCLPDLIKLACLLPVKEDNLRTIITKYLLEVSGLYGKDYLEHIMLPVFLVAAGDIDSGDFTYFPLSIQPKVRVVNSWKSI

SEQ ID NO: 60707 - protein, 272 aa, Zea mays
  Coding DNA Sequence Number=SeqID_18928
  Homolog annotation: Hit_ID=Q6Z8L0; Match level="QueryCoverage=30%, HitCoverage=20%, E-value=8e-10, Identity=42%"; Hit description =Mitochondrial transcription termination factor-like
MTAAPPPSSVIVARPLAHHNRNCRVNSHATYNVMRGHGPMTLGDDSGGGCWDCAPLRNRRLVRHAASLYFVIDTVGIGFDFVRRYISFRVCAPALDEPAASLSSIAAGGAGGADSGRSPTWHGPRLQSAGSVVVLAFLSGLGLSDADITAVVAYDPKLLFSEVKNKTYLLSSDLERIVKRNVAFLVECRLDACDIAKLSIVVPRPITTDPDRVRAVVERVEAIDVPRGVGMFRHTLLAVVLLNEEKIKAKPLFDYEDNVHLRDNNSNISFSI

SEQ ID NO: 60708 - protein, 168 aa, Zea mays
  Coding DNA Sequence Number=SeqID_18929
  Gene Ontology: Mol. function=ribosome binding; Cellular component =ribosome; Biological process=rRNA processing
  Homolog annotation: Hit_ID=Q9FHG3; Match level="QueryCoverage=55%, HitCoverage=19%, E-value=2e-12, Identity=36%"; Hit description =Arabidopsis thaliana genomic DNA, chromosome 5, TAC clone:K11I1
MAEGSRCREAAVIDGNSWPSKALFGSTQFLRNCFIEIEARKIVGSAVLVKARDRPEIEDDEFYSLDLVGMRVIVKIQKIKIQSHHVRITPEDIVPDVDMASREMRITPPKGLLELNSRSDKRSKKERHAMVRVKVKNVKNVGTVELNGQPSSTHAGPISVTATWPHRT

SEQ ID NO: 60709 - protein, 113 aa, Zea mays
  Coding DNA Sequence Number=SeqID_18930
  Gene Ontology: Mol. function=protein binding; Cellular component =integral to membrane; Biological process=protein amino acid phosphorylation
  Homolog annotation: Hit_ID=Q53PD0; Match level="QueryCoverage=68%, HitCoverage=7%, E-value=2e-20, Identity=59%"; Hit description =Leucine Rich Repeat, putative
QDFAEAGTRQRGLCRVPDKKHSAKTRIPVLELVEKRYGTMEAIVGKTKDTKEGQVSKRGADLASQALAVEIELRDSIWSSGTAVHTMPMAEVDAGVPIAQGSVRITGDALLEL

SEQ ID NO: 60710 - protein, 637 aa, Zea mays
  Coding DNA Sequence Number=SeqID_18931
  Gene Ontology: Mol. function=protein kinase activity; Cellular component=integral to membrane; Biological process=protein amino acid phosphorylation
  Homolog annotation: Hit_ID=Q6UJY9; Match level="QueryCoverage=93%, HitCoverage=84%, E-value=1e-102, Identity=37%"; Hit description =Receptor protein kinase
  Pfam annotation: Domain name=LRRNT_2; Domain location=35-75; Score =57.6; E_value=4.2e-14; Accession=PF08263.3; Description=Leucine rich repeat N-terminal domain
  Pfam annotation: Domain name=LRR_1; Domain location=105-126; Score =13.2; E_value=0.98; Accession=PF00560.23; Description=Leucine Rich Repeat
  Pfam annotation: Domain name=LRR_1; Domain location=128-150; Score =8.8; E_value=6.4; Accession=PF00560.23; Description=Leucine Rich Repeat
  Pfam annotation: Domain name=LRR_1; Domain location=152-174; Score =18.7; E_value=0.021; Accession=PF00560.23; Description=Leucine Rich Repeat
  Pfam annotation: Domain name=LRR_1; Domain location=176-198; Score =13.7; E_value=0.7; Accession=PF00560.23; Description=Leucine Rich Repeat
  Pfam annotation: Domain name=LRR_1; Domain location=200-222; Score =8.9; E_value=6.1; Accession=PF00560.23; Description=Leucine Rich Repeat
  Pfam annotation: Domain name=LRR_1; Domain location=224-246; Score =11.2; E_value=2.3; Accession=PF00560.23; Description=Leucine Rich Repeat
  Pfam annotation: Domain name=LRR_1; Domain location=248-270; Score =4.6; E_value=40; Accession=PF00560.23; Description=Leucine Rich Repeat
  Pfam annotation: Domain name=LRR_1; Domain location=273-295; Score =8.2; E_value=8.3; Accession=PF00560.23; Description=Leucine Rich Repeat
  Pfam annotation: Domain name=LRR_1; Domain location=297-319; Score =17.4; E_value=0.053; Accession=PF00560.23; Description=Leucine Rich Repeat
  Pfam annotation: Domain name=LRR_1; Domain location=321-353; Score =6.7; E_value=16; Accession=PF00560.23; Description=Leucine Rich Repeat
  Pfam annotation: Domain name=LRR_1; Domain location=356-378; Score =10.0; E_value=3.9; Accession=PF00560.23; Description=Leucine Rich Repeat
  Pfam annotation: Domain name=LRR_1; Domain location=380-398; Score =2.4; E_value=1e+02; Accession=PF00560.23; Description=Leucine Rich Repeat
  Pfam annotation: Domain name=LRR_1; Domain location=81-103; Score =8.3; E_value=8; Accession=PF00560.23; Description=Leucine Rich Repeat
  Pfam annotation: Domain name=Pkinase; Domain location=432-634; Score =2.4; E_value=1e-08; Accession=PF00069.15; Description=Protein kinase domain
  Pfam annotation: Domain name=Pkinase_Tyr; Domain location=432-636; Score=-58.4; E_value=6.9e-09; Accession=PF07714.7; Description =Protein tyrosine kinase
  Pfam module annotation: Pfam domain module=LRRNT_2::LRR_1::LRR_1::LRR_ 1::LRR_1::LRR_1::LRR_1::LRR_1::LRR_1::LRR_1::LRR_1::LRR_1::LRR_1: LRR_ 1::Pkinase::Pkinase_Tyr; Domain
  Pfam module annotation: Domain location=176-198::200-222::224 -246::248-270::273-295::297-319::321-353::356-378::380-398::81 -103::432-634::432-636
MSLWKQPSKLAMVVVLLLLLCHAVDKVHCSTHHNNSQDFHSLLEFKKGITSDPHGALSNWNPSIHFCHWHGVNCSSTRPYRVTELNLTGQNLAGQISSSVGNLTFLHTLDLSNNSFIGPLPLLNKLRNLDLLFLGSNHLEDVILDWLTNCSNLVYLDLSKNHLTGHIPPNIAFLKKLEGINLYGNYLSGVIPPTLRNLSTLLLVDLSNNQLNGSIPNEVWQIPNIQMVNLAINNLSGGIPDTFTNLSSLMILGLDHNMLGGTLPSNIGDVLPHLQGLYLGSNLFFGTIPTSLGNASNLEVVDLPNNLFSGTIPSSFGNLSKLQILNLEVNMLEARHMSHNHLHGPIPNSIANLSTSLQQLFMGWNNLSGIVPPTIGKLSGLTKLSLENNNLIGVVLLLEKRTSRRAYRSEQSYYEHFEKVTYNDLAQATHDFLESNLIGRGSYGSVYQGKLKEGRMEVAVNFFDLEIRGAGRSFLSECEALRSIQHWNILPIIVSCSIVDNVRNVFIDLIYEYMPNGSLDTWLHHKGDEEATKCHGLTQSISIAVNIADALDYLHHDCGQQTICCDLKPSNILLDCDMNALLGDFEIARLYHDSESKWTEYGGGGHASTSGDVYSFGIVLLEILTSRSPIDPTFKDG

SEQ ID NO: 60711 - protein, 387 aa, Zea mays
  Coding DNA Sequence Number=SeqID_18932
  Gene Ontology: Mol. function=methyltransferase activity; Cellular component=nematocyst; Biological process=pathogenesis
  Homolog annotation: Hit_ID=Q6ZI02; Match level="QueryCoverage=99%, HitCoverage=99%, E-value=1e-139, Identity=66%"; Hit description =Putative S-adenosyl-L-methionine:salicylic acid carboxyl methyltransferase
  Pfam annotation: Domain name=Methyltransf_7; Domain location=40-387; Score=410.1; E_value=3.1e-120; Accession=PF03492.6; Description=SAM dependent carboxyl methyltransferase
MNVERDLHMTRGDGEHSYASNSRLQEKSILKTRPVLHKAVVAAAHACLSLSSGPGGAMVVADLGCSSGPNTLLVVSEVIKAVADCCRHEQQLAAGGQPQHVQFFLNDLPGNDFNLVFQSLELIRKLAAKDGLEEPLLPPYYVAGLPGSFYTRLFPDRTVHLFHSSYCLMWRSKVPDELAAGAVLNEGHMYIWETTPPAVVALYRTQFQEDLSLFLRLRHRELVTGGHMVLTLVGRKSKDVLRGELSYTWGLLAQALQSLLKEGRVEKEKLDSFNLPFYAPSLDEVRDVIARSQAFDVTHFQLFDSNWDPHDDDDDDDAEMKMEEEDAVQSGVNVAMSIRAAIGPLIARHFGEHILDDLFELYAKNVAVHLQKVKTRYPVIVVSLQAK

SEQ ID NO: 60712 - protein, 85 aa, Zea mays
  Coding DNA Sequence Number=SeqID_18933
MGTRSSSCTIGGFLVAMVDIVCASVSCHVTKPATLSCLVQGALEPRDHMPGEREIKEINFLIHRRGEIKEIKDYRSSAMPKDLPV

SEQ ID NO: 60713 - protein, 368 aa, Zea mays
  Coding DNA Sequence Number=SeqID_18934
  Gene Ontology: Mol. function=methyltransferase activity; Cellular component=nematocyst; Biological process=pathogenesis
  Homolog annotation: Hit_ID=Q6ZI02; Match level="QueryCoverage=99%, HitCoverage=97%, E-value=1e-127, Identity=65%"; Hit description =Putative S-adenosyl-L-methionine:salicylic acid carboxyl methyltransferase
  Pfam annotation: Domain name=Methyltransf_7; Domain location=28-368; Score=402.9; E_value=4.6e-118; Accession=PF03492.6; Description=SAM dependent carboxyl methyltransferase
MTRGDGEHSYASNSRAQEKSILKTRPVLHKAVAAAHALSLSSGPGGAMVVADLGCSSGPNTLLVVSEVIKAVADCRHELATGSQPQHVQFFLNDLPGNDFNLVFQSLELIKLAANKDRQEEPLLPPYYVAGLPGSFYTRLFPDRCVHLFHSSYCLMWRSKVPDELASGAVLNEGNMYIWETTPPAVVALYRRQFQEDLSLFLTLRHTELVSGGHMVLTFLGRKSKDVLRGELSYTWGLLAQALQSLVKEGRVEKEKLDSFNLPFYVPSVDEVRDVIAQSQAFDVIHIQLFDVKWDGGDDDVEMEDYGGVESSVSVARSIRAVVGPLIARHFGEHILDHLFELYAKNVAMHLQKVKTKYPVILVSLQAK

SEQ ID NO: 60714 - protein, 166 aa, Zea mays
  Coding DNA Sequence Number=SeqID_18935
  Subcellular localization annotation: CTP_CleavageSite=12; ConfidenceScore=5.51e-01
MARPWRGPWRARAAPASAAARPRPPFPGVRPPQPLPAWRARRVRPPERTTPPLPLSDAWPAATARGPRPRPARRTPLPRPRRGLGGVLAQPCPSAAMARPPGSPPLLAAQRGVPPPGTAPQPRPQSQHMFGLQVAMRLMVLGIDSGNGEDEVVEGDHQEFQDYDEF

SEQ ID NO: 60715 - protein, 73 aa, Zea mays
  Coding DNA Sequence Number=SeqID_18936
MTRELSMGAMIWQTCRDGAVHTQRRRRGTSSAHTSQQIDGCSRLDISWSRGKGAGSLQRCSTTAITGVEQGAI

SEQ ID NO: 60716 - protein, 344 aa, Zea mays
  Coding DNA Sequence Number=SeqID_18937
  Homolog annotation: Hit_ID=Q75K33; Match level="QueryCoverage=84%, HitCoverage=82%, E-value=1e-103, Identity=70%"; Hit description =Expressed protein
  Subcellular localization annotation: CTP_CleavageSite=42; ConfidenceScore=5.11e-01
MPLPPLLPRLYPTPPPLRAGDRGNAVPLSPGRRRPALLAVVRAKRKDEASFTDRILDYIEGGPKLRRWYGAPDLLPKDGAAEDEEDESQDIEESRDAVLVTNGDSEIGQRNRYHNHTSIKTEICMLRIEGPMVILALILKRARTKALVKDKRTTEEAFGTYVECMVGDIGDKSFTKRALRGVRAIICPADDGFFSEPIDLKGVQHIVLLSQLALASVIYPYEILMRLQLAVYRNSGGLQAIMNSKLKTLAEKDEEVVLASGIPCTIIRTGSLQSTPGRERGFDFTEGIASKGRISKEDAATICVEALNSIPLKTHIFEVANGKEKVIDWKAWFEEQTKREEEIQ

SEQ ID NO: 60717 - protein, 49 aa, Zea mays
  Coding DNA Sequence Number=SeqID_18938
MVLVPPSDRQVLRSATFVYTNSDEQATEDLGVQLVETAEQELVEGKLCP

SEQ ID NO: 60718 - protein, 55 aa, Zea mays
  Coding DNA Sequence Number=SeqID_18939
MIGSVEGANIIFVIVYKYAHHYGDVHMVHQPQVGEDKEGNLQGDILVPLLVSASA

SEQ ID NO: 60719 - protein, 137 aa, Zea mays
  Coding DNA Sequence Number=SeqID_18940
  Subcellular localization annotation: CTP_CleavageSite=63; ConfidenceScore=5.06e-01
MNLMSCAPSQSRSATHQGQQHPRARHLRPLAVQQEGQRRHMGGWKAQTRSNEVWASPAAQLVRGDGVSGLRTRKAKRTGHTTVSPPAPHQTATRDAPMSWRHGWRHADPSTSPSSPLPLDSLQFPEKEAGDELIKFV

SEQ ID NO: 60720 - protein, 95 aa, Zea mays
  Coding DNA Sequence Number=SeqID_18941
MGGGCGRFGGGGAVGFSGEGHGWWPCGGRGGGVWKVAAAHLRTSPQHWRPPSVNSSDHLQQDLTFVMPPKKASAPGAAALQPLDPNQETLSVREA

SEQ ID NO: 60721 - protein, 636 aa, Zea mays
  Coding DNA Sequence Number=SeqID_18942
  Gene Ontology: Mol. function=nucleic acid binding; Cellular component= intracellular; Biological process=DNA integration
  Homolog annotation: Hit_ID=Q8H6I0; Match level="QueryCoverage=92%, HitCoverage=55%, E-value=0.0, Identity=84%"; Hit description =Putative gag-pol polyprotein
  Pfam annotation: Domain name=RVT_2; Domain location=332-570; Score =453.4; E_value=3e-133; Accession=PF07727.4; Description=Reverse transcriptase (RNA-dependent
  Subcellular localization annotation: CTP_CleavageSite=45; ConfidenceScore=5.11e-01
MALASKRETMSNLMPLLKDCQTLLRARLPCLRITRVTFCTLPVIPSTKLEEFTLGSLTLALTMLDEYKTSDRFWAEAVNTACYAINRLYLHRILKKTSYELLTGKKPNVSYFRVFGSKCFILVKRGRKSKFAPKAVEGFLLGYDSNTRAYRVFNKSTGLVEVSFDIVFDETNGSQVEQVDLDELDDEEALCIALRNMSIGDVCPKESEEPPQAQDQPSSSMQASPPTQDEDEAQDDEGEDQEDEPPQEEDNDQGGDVHDQGKEDEQVPRLPHPRVHQAIQRDHPVNTILGDIQKGVTTRSRVAHFCEHYSFVSSIEPHGIEEALQDSDWVVAMQEDLNNFTRNEVFRNKQDEHGVVTRNKARLVAKGYSQVEGLDFGETYAPVARLESIRILLAYATYHGFKLYQMDVKSAFLNGPIKEEVYVEQPPGFEDSEYPNYVYKLSKALYGLKQAPRAWYECLRDFLITNGFKVGKTDPTLFTKTLENDLFVCQIYVDDIIFGSTNESTCEEFSRIMTQKFEMSMMGELKYFLGFQVKQLQEGTFISQTKYIQDILNKFEMKDAKPIKTPMGTNGHLDLDTGGKSVDQKKEHIRDLPVLEKVSGVLGFKEAKFSSSFYRRSRVYCRRPLLRAIALDEANP

SEQ ID NO: 60722 - protein, 456 aa, Zea mays
  Coding DNA Sequence Number=SeqID_18943
  Gene Ontology: Mol. function=protein binding; Cellular component =membrane; Biological process=defense response
  Homolog annotation: Hit_ID=Q10M36; Match level="QueryCoverage=98%, HitCoverage=99%, E-value=2e-68, Identity=44%"; Hit description=NB -ARC domain containing protein, expressed
  Pfam annotation: Domain name=NB-ARC; Domain location=168-421; Score= -108.0; E_value=0.0021; Accession=PF00931.13; Description=NB-ARC domain
MDWLSSMLGDRPLKSVFTALGLPDKIGGAVIDALCYRGVRLWNVEEEADKLRRTKERIRAVLEDAEQRRFIDHDSVRLWLRELRAVAFDVDALLDRLGTITAVSRLAAAEQSRKRKRLWPSVELGPRQRWELDEKIAKINERLDEINTGRKWYRLQAGDGTRAASQPTQRPRFLESAAHRDERPIGRNEEKEQIVRALVSDSADMAVISIWGTTGIGKTALAQSVYKDPEVQNFFTDKIWVWLSDRDGGRCNINELRNLKIRGELCILNLEAATSDGATEANLRGKEYLRELMLKWSEDACKDEQQQQQQQGIENSEAVIEALCPHTGLKRLRVENYPGRRFPPCFENIPSLESLEIVSCPRLTQFSVRMMRSLRNLRIRQCADLAVLPGGLCGLESLRCLETVGAPNLRIGAVDILPRNVSRLAVSGCDALERWCLEEGAERVQQIPDVRMRLKN

SEQ ID NO: 60723 - protein, 169 aa, Zea mays
  Coding DNA Sequence Number=SeqID_18944
MAQPNASGRLPPRPSRALTSINAAGNHDVTSSKDDEAPYSGHATLFTTLPESGSLPSARRFVECFLSGTRQRLAECCPRQSPTLGNDRVYREQYSWHRNTLGKEVFAECRTLGEWRRSAKGRQQLSIADVTCRVFYTFFKQLDGKFKVMFSEHGARRFRYVPEIGRNLC

SEQ ID NO: 60724 - protein, 104 aa, Zea mays
  Coding DNA Sequence Number=SeqID_18945
MPHMLGVRLHCSMHRRRRGPRHGSIGNGPRRGGVGAGLVSAAGACPLAWARAPGMAAQALTLDAAKTNKNVYTGHFVDSNTRQSRYLPTVRAIALAREATSGHP

SEQ ID NO: 60725 - protein, 485 aa, Zea mays
  Coding DNA Sequence Number=SeqID_18946
  Gene Ontology: Biological process=regulation of GTPase activity
  Homolog annotation: Hit_ID=Q69V47; Match level="QueryCoverage=63%, HitCoverage=91%, E-value=1e-127, Identity=76%"; Hit description =Putative zinc finger and C2 domain protein
  Pfam annotation: Domain name=ArfGap; Domain location=168-279; Score =93.3; E_value=7.4e-25; Accession=PF01412.9; Description=Putative GTPase activating protein for Arf
  Pfam annotation: Domain name=C2; Domain location=318-410; Score=92.2; E_value=1.6e-24; Accession=PF00168.20; Description=C2 domain
  Pfam module annotation: Pfam domain module=ArfGap::C2; Domain location=168-279::318-410
  Subcellular localization annotation: CTP_CleavageSite=23; ConfidenceScore=5.59e-01
MGLSFTFHSVNQFPVNLNALTCRQRTPHSHRFRPGLRSVVLWLSSKVQRLVNPKGDQTDPPLLCSAHVREPPGKTQRRNSGDRNPGTQLGELHATAGRRLIHFLSLQLLVLVFFQLHPGYLVRVFLDRLDSKDRSWFLTPHSLWICSCSVKGRLVSGVVGGQSFAGGEEEEQQRDSADTDRGRSANIGVFICLKCSGVHRSLGTHVSKVLSVTLDQWTDDEINSMIEVGGNSYANAIYEAFLPEGYQKPHPDSSQEERADFIRSKYELQEFLKPSLRLVSSNKGSLEATSSRKHMDNSVSLSASFSSEAGMVEFIGILKVKVIRGTKLAVRDLMSSDPYVVLTLGQQIISADKHQHCSLQKAKTSVSKRNLNPVWNEELKLSVPQHYGPLKLQVFDHDMLSKDDEMGDAEIDLQPMISAATAFGDPDLLADMQIGKWLRSPDNALARDSAVNVVGGKVKQEVSLRLQNVESGEVELELEWIPLNQ

SEQ ID NO: 60726 - protein, 430 aa, Zea mays
  Coding DNA Sequence Number=SeqID_18947
  Homolog annotation: Hit_ID=Q10L49; Match level="QueryCoverage=42%, HitCoverage=37%, E-value=1e-70, Identity=69%"; Hit description =Expressed protein
MNWQCIYSAEYNPDQYLWEPEFTLAGRKYKRLDLEAMDAEQMQMKPLSYFFLQISPFLHLTLRDQGYQVEIMSALVGMSLLYGAEDPSIAGMVLDSAFANLYDLMMELVEVYKIRVPKFTVKMAVQYMRCVIQRRAKFDIMDLNVVQFAPKTFIPALFGHASNDMFIQPHHTDHIHQAYAGDKNLIKFEGDHNSPRPQFYYDSVSIFFYNVLHPPQFPSTCTHKLDKYYNLGAFKGAAGTNESLLYEIINGLRAAGTDAGSSSAATASFTNATKSVVELLTERVNQLSVKNDNDLDFLLDENHNLTEMDGNTGECHLEDKSNRQTDECCSYTSSNRESWGRCSSLGGASDGLSSGEQPEIPNHKLKSLTLRALATPLRRVQRKPLAIPKEKNRSLWKRLKKERQQMGENISQRLRLCLQGQARHKRTKSS

SEQ ID NO: 60727 - protein, 204 aa, Zea mays
  Coding DNA Sequence Number=SeqID_18948
MDKIKGLNNPGRGSGKRKTRVTTELTNMTKALRGALDAEGTVGGRQCPTKRWRAGRAEHNRRAGGTGDRLEQLSSGDELRRQRHGSRDDSGVGRTTGWRLCAEEACTDAQEGVQHEGVGVGRRAGVRAADLARALAETPARGRRTDVMSGERGDGWWHRSEAEPDDRREAWIQAGRRLGQRKGGLRPGRGRPLAGVGWWEGREN

SEQ ID NO: 60728 - protein, 576 aa, Zea mays
  Coding DNA Sequence Number=SeqID_18949
  Gene Ontology: Mol. function=oxidoreductase activity; Cellular component=intracellular; Biological process=lignin catabolic process
  Homolog annotation: Hit_ID=O24044; Match level="QueryCoverage=94%, HitCoverage=94%, E-value=0.0, Identity=78%"; Hit description=Laccase
  Pfam annotation: Domain name=Cu-oxidase; Domain location=163-316; Score=214.3; E_value=2.7e-61; Accession=PF00394.12; Description =Multicopper oxidase
  Pfam annotation: Domain name=Cu-oxidase_2; Domain location=426-560; Score=185.5; E_value=1.3e-52; Accession=PF07731.4; Description =Multicopper oxidase
  Pfam annotation: Domain name=Cu-oxidase_3; Domain location=37-153; Score=237.8; E_value=2.3e-68; Accession=PF07732.5; Description =Multicopper oxidase
  Pfam module annotation: Pfam domain module=Cu-oxidase::Cu-oxidase _2::Cu-oxidase_3; Domain location=163-316::426-560::37-153
MGVSLLSSPAFLVFFSFFTFCLLVDPVLGITRHYKFDVKLHNVTRLCHTRSIVSVNGQFPGPRIVAREGDQLLIKVVNHVPNNVSIHWHGIRQLRSGWADGPAYVTQCPIQTGQSYVYNFTIVGQRGTLFWHAHISWLRATLYGPIVILPKRGVPYPFAKPYKEVPIVFGEWFNADPEAVISQALQTGGGPNVSDAYTINGLPGPLYNCSAKDTFKLKVKPGKTYLLRLINAALNDELFFSIANHTLTVVDVDAIYVKPFETETLLITPGQTTNVILKTKPSYPNATFFMTARPYVIGQGTFDNSTVAGILEYESPPKSLHLSKMFPLFKPILPALNDTSFATNFASKLRSLASAQYPANVPQKVDKHFFFTVGLGTSPCQHNQTCQGPNGTKFAASVNNVSFTMPTTALLQAHFFGQSNGVYTPDFPSSPTIPFNYTGTPPNNTMVINGTKVVVLPFNTSVELVMQDTNILGAESHPLHLHGFNFFVVGQGFGNFDPNKDPAKFNLVDPIERNTVGVPSGGWAAIRFLADNPGVWFMHCHLEVHTSWGLKMAWIVLNGELPTQKLLPPPADLPKC

SEQ ID NO: 60729 - protein, 910 aa, Zea mays
  Coding DNA Sequence Number=SeqID_18950
  Gene Ontology: Mol. function=DNA binding; Cellular component=nucleus; Biological process=protein modification process
  Homolog annotation: Hit_ID=Q08707; Match level="QueryCoverage=62%, HitCoverage=95%, E-value=3e-90, Identity=36%"; Hit description=BPF-1 protein
  Pfam annotation: Domain name=DUF573; Domain location=144-241; Score =188.6; E_value=1.5e-53; Accession=PF04504.5; Description=Protein of unknown function, DUF573
  Pfam annotation: Domain name=Myb_DNA-binding; Domain location=831 -881; Score=17.2; E_value=0.059; Accession=PF00249.21; Description =Myb-like DNA-binding domain
  Pfam module annotation: Pfam domain module=DUF573::Myb_DNA-binding; Domain location=144-241::831-881
MAPKRSNPIEVPPAASSSEEDEEVTSSEEVDEGSSTEEDPKTQSTPMSQKSPPPRKLETATPAIVKEGSDESGSDSESDTAAQIAIATEPRCNKSLASSSKRPGKSELDAKEAKRLKKKVGEEGMATAPVVEGVKKTGEDAKKLLFQRLFSEDDEIALLIGMLDYSAKKGADPCADMNEFYEFVKKSIHTDVSKVQLMDKIRRLKKKFKNNAGKNSKGEDPTFSKPHEQNAFELSKQIWGKEGISGKVESSTAKSNGKAKGKNKAEVAVKAELLSSSDKKIDDAVPVEVDEVVSKSSSNFLDKKFSLSDLEEAVVKVGLDMVDGEKKAALEAKWMKLQVAQLEAVSNVPRAPRSIRKRDRTKRVVEDSRICAFELLASLAGKLLEEGESSASSNASAGHDHVSIGKDVKLETRYDDKPLKTECVGHVSCDASVVTSDWTAENSDNSKEPKLSENNAILEPTLTKAPPACSVQINDDLKYTIQKCNVGYGSFPGNLDGCSPNFGELCDGISENGVKREVETNNYPTMDPLEVSMTFPAPINSDRDVKLPSRSDSVLNASFSRHRNDIKLGSRDDDEKFSRFNKLSNRFKVSRPATCIEDRRIRKLLTSKYWKAAPKLKDFEDSRADGGIKALQRKRKTYYDKCQYDTLYKRRKFFDRSSIVTSDGRIGSENVSNSPEKVTNENENKCRLVAMSHGACEIASLLTGHQASHKSDDSHVKLSIKSFRIPELYIEVPETATVGSLKPGPVIAPPPICSEEPLLQLPCGSAPQNLTRSLVVTPALDTGIPDATPDPPLLTNSAKSVDIPAMNVEALAVVPVNQKIRKSELAQRRTRRPFSVSEVEALVQAVEELGTGRWRDVKLRAFENADHRTYVDLKQKFRRSKDEGNRYPKNYWIGSWLLMLTGLSIKLNNK

SEQ ID NO: 60730 - protein, 87 aa, Zea mays
  Coding DNA Sequence Number=SeqID_18951
GDNNRQRDEISGDPNNKKIRFKDPESNIKDVMAVGATLIPILSWKDMVMGKGSTVSNGDRDSNTANETFSLLEGGVKKSLVSGHSRY

SEQ ID NO: 60731 - protein, 445 aa, Zea mays
  Coding DNA Sequence Number=SeqID_18952
  Gene Ontology: Mol. function=transferase activity, transferring hexosyl groups; Biological process=metabolic process
  Homolog annotation: Hit_ID=Q9LTA3; Match level="QueryCoverage=99%, HitCoverage=94%, E-value=1e-108, Identity=45%"; Hit description =Anthocyanidin-3-glucoside rhamnosyltransferase-like
  Pfam annotation: Domain name=UDPGT; Domain location=4-442; Score= -142.0; E_value=0.0018; Accession=PF00201.9; Description=UDP -glucoronosyl and UDP-glucosyl transferase
MPFLEVSKQDSKGHRISYISTPKNISRLPKLPPHLSSNLSFVEFSLPHVHGLPPGVEATSEVPIDKVPYLKRAYDKLRDPLTDFLKNSNVNWIIHDFAPYWLPGIAAPLGVNLVFFSIFNASTFAFLGPPSALLGDRRKRPEDFTVIPEWIDYPCNNIAFKLHEMVNHQQCMDDDVSDFQRIGRLIQGCQFVTMRTCFEFERDAIKLLIKLYQKPVVPVGLLPPLLSLPSNEDNKWEAIKSWLDSEGEKSVLYIALGSEVNLSEESMHQLAFGIEKSNLPFIWVVRNRPVGEGQMNDIIPPGFEKRVSNRGLVLRDWAPQLQILAHSSVGGFLTHCGWSSIIEALKYGRALILFSGASSDQGLNARLLHGKKVGLEIEKNEVDGSFTSDLVAATIRRVMVEPEGEVFRANAWAMREIFGNEDLSNNYLNEFTRFIEEFSTSACHY

SEQ ID NO: 60732 - protein, 169 aa, Zea mays
  Coding DNA Sequence Number=SeqID_18953
MWENRHEYLPTREQIIVPELACVPEYMPWFRIHGKPYLLTPEERQRQIRVRRERRGPLNPRGQDYEGSPSTRPRHSPGSSSVAMQSPSPTKAPTQSPDAAIQQMIPTQSPFPMMPGKSSSQVRQADAEPEEQQSPPEEEQPPPEARGKRNPARNRRRPPCGTESPGHIH

SEQ ID NO: 60733 - protein, 107 aa, Zea mays
  Coding DNA Sequence Number=SeqID_18954
MAARHARPSHLTVPEEPALNAATSTHRHTELASPLPSPGCGSLVPALKPSTEPRPGQPAPLSCKPVGEPLRCPAVLRPAPLSLHPHMIPSSLAVAIRVEHRREKVEN

SEQ ID NO: 60734 - protein, 142 aa, Zea mays
  Coding DNA Sequence Number=SeqID_18955
MPATSGSTIQALPRRDFGDSEYSEEEVSSESEGSLALASPPTSSDDSDDSQGIAAEYWTNIRSVEHARLEESDESKVSSDEENSSGSSEERSDNDSDDEGGDSSDDSGDGEGDDDGGDGGGKGDSGGVVSGGSKASGKAPLV

SEQ ID NO: 60735 - protein, 73 aa, Zea mays
  Coding DNA Sequence Number=SeqID_18956
MPGFGRLGLATAAAARGWLPGVTAGREREEERVGREIENRGREGVAQGGGWLFQGARARLVLGFGELLISGRC

SEQ ID NO: 60736 - protein, 145 aa, Zea mays
  Coding DNA Sequence Number=SeqID_18957
MTERKRKEMENRKRKFSGPQPESINRPRFSSNQPQQFRQNQRPPQQQQIQRQYPQHQYQNRQNNQSGGGQFPRQNQQAPRLPAPANQQNNQAAPAQVGNRACLNAPAKQNVSQPGAGNRSQLRYNHGRLNHLEAEAVQETPDMIV

SEQ ID NO: 60737 - protein, 122 aa, Zea mays
  Coding DNA Sequence Number=SeqID_18958
MAKGYLNLWATRIRSNGPNQTPNRYEIAAIGSKSDHQDFMSSKPFATHRSATNGPNALNQKRCATPGLDDGDPPAMEAPWPKFQATPRMIYGGTPKLVIRPPFCKHGRGTQMIGGDPTGAMA

SEQ ID NO: 60738 - protein, 67 aa, Zea mays
  Coding DNA Sequence Number=SeqID_18959
MAEIPSHAQEVRANRVWFFTGDEEADKAVLASRMIYGGAPTLVIRPLVCKHGRGTQRVGGDPTGAMA

SEQ ID NO: 60739 - protein, 112 aa, Zea mays
  Coding DNA Sequence Number=SeqID_18960
MGGSMIITSLRNGPKGIFHDPSEVLAPSACSNPELGATSRVSGIAHRRLETVGVAAHGAQPATRDAREPPQPQLCRARPTPREQGTLNYNSPDCPVNQSNNGSLRANGQLTG

SEQ ID NO: 60740 - protein, 202 aa, Zea mays
  Coding DNA Sequence Number=SeqID_18961
  Gene Ontology: Mol. function=nucleic acid binding; Cellular component= intracellular; Biological process=DNA integration
  Homolog annotation: Hit_ID=Q8H6I0; Match level="QueryCoverage=99%, HitCoverage=13%, E-value=1e-66, Identity=61%"; Hit description =Putative gag-pol polyprotein
MSGAHTKKEMVTNEKPTTSHGKAPSGESGNKKREESPPRVKSNRSGDKKKKMKKVVYYETDSSSPSTSGSDTPSVTSKCHERKKFSKIPLRYPRISKCTPLLSVPLGKPLVFDGEDYCMWSDKMRHHLTSLHASIWDIVEFGAQEPSVGDEGYDSDEVAQIRHFNSQATTILLASLSREEYNKVQGLKSAKEIWDVLKTTHE

SEQ ID NO: 60741 - protein, 423 aa, Zea mays
  Coding DNA Sequence Number=SeqID_18962
MAPPHWDGHHRGWVLEMGGAANPPYPYRKVVVDREESRLAELDDALCSRFVPSSSATKADGNCHVAAAGMRGHHALARAQRSSSRARLACVASDCFWLKWMCLTLSHSLQRLILTRPRLAISSSSSRQHRIGPPWPTRAKLVVTPSFISPLSKASVVPHFTIESGSRSPLLELGEVRSNAIDVAVPWFSPARVDQVPPSATHRAKNAVDFVVDRHYSPAFTSSILPPEEVPFGIVEELSGILVEEGSGRFERRNTLLPGVDLYVARESRVVSWGSKRFDGPSGPESIAFSDRPIPQVVFCLTHEEMVLQDDKRKRAPSPPSEDFGNSEYSKEASSEYDRLPAPASPVASSEDSDDSMGLSIAARAYWRSIEHARLGGSDDSEVSLEEEDSSDSSEERSGGDGDEDEDDGSSGDDGGEGGGDGS

SEQ ID NO: 60742 - protein, 143 aa, Zea mays
  Coding DNA Sequence Number=SeqID_18963
MKSKYNISNNCYNDIVKLIIDVLPLNHKMPENLKDTKSFQKGNWVRDGRPKRQTGEDIMRQHRYLKPSEGVRFEGYDQVADDKTNEVVDDEDNQMIADEVEVEATTDEKEADELTVAATASIRFLQYLTFKPRKEFEQRHITR

SEQ ID NO: 60743 - protein, 63 aa, Zea mays
  Coding DNA Sequence Number=SeqID_18964
MEVVDDEDNQMIADEVEEQYRLHNDMSLDDQHVRHVFNISTQRVVKGMMYDARVKAVVVWHKC

SEQ ID NO: 60744 - protein, 42 aa, Zea mays
  Coding DNA Sequence Number=SeqID_18965
MDGQSTEVAAGTGGTGGLAACVWAAGDEGVRALFEQQVNRKM

SEQ ID NO: 60745 - protein, 101 aa, Zea mays
  Coding DNA Sequence Number=SeqID_18966
MGGDGMENWMRWEREREKGEEKPRHVACHHSPDFIRPPVNVASATQYTVARFLAPAASSTSSEAPQPVESSSVITVDRNLEPPPTTVAYARGPSSSDHHRP

SEQ ID NO: 60746 - protein, 169 aa, Zea mays
  Coding DNA Sequence Number=SeqID_18967
  Gene Ontology: Mol. function=cysteine-type peptidase activity; Biological process=proteolysis
  Homolog annotation: Hit_ID=Q69V30; Match level="QueryCoverage=73%, HitCoverage=12%, E-value=2e-20, Identity=41%"; Hit description =Hydroxyproline-rich glycoprotein-like
MDKLVSQEQFGGEGYRTPSDPCPSIDRATRCELQCDPSCDPQDDERTNPDCISLIKANLELCKKNEYHHLGTSGYKRHIVKWRQEVAKKKAAGLPMLSKQLGERTANWIRAQKPRETESGVSFDNPTIEEATKNIYVMAAKQNQGAFKPQRERGILTACLGNHEHPSRV

SEQ ID NO: 60747 - protein, 143 aa, Zea mays
  Coding DNA Sequence Number=SeqID_18968
  Gene Ontology: Cellular component=integral to membrane
  Homolog annotation: Hit_ID=Q2QLQ4; Match level="QueryCoverage=88%, HitCoverage=92%, E-value=1e-23, Identity=43%"; Hit description=Erg28 like protein, expressed
  Pfam annotation: Domain name=Erg28; Domain location=10-117; Score =65.2; E_value=2.2e-16; Accession=PF03694.4; Description=Erg28 like protein
MASGRRKSGIPALGWWLMAVGTIRSAIVWSCLFSSASLCLAVYPEMTGVQERAMAAWTLLSCTLCFLCAFNMDSKPLYVATFMSFVYVAGYLLVECFFYHSVHAASIAPYCFIADIVRNIIFVVSHSKYVSIVTILHNMEELA

SEQ ID NO: 60748 - protein, 183 aa, Zea mays
  Coding DNA Sequence Number=SeqID_18969
  Homolog annotation: Hit_ID=Q6QP51; Match level="QueryCoverage=72%, HitCoverage=54%, E-value=5e-12, Identity=50%"; Hit description =Putative growth-regulating factor 1
MAPPVDVVGPCPGLGEVEAPPRSRSSLSSEAEVESEPPGRARRRPSAEARAESEPWGRAKRSSSSSGSEPKSEPWGRAKRSSSSSGAEPESEPWGRAERSSSSSGAERESEPWGRAKRSFLWRLRPDLAPVSLTLPSGTAVGAAQVALSSCQTGQWSGEVTTVTSALSTGGVRQDKGVRPPLH

SEQ ID NO: 60749 - protein, 121 aa, Zea mays
  Coding DNA Sequence Number=SeqID_18970
MGKTQFSNRDGKDDKSKGRHNISIMERSRYYKGKGDIEQKLRLATRQRRRERKRAGWDRVMRRVKELTNKTQQMIELKKLAGDKEEDTTKGKIELRQDSQSDEVEKTIKDKISEVPTEELK

SEQ ID NO: 60750 - protein, 123 aa, Zea mays
  Coding DNA Sequence Number=SeqID_18971
MAAAAAAPDADVYDIPWLEKYLPARVADVIGNSDAVTRLEAGNVIDDETHLEEHIPPFPSSTDVKRDSPLAPPHPPSPTLEEPVEEAPKTYASVANEIKGNDGDYRVTAGSTVGPAATVCLSA

SEQ ID NO: 60751 - protein, 39 aa, Zea mays
  Coding DNA Sequence Number=SeqID_18972
MERRVEERTARFLPWRHGSGSAWIVAPLMGEEAARRRKL

SEQ ID NO: 60752 - protein, 350 aa, Zea mays
  Coding DNA Sequence Number=SeqID_18973
  Gene Ontology: Mol. function=transcription factor activity; Cellular component=nucleus; Biological process=regulation of transcription, DNA-dependent
  Homolog annotation: Hit_ID=Q7XB68; Match level="QueryCoverage=80%, HitCoverage=87%, E-value=3e-31, Identity=35%"; Hit description =Putative AP2 domain containing protein RAP2.11
  Pfam annotation: Domain name=AP2; Domain location=44-108; Score =135.4; E_value=1.5e-37; Accession=PF00847.10; Description=AP2 domain
  Subcellular localization annotation: CTP_CleavageSite=36; ConfidenceScore=5.29e-01
MELQFHPQQHHSYQQQQQPPPPATKEPKPKPRTRTKCGGGGGGSSKFVGVRQRPSGRWVAEIKDTTQKVRVWLGTFETAEAAARAYDEAACLLRGANTRTNFAAAPPPDSPLAARIRGILDHNNNNGRTPPKKTLPHRPTAARFFPAAAASTASTCSSTASPTSSSPSSSISFATSTHARAPIPTLPDPRSQSATEEAYYAPYSATGGGEEFQLAATTHQYEQQSWALNAASSPLTPPPPPDARDVGSVNARRLAVAAETGRDRMIKLEKKSSSASLSLSPHGVIDRGPDKDLAFDVGNDASDSLWDLPPICPLSSCSFWPPKAAADCQTLSFSASFYKIRFGKNHSKST

SEQ ID NO: 60753 - protein, 132 aa, Zea mays
  Coding DNA Sequence Number=SeqID_18974
MAFRGVTGGFDREENRSPELDGYQRREGGLTGAEKEGSALARLSSGKGKRGGRSWCEESWSSGGPFIGGRGGGGEMASTGEACRGGDDGAQWWRRDGLGQTVVTGWLGTGARRQFGWSASNGKGMWRSGGRW

SEQ ID NO: 60754 - protein, 366 aa, Zea mays
  Coding DNA Sequence Number=SeqID_18975
MACYLAAIDLDIWRVNRDWIKPPKNPEKLTASDEKEIHLNARARISCDVDIVRKIISLLSQQKYGSIITILHKLEDLSTMTPTLVIEKIVAFEMSRKMGQEEEPTSSKPYAFACDEHKKVKAKNKTPSSSLSEEEEEEQDDDEDDQASTSSFEDEEAARHVEKAQLKTLKNGLLARLHRMSACITVIAHNNELTTKLESIGSTPGTSLVEIPKIIKKDASTSCLDLIYDSNPCNQVVLKNVIIETSFDEVALENELLKQEVAHLVKALYDKKYKAKQIESPQDNTIMGVNKLMEGETMAKTGEKQKKKLTSEVFNTYINKVDKKVATLYLIKRNKNGKVIAIKANKQSNEGKGAKWIWVLRRLSQP

SEQ ID NO: 60755 - protein, 123 aa, Zea mays
  Coding DNA Sequence Number=SeqID_18976
  Gene Ontology: Mol. function=metal ion binding
  Homolog annotation: Hit_ID=UPI00001632AD; Match level="QueryCoverage =85%, HitCoverage=17%, E-value=7e-12, Identity=55%"; Hit description =protein binding / ubiquitin-protein ligase/ zinc ion binding
SFTGGLLMKIAKRNRLTYAMQIILGIHFRILFSRLEHRHYTYSCYSTFCSYPPEVVKEMPKEVLVKEVQRLQLALEEQTEMANHSQQQCDRLRNFKSAHVDSICRVPTSGVDKDGPHLFPGSE

SEQ ID NO: 60756 - protein, 191 aa, Zea mays
  Coding DNA Sequence Number=SeqID_18977
  Homolog annotation: Hit_ID=Q7XJP1; Match level="QueryCoverage=40%, HitCoverage=45%, E-value=7e-21, Identity=63%"; Hit description =Putative translation initiation factor
  Pfam annotation: Domain name=eIF-1a; Domain location=1-66; Score =36.2; E_value=1.1e-07; Accession=PF01176.9; Description=Eukaryotic initiation factor 1A
MQVLTLRGSNVIEVMDGVGVRSLALFPAKFQKSFWIKNGSFVVVDASGRDQALESGSKIACVVSRVLFHEQVRALQKSAYHRITHLTTRSSVVCQIVCIMPQERGCCILLILTYGIGCSDQFVPSYVRPAIFNSAPTPNEASEAGAEAQAAQVDEEPDSDEEDDDLPPLEANTNRNRPYELYSDSDSGSDA

SEQ ID NO: 60757 - protein, 931 aa, Zea mays
  Coding DNA Sequence Number=SeqID_18978
  Gene Ontology: Mol. function=microtubule motor activity; Cellular component=microtubule associated complex; Biological process =microtubule-based movement
  Homolog annotation: Hit_ID=UPI000034ED67; Match level="QueryCoverage =84%, HitCoverage=77%, E-value=0.0, Identity=55%"; Hit description =ATP binding / microtubule motor
  Pfam annotation: Domain name=Kinesin; Domain location=383-698; Score =566.3; E_value=3e-167; Accession=PF00225.13; Description=Kinesin motor domain
MEGAEALFPGDGCGGDPMDFSWTADGEKHPDPAACASPGRDDEATSASTPVPSPQEMAESMILVPGPRVVMSGLRLADCRSDDCVLFINAGGGAIESCDPCVKVSGDSFFEGGDVIETNESIAEGSAKKSSLLNPQILSQLDVYAVVGGNRALQVRDIRVTVEMNGAVMINFKGVRGSPMVCGICIRKAPLLSANSVTNGNVLCKRCSSDIDVSTTQTRTSKLISKYEKQIEELTSQCTMKSNECYMAWSSVDTTNVELGRLKIELHQKGAEMENLVQTLGRESDQLRNVSRKYKNDKKLWVAAISNLERKIKAMKQEQQLLSLEAHDCANAIPDLSKMIGAVKGLVAQCEDLKLKYYEEMDKRKKLHNIVQETKGNIRVFCRCRPLSKDEVSSGQKCVVDFDGSSDGDIVITNGGTKKTFKFDRVFTPKDDQDIVYADASPLVTSVLDGYNVCIFAYGQTGTGKTFTMEGTESNRGVNYRTLEELFNIAEERKESVTYDLSVSVLEVYNEQIRDLLATSPSKKLEIKPNSEGQNHVPGLVEAKIENINEVWKVLQTGSNARAVGSNNVNEHSSRSHCMLCITVRAKNQLNGECTSSKLWLVDLAGSERLAKTDVQGERLKEAQNINRSLSALGDVISALATKNSHIPYRNSKLTHLLQDSLGGDSKALMFVQISPSDNDVSETLSSLNFASRVRRIELGPAKKHVDTAELQKTKQTLERAKQELRLKDDSLRKLEENLQNLESKAKGKEQLCKNLQEKVKELEGQLDSKAQCQITSEKQQRQLSGKLKEKEEMCNVLQQKIADLECKLRQPQQSESEVALLKQTIQELEVKLKEQQHDRSAMELSVSSTKMLSSDLIKEMELRFKEEEHQRSVAELKIKELELKLKEQEHQRSVAELKAREIGHELLETQRTESMLQIKVAFFVTAATIE

SEQ ID NO: 60758 - protein, 78 aa, Zea mays
  Coding DNA Sequence Number=SeqID_18979
MGQTIFMEEEHDDADWGDLESTPPAAPVDLASTTSDDGPDPTSSTTWGPLEPAPAETGGVKAAVEGETPSSREAPHHI

SEQ ID NO: 60759 - protein, 717 aa, Zea mays
  Coding DNA Sequence Number=SeqID_18980
  Gene Ontology: Mol. function=coproporphyrinogen oxidase activity; Cellular component=nucleus; Biological process=porphyrin biosynthetic process
  Homolog annotation: Hit_ID=Q7XCT3; Match level="QueryCoverage=69%, HitCoverage=62%, E-value=2e-47, Identity=65%"; Hit description =Expressed protein
  Pfam annotation: Domain name=Extensin_2; Domain location=265-536; Score=-140.5; E_value=0.082; Accession=PF04554.4; Description =Extensin-like region
MDAAFREAALKGPLWDQVSRRLEAMGYKRSAKKCREKFENVDKYYKRTKDGRAGRGDGKAYRFFSELEALHGAAPAVASLARRPVAMAPAPPPPVTALVGASTGMAPTALHAEPPPMPQPAAPAPTGTGTGTGTGSVTATIAPPAGAAASDAAAAAACMMTPGDVSFSSGSDGEDTDETGGGSGKRKRDGGEDEDGFGGSISSKMMRFFEGLMRQVMERQEEMQRRFIEAIERREQDRMIREEAWRRQEVARLAREQDALAQERAMAVSRDAAVVSFIQRVTGQNIPMPVPSPVAPPPAFITALTHAPPLQPTPVASAAPAAPAPAQAQHQPPPPAHQLSPKKPQTVMPLTPQAPQQPQVQPRQAPSPSPSPATHPQGNKEIVVRAPPPAESQDTAGFGGGAPSPSRWPKAEVHALIQLRTEMETRYQDSGPKGPLWEDISSGMRRLGYNRSAKRCKEKWENINKYFKKVKESNKKRPEDSKTCPYYHQLDALYRSKALASSSSGPGAAPALPPPPPPPQRPDQQAAAAAPPVTVVLAPVPLSQTGPHGNGNGNGNGCAGRGSSDNGGGGSGGMQKQQASNGGVAAARFSAVDGAGGNGVATNKREEGIVRKEEAVAAETRPQPVSMNDSYVDSDSSMDDDEEDDFYDDDDEGDVGDGGNNKMQYEIQFQQQHQHVQPQQQQNQSGGGVRPNASGSAGAGAGPAATTSGSFLTMVHH

SEQ ID NO: 60760 - protein, 44 aa, Zea mays
  Coding DNA Sequence Number=SeqID_18981
MACADSTTRCQRSRTVRSSIVIEEWMGADTGTGRGATTRHADEA

SEQ ID NO: 60761 - protein, 244 aa, Zea mays
  Coding DNA Sequence Number=SeqID_18982
MTVTESLRVFGQALDKESTFAEYLAHSHLAKKVLWDPFEVPVSSTQSRSRWVEVVFMPSFVWLLDLLLLPMPAVEDVSSVMDAFEVVLHRGAAVLSTKLWRFPYITFACGSPGSGMDRRIMADVDMFYVGLRKYYVVEFLHEGIKLLLLLAEGVIVIQWGIATKQAHFDTSSTLELALVELHLELSSSVALRQWCAVLDVASPPCSWWSVRVMRPWCWACRGGEDELASDGGEEVEGVERDAAP

SEQ ID NO: 60762 - protein, 99 aa, Zea mays
  Coding DNA Sequence Number=SeqID_18983
MDESLARSCYARELWRFSSFHRLCAWPSWALRDNRGQGNRSPQRRTQYAGRRSWSAAAPTQEQNAGSSGAWSGRREQWSGRRLGARCVAKAWRGSGSMA

SEQ ID NO: 60763 - protein, 426 aa, Zea mays
  Coding DNA Sequence Number=SeqID_18984
  Gene Ontology: Mol. function=RNA-directed DNA polymerase activity; Cellular component=mitochondrion; Biological process=RNA-dependent DNA replication
  Homolog annotation: Hit_ID=UPI00004C1733; Match level="QueryCoverage =71%, HitCoverage=26%, E-value=1e-145, Identity=76%"; Hit description= UPI00004C1733 related cluster
  Pfam annotation: Domain name=RnaseH; Domain location=37-164; Score =8.1; E_value=1e-05; Accession=PF00075.14; Description=RNase H
  Pfam annotation: Domain name=rve; Domain location=204-362; Score =49.4; E_value=1.2e-11; Accession=PF00665.16; Description=Integrase core domain
  Pfam module annotation: Pfam domain module=RnaseH::rve; Domain location=37-164::204-362
MGETISFAPQKAIKSQVLADFVAEWVDTQLPTAPIQPELWTMFFDGSLMKTGAGAGLLFVSPLGKHLRYVLRLHFPASNNVAEYEALVNGLWIAIELGARRLDARGDSQLVIDQVMKNSHCRDPKMEAYCDEVRRLEDKFYGLELNHIARRYNETADELAKIASGRTTVPPDVFSRDLHQPSVKIDGTPEPEAPSAQPEVPSAQSEAPSAQPEAPSVQPEKAPGGYTHLLVAIDKFSKWIEVRPLNSIRSEQAVAFFTNIIHRFGVPNSIITDNGTQFTGRKFLGFCEDHHIRVDWAAVAHPMSNGAKYGSPRTRAYTDQSNQASREDSLDQLEEAQDKALQHSARHQQSLRRYHTRGVRSRDLQVGDLVLRLRQDARGRHKLTPPWEGPFVIAKVLKPGMYKLANSQGEVYGNAWNIQQLRRFYP

SEQ ID NO: 60764 - protein, 356 aa, Zea mays
  Coding DNA Sequence Number=SeqID_18985
  Homolog annotation: Hit_ID=UPI0000162EED; Match level="QueryCoverage =33%, HitCoverage=25%, E-value=1e-37, Identity=71%"; Hit description =transcription factor
  Pfam annotation: Domain name=HLH; Domain location=246-284; Score=1.9; E_value=0.09; Accession=PF00010.16; Description=Helix-loop-helix DNA -binding domain
MPPPLVNGQQHDGHNKIKEWDRPLTANNSSRSSCASTAMACRDVVLDGGGGGGLPAMAAVAADLDDGTVLPASVNVPRTTTTRQRPFPAAPPPLPGDAFEILASSRLCKTLLLSQASSSVLLHNGTTMPLLRSEHVPYGPPAPAHPQGPSIGNYKQLMILILQCLRTQACVLAASLVHALSLSDEILAEAKCMQMGASCGGRAQHEAACQSMAAAAARPALPVVPSSKKPRVEQRSSTIVPSFKVRKEKLGDRIAALQQLVSPFGKTDTASVLMEAIGYIKFLQDQVETLSRPYLKSSRSKKPRPTPRGSSNASAGELEETRPDLRSRGLCLVPLSCTSYVTNENGVWVPPNFRAN

SEQ ID NO: 60765 - protein, 162 aa, Zea mays
  Coding DNA Sequence Number=SeqID_18986
  Gene Ontology: Mol. function=iron-sulfur cluster binding; Cellular component=mitochondrion; Biological process=telomere maintenance
  Homolog annotation: Hit_ID=Q657Z2; Match level="QueryCoverage=88%, HitCoverage=81%, E-value=3e-42, Identity=63%"; Hit description=IscA -like
  Pfam annotation: Domain name=Fe-S_biosyn; Domain location=19-140; Score=85.4; E_value=1.8e-22; Accession=PF01521.11; Description=Iron -sulphur cluster biosynthesis
  Subcellular localization annotation: CTP_CleavageSite=42; ConfidenceScore=5.02e-01
MSSSVLRAAADRAIRRQALTLTNAAVSRIRQLLSLRQRPYLRLGVKARGCNGLSYTLNYAANRSRRRDGCSLLEDAATENRNGRRIRLDFPKDEKGKFDELVEEKGVKVLIDPKALMHVIGTKMDYVDDPLKSEFVFINPNSKGQCGCGESFMTTGSKGSTS

SEQ ID NO: 60766 - protein, 173 aa, Zea mays
  Coding DNA Sequence Number=SeqID_18987
MPGFSLHCSISTLQRQICARAGLPLLQPAVQDINSYDKLCDLDVMSCIYLYDIIFIISVFLSHKIHLSNFHQIPFRMSAECHLDDLLFDSKYVCGLEDENIVIVEPQVPVVVLNQLAAEDQGVNNEKRTLPDTCMFQLQVGDCHQGLHPTHTKLQTEIRRQRLKIESVGFQAF

SEQ ID NO: 60767 - protein, 96 aa, Zea mays
  Coding DNA Sequence Number=SeqID_18988
  Homolog annotation: Hit_ID=Q6Z3H8; Match level="QueryCoverage=76%, HitCoverage=7%, E-value=1e-17, Identity=63%"; Hit description =Putative bzip-related transcription factor
MRNMAQIGAKAGSDGEQSMRKALEAQNKKLVLISNQGSVSLSAQALHERGPGAEAGSLQIGLRNIFEAMENFTSASANTYRELHLCAEEAMENFLL

SEQ ID NO: 60768 - protein, 42 aa, Zea mays
  Coding DNA Sequence Number=SeqID_18989
MAGRIELAGAKERGLAGEEIWSQEIRSVSLPKPEANPRFCRV

SEQ ID NO: 60769 - protein, 169 aa, Zea mays
  Coding DNA Sequence Number=SeqID_18990
MASASRCSSQALTPSARWMGEKLDDKVVILDSHHAARNFGLRIVCPKARGPGPGVLGLCSRLLSHGCLTYSCSRCQLLMMCQASCMSSRRSSMGTRVLADWEGCAPYSRMRSCVDRSCSYPWATTDQFRLVAPWLSPLSCEGVDTSPLPLVRQARGWTEASWLSWPCSV

SEQ ID NO: 60770 - protein, 143 aa, Zea mays
  Coding DNA Sequence Number=SeqID_18991
MHSEKKKKEESCITFGSLDFFATATGELRLTNLDMPVTTSARPTCSTRSKVKKRRLKRCVAALKRCLSRLAASIKQQAEGASPSTLVVVISHQPTSILNLIEEYSSHDSIEPDSDTDEVAERVCFMATPPQKDNGGGDEDSPN

SEQ ID NO: 60771 - protein, 238 aa, Zea mays
  Coding DNA Sequence Number=SeqID_18992
  Gene Ontology: Mol. function=methionyl aminopeptidase activity; Biological process=proteolysis
  Homolog annotation: Hit_ID=A0EVX1; Match level="QueryCoverage=48%, HitCoverage=38%, E-value=5e-34, Identity=57%"; Hit description=Cold -induced cell cycle-related nuclear protein
MEGVLSHQLKQSVIDGNKVVLSVSNADTKVDDAEFEENEVYAIDIVTSTGEGKLSKDWVKHIQQEWKVVVVYDCKIVEGVLSHQLKQPVIDGNKVVLSVSNADTKVDGAEFEENEVYALDIVTSTGEGKLMDCNRASEEKRARLGLVECMNHELLQLYPGLHEKPGVFRTLAITEISKVGLNNIYLGEPYLTVPYRGELHHLYCLAAFMSRAWIPGSSHALMLMQLPTPQEYASFYIP

SEQ ID NO: 60772 - protein, 44 aa, Zea mays
  Coding DNA Sequence Number=SeqID_18993
METMNELSGLDQNAPSEEEQRLLAKSMRHAMKTGTLFCISIAIS

SEQ ID NO: 60773 - protein, 388 aa, Zea mays
  Coding DNA Sequence Number=SeqID_18994
MMLASPHGFGVGAGALHLQRLGAATAPAGVESADDAVMPPAPPPLLFRALASLNLLLLVGYLLLVLLAKLFARLHHRRAAAEDRASSGWYDGRRCDHRRRRAEATATDDEEYAAADTVEGQQPDALFWFDEAVFEDSAALLMLGDEGKDHHLYAAASTRCLQQVESTSTFPAEESARISPRTESPSPSSIDAERMQRAQEEEEAKGIVAVQHAPTTTVVLEPEQRRNKQQESDGGEDGRRDADADRAEHEEEAAPPPQGGRFPQGCHDVRLFVNSRALADTRKLLLEGVVAGGGAHGRLQDESGKDRNGGDSSRFGASSTLTSESTSKSSVEWQSSTLTKDSETEYPFSSSSRRSSARWESYTLFRKYDEDMVYFHRVGAQKLTETGT

SEQ ID NO: 60774 - protein, 146 aa, Zea mays
  Coding DNA Sequence Number=SeqID_18995
MPKLSPIKLRHSDMTQDEDQKVWKVKVIIIIETTKHVTLTIYELSSKRESTEVDQQTRAKLGNPLALAMDPLSDRSTINLSLGFALCYLMSITKDQVKDLGDNEMALVINRSKQFCDNHKSPMHCVEKNGYFNYEDTNHFIASFLK

SEQ ID NO: 60775 - protein, 149 aa, Zea mays
  Coding DNA Sequence Number=SeqID_18996
MSPHALLPVGSRIHDPQYDRTRIPSEPQDVDLTVTNFESRPKHPTIRSYINGPNLPAPRSNLNRTFTIQGPSALFPLLQPLPAAMSRTAVELGRSWPNPTPRRAQTPIRRMLRKAVMTANMAKGILPAKTSQRSRATARAGSTTGQQVW

SEQ ID NO: 60776 - protein, 67 aa, Zea mays
  Coding DNA Sequence Number=SeqID_18997
MSGSSTLCMPPFNYKRGGVEEGGHGGIGGAATPAREVGAPTGQSDLSANELAIEHSIVRGVRQTNWQ

SEQ ID NO: 60777 - protein, 753 aa, Zea mays
  Coding DNA Sequence Number=SeqID_18998
  Gene Ontology: Mol. function=protein serine/threonine kinase activity; Cellular component=membrane; Biological process=protein amino acid phosphorylation
  Homolog annotation: Hit_ID=Q6H7J9; Match level="QueryCoverage=94%, HitCoverage=87%, E-value=0.0, Identity=53%"; Hit description =Putative wall-associated kinase 4
  Pfam annotation: Domain name=Pkinase; Domain location=480-743; Score =117.6; E_value=3.5e-32; Accession=PF00069.15; Description=Protein kinase domain
  Pfam annotation: Domain name=Pkinase_Tyr; Domain location=480-727; Score=57.6; E_value=5.3e-16; Accession=PF07714.7; Description =Protein tyrosine kinase
  Pfam module annotation: Pfam domain module=Pkinase::Pkinase_Tyr; Domain location=480-743::480-727
MCSTAVLLVRTCVVLVCLAALARAPAKVHAASGTGDGLLAIPTNASLSHCPSWCGDVQISYPFGDRAGLLPSRLRAHLRSNSSFSQALLRVAEQLDPAVGFNVTMSAGVDTYTKSWEAPTATGVSFYADHNFLYTVGCGVYVYVFGDNMTDIIGYCTSICTDNREIMESVGACEGLGCCSILMRGGQGFTLKLGRLNSTIPQFGEALSSVKIIFSEYYEFVTDDVYASWVNTSNVHGIVLDIAITDQPSCASARSQENKDTYACTSESICDDVQGGYSCVCPGQIEGNPYIKDGCIAYYNPEAPSIRNCTRLCGNISVPFPFGIEEGCYANDNLRLNCTINDTTLILDRGYAQYCVTNLSLDDGLLMVTNMLNATSFNNMERVVITNYDGYYQNGFYSTDEDVVDGIVIGLVCGLGSISFALGAIVLTGKWKKGIQRRIRREYFKKNQGLLLEQLISNENATNKTKIFTLDELEEATNKFDATRVLGHGGHGTVYKGILADQRVVAIKKSKIVEQIEIDQFINEVAILSQIIHRNVVKLFGCCLEDEVPLLVYEFISNGTLYDILHENIATKCLFSWDDRIRIATEASGALAYLHSAAAIPIFHRDVKSSNILLDDNFTVKVSDFGASRSLSLDETHVVTIVQGTFGYLDPEYYYTGSLTEKSDVYSFGVILVELLTRKKPIFINESSAKQNLSHYFIEGLQEGALMEIIDSQVVEEADQEEINDILIFYRSALRIARRAVFFPRESTNEIAM

SEQ ID NO: 60778 - protein, 218 aa, Zea mays
  Coding DNA Sequence Number=SeqID_18999
  Gene Ontology: Cellular component=chloroplast thylakoid membrane
  Homolog annotation: Hit_ID=Q6EPY8; Match level="QueryCoverage=76%, HitCoverage=61%, E-value=1e-39, Identity=56%"; Hit description=SOUL heme-binding protein-like
  Subcellular localization annotation: CTP_CleavageSite=74; ConfidenceScore=5.36e-01
MGTQALMLNTRWKVFRGDSSRQRDLMFSIVKPSMIQLRGNQMATSPLCSASPRLLRALGQPPRDVHSPRTVVVAAGTRVSRVEARASLVLALASHALSASQRRFAEHTDEASKYAFPSGRFEPRTLEEALMSVPDLETVLFRILKCEAEYEIREVEIWVHFNGSSQSFNVLASYLFDKNTASEQMEMTTPIFTRKGELNSQSMDMTTPVITKKVTSLS

SEQ ID NO: 60779 - protein, 450 aa, Zea mays
  Coding DNA Sequence Number=SeqID_19000
  Gene Ontology: Mol. function=dihydrolipoyllysine-residue acetyltransferase activity; Cellular component=pyruvate dehydrogenase complex; Biological process=metabolic process
  Homolog annotation: Hit_ID=Q0WQF7; Match level="QueryCoverage=47%, HitCoverage=53%, E-value=8e-50, Identity=43%"; Hit description =Dihydrolipoyllysine-residue acetyltransferase component 1 of pyruvate dehydrogenase ...
  Homolog annotation: Hit description=complex, mitochondrial precursor
  Pfam annotation: Domain name=Biotin_lipoyl; Domain location=57-126; Score=45.2; E_value=2.2e-10; Accession=PF00364.12; Description =Biotin-requiring enzyme
  Pfam annotation: Domain name=E3_binding; Domain location=174-210; Score=53.0; E_value=1e-12; Accession=PF02817.7; Description=e3 binding domain
  Pfam module annotation: Pfam domain module=Biotin_lipoyl::E3_binding; Domain location=57-126::174-210
MANIRALLVGLSRARGSLAEAGRCASTRPSILASLGAHYKIPMPARWFSSTGLPPHLVVGMPALSPTMYSDTVFIRIKIEVGDVICEIETDKATLEFESLEEGYLAKILAPEGSKDVQVGQPIAVTVEDVEDIKSIPADTSFGGETKGRAINRKCTAKTKVVNVSEQSSTVSRISPAAKLLIKEHGLDTSSLRASGPRGTLLKGDVLAALKSGINSSSTKEKKSPAQPSSQPTRDSQSQASSISQKDDTYEDIPNSQIRKDIFALNVEDPCQGGRRQRTRLHRSGWPRLRQSTGGIDRSGRESHDSDGSSHEDNDPTKGTTDLAEKVAGATDPAVAATKKVWAAGWVQLDRGLRWAWQGEVDRARRAAGAGSGEEGGGAPLVGGGVDPGRWRVALAPRRRLRADPVSGGGHNTVRAGEVRVMADRPGGGGGVDSGGSASGGADSGGQPRP

SEQ ID NO: 60780 - protein, 114 aa, Zea mays
  Coding DNA Sequence Number=SeqID_19001
  Subcellular localization annotation: CTP_CleavageSite=44; ConfidenceScore=5.26e-01
MAPGRAQGGSGDMVNMVMGIATTQRHQRTTVRSGAARLRRNYIPASNRAQPRIEKGKIRGGEGCYNPMVTRRAAGVLWPIDRFILGMTTSPAFSPKPSSAHGALADPNWRRAME

SEQ ID NO: 60781 - protein, 251 aa, Zea mays
  Coding DNA Sequence Number=SeqID_19002
  Pfam annotation: Domain name=DUF1639; Domain location=170-218; Score =63.0; E_value=9.8e-16; Accession=PF07797.4; Description=Protein of unknown function (DUF1639)
  Subcellular localization annotation: CTP_CleavageSite=65; ConfidenceScore=5.17e-01
MNQEAKDSRPSRSPSEPNLFLQWGSRKRLRCVKTRDDGSPSPSPSEGLRRAIPRATRPLLGADIAAFRRPSTFNRRCSFTALFSLPTTTTIYMSKCPEPQRPLIHYAKCLSVSRKSDSLVNEYRHSMALSLEKDKYYTTRGSPFDGNGFDFGSIAEEKGTTALPRFFVALSNKEKEEDFMAMKGCKLPQRPKKRPKLMQKCLLVMLTPLIQSVSFHFHCYDHAHPFDPAFCFISGRTIDGEPRSLVIRFVA

SEQ ID NO: 60782 - protein, 291 aa, Zea mays
  Coding DNA Sequence Number=SeqID_19003
  Homolog annotation: Hit_ID=Q6Z8L0; Match level="QueryCoverage=24%, HitCoverage=18%, E-value=4e-27, Identity=81%"; Hit description =Mitochondrial transcription termination factor-like
MAHAGPPPRRRSTAALPHGVALTDPARKVPRILVASEERLRRNAEFLLNEVGLPPQYIVRRSVLLMYSLERRIVPRHLVLMVLKEKGLVEQDRCFFNVVLNEAALLFVNCDGLMMNLLSYFLWCMNLHGLLADECKDKKREENKKERKCPCGHAIVGGSDFCREQCSNGMYMRKLDMDTVLLGAQKSSAAAAAAHMSILTCVVWWHRRPQATCVRVKGSRKVLQQSLWTRRLQAAWQTCLAVDDDAVAVAVALSHSGGAEHMPGREGSSVHGSGLWQAAPILACWLASSIQ

SEQ ID NO: 60783 - protein, 157 aa, Zea mays
  Coding DNA Sequence Number=SeqID_19004
  Subcellular localization annotation: CTP_CleavageSite=52; ConfidenceScore=5.72e-01
MAHPPALPAHATASTVAGDVRRHPPSPTRHPARHVRLPPATPKERRGPRRPRAMPGSRSSTRAACVTVMVTVTESRRPPPHRPPTVQPDRPGGVGSGRTHAQSGRGFCQSRRRYPSGHRVGERQRLNTVTSRLQASTPRQTDIFYQRARGVRSSPRG

SEQ ID NO: 60784 - protein, 176 aa, Zea mays
  Coding DNA Sequence Number=SeqID_19005
  Gene Ontology: Mol. function=dihydrolipoyllysine-residue acetyltransferase activity; Cellular component=pyruvate dehydrogenase complex; Biological process=metabolic process
  Homolog annotation: Hit_ID=Q0WQF7; Match level="QueryCoverage=99%, HitCoverage=34%, E-value=3e-63, Identity=60%"; Hit description =Dihydrolipoyllysine-residue acetyltransferase component 1 of pyruvate dehydrogenase ...
  Homolog annotation: Hit description=complex, mitochondrial precursor
  Pfam annotation: Domain name=2-oxoacid_dh; Domain location=1-176; Score=158.0; E_value=2.5e-44; Accession=PF00198.13; Description=2 -oxoacid dehydrogenases acyltransferase (catalytic domain)
VIAKRLLESKQTTPHLYLSKDVVLDPLLAFRNELKELHGIKVSVNDIIIKAVAIALRNVPEANAYWNNDKEETQKCDSVDISIAVATEKGLMTPIIRNADQKTISAISAESGILAVGRGNKVVEPVVDSDGTEKAAAVTKMSLTLSADHRVFDGQVGGKFFTELALNFSDIRRLLL

SEQ ID NO: 60785 - protein, 108 aa, Zea mays
  Coding DNA Sequence Number=SeqID_19006
MACGSLESKISPLLSQAVAVRLTPRSAIVNSFSSSISLEEEDGGGEGVDESHAHGRVAPSANEEARHVRGCETRYLNSNFKYKCLYRNDTIMRPGYGIFGYGSISRDI

SEQ ID NO: 60786 - protein, 110 aa, Zea mays
  Coding DNA Sequence Number=SeqID_19007
MANNTSTEVISRGPEKRMAVDSRYTSLVAAVFVPGKGVRERVAEGEKVAALSFYMRTDTRSTRTDARIAMVSAECGMVVEDGSDVLAPHSSDTARERKQWKELTGGPAWQ

SEQ ID NO: 60787 - protein, 107 aa, Zea mays
  Coding DNA Sequence Number=SeqID_19008
MAGGSGHGVLLAGGELGHVQSREGEGDAAAGRKMNREGTGKISGRPWELLPLLCVVARPWEESAGLDAMEGSRGAQPQGEEGGDHRAPWNKESSAMGEACLGACVPA

SEQ ID NO: 60788 - protein, 73 aa, Zea mays
  Coding DNA Sequence Number=SeqID_19009
MAWSGGHASNGATVPSGRRQHVLIQAGLDRGHEKSWPWDRDHVAMVGYRFEGESGLIVDVQVRSCGSDPIVVQ

SEQ ID NO: 60789 - protein, 90 aa, Zea mays
  Coding DNA Sequence Number=SeqID_19010
GLFLRVNPWPGKRLLGKLKDKKAEYEAMLLVIVLFILKTLITRLLLKFWVLKGMVEFDFKDLLLAQPNILDPAPTNTWLRGVRLKLKFRG

SEQ ID NO: 60790 - protein, 331 aa, Zea mays
  Coding DNA Sequence Number=SeqID_19011
  Gene Ontology: Mol. function=O-methyltransferase activity; Biological process=lignin biosynthetic process
  Homolog annotation: Hit_ID=Q8L5K8; Match level="QueryCoverage=97%, HitCoverage=86%, E-value=1e-100, Identity=57%"; Hit description =Orcinol O-methyltransferase
  Pfam annotation: Domain name=Dimerisation; Domain location=7-56; Score=54.1; E_value=4.7e-13; Accession=PF08100.2; Description =Dimerisation domain
  Pfam annotation: Domain name=Methyltransf_2; Domain location=63-317; Score=266.8; E_value=4.2e-77; Accession=PF00891.8; Description=O -methyltransferase
  Pfam module annotation: Pfam domain module=Dimerisation::Methyltransf_ 2; Domain location=7-56::63-317
MPIKTSSHLETCFQLCILDIIQNHGKPMTITELVVALPMLNPTKACDIYRIMRILVHSGIFARQKLYNDAQEEGYVLTNSSRILLKDNPFCITPTLNATMDPVITKPWSFLSTWFQNDDHTPFATTYEETLWDYFAHDPQLQDLINDGLASDSQLVTNVFIDKCKEAFEGLISLVDVGGGTGTTAKAIADTFPDMVSTVFDLPNIVAGLQGSKNLKYVGGNMFEAFPTGDAILLKKALHDWDDEGCLKILKRCKEAVSSQDKVGRKLIIIDMVVRENEKVNDEASTLTKTQLFFDMLMLVLVAGKERQQEEWAKLFSAAGFRSYKITPIVS

SEQ ID NO: 60791 - protein, 117 aa, Zea mays
  Coding DNA Sequence Number=SeqID_19012
  Gene Ontology: Mol. function=nucleic acid binding
  Homolog annotation: Hit_ID=Q94GP3; Match level="QueryCoverage=73%, HitCoverage=11%, E-value=1e-23, Identity=67%"; Hit description =Putative mitochondrial RNA helicase
MKAPNNVPCNLITGQERNEIEGAKHSSVTVEMADMTTNYQCAVIDEIQVLKVTVIYRLPGCDIRYVCKYLQIMVGCKSRGYSFTRALLGLCSVMGIFFNGLCNCKNMSRLAYDRCYN

SEQ ID NO: 60792 - protein, 70 aa, Zea mays
  Coding DNA Sequence Number=SeqID_19013
MGGAVGQGSTAGSYRGKGHRGAGEGRSRDHKVASQAGEHGKDTKARRNTIWNVMLPECLFKLCPSDEMTF

SEQ ID NO: 60793 - protein, 66 aa, Zea mays
  Coding DNA Sequence Number=SeqID_19014
MNQPHRGRNLFIGNLADEGTDTEMADDITKPENGIRRSLCHEMRSQRDIQWPPNFKVSNVDKYEPK

SEQ ID NO: 60794 - protein, 129 aa, Zea mays
  Coding DNA Sequence Number=SeqID_19015
MGGAGKKHHGAVLGRAIREKGDELVGWAPETRARSSARVHGREFTTRAGRTGGSIARREIGWGVGGRDWRSTREGEAAGSAAPLAELEEGPGRRIAVLEKKIRKIERWLQRSEYVGGKISTGWAAGFFV

SEQ ID NO: 60795 - protein, 87 aa, Zea mays
  Coding DNA Sequence Number=SeqID_19016
MASAMSQKRGGAPNRTLTLYSIYAVQVHAMKALVVKRTHPGTEAKHIREINSLLIIYNLGITNQSKVTVAVCSLAPDSPMALLHSAT

SEQ ID NO: 60796 - protein, 134 aa, Zea mays
  Coding DNA Sequence Number=SeqID_19017
MARSAESWCRVAVAVAGRQGVARGWRRVGSSGWGQGGDALGSVGSGWGGLSRRCLVQLQVKERRGRGRLLACLASWRPTARNRVKQGEKKREREPDGRERWVGGEKVQRAAAAGLGPGGGGLGLGEAGARLVGP

SEQ ID NO: 60797 - protein, 1681 aa, Zea mays
  Coding DNA Sequence Number=SeqID_19018
  Homolog annotation: Hit_ID=Q2QNG5; Match level="QueryCoverage=97%, HitCoverage=96%, E-value=0.0, Identity=63%"; Hit description =Expressed protein
  Pfam annotation: Domain name=DUF1740; Domain location=979-1189; Score= -67.2; E_value=0.0012; Accession=PF08424.1; Description=Protein of unknown function (DUF1740)
  Subcellular localization annotation: CTP_CleavageSite=35; ConfidenceScore=5.40e-01
MTGSKPAPAASQNPSAVPHRRPPPPPPPPPPPPVTAVARVREEGELSSGADDDETLQTQLGAASILGKFVEAGSQVPSASLLGKGSNTLIVSNALNHKASAPSYKKIMRVNQGQFKPGTNRNLSWQKPVSSDNLLITFSDDDSGADSGKTGRDKVRKASSQGTQRTGNSMQTRIMREEVSQQKNLGSKVGPAHLPAFPFTHRNVGAGRASGNTFFRKELPVRQVNPLKSKQKVQNGVGVHSEDHRLEILRHKIAAKENELKGQKRPLSAVATKNADFSSNQPRLPSEKIRLEASSIGEYSRFNSLSEHSGGPNKRLKLNQQYNQFCSDLTPLAPIGSISGKTNVQSSEVTNRSENGITMNLNVNETDTTDTTELADQIQQGGATKSLRHHKDSGGAENHVMLESHDGLAAQPPFTDTQTIPEDTSALAPVTSAQARQQVLAVGTSPVLDGTPQLQPGKENDECLNSSGQIGVETQNTILFSLLEMEELQDKELEDAQEHRQKCEAEEREALRAYRKAQRALLEANERCAILRRKREICSSQVHGLIAENSSLVQSLSIRNPEDGLAMPSLLNSQIHAVSQIPENQGGRHRLCPEEPSQQQIDKHEDEARPHYCDKLAASTADPSSVSAVNADSILSDYMEDDLLFPTRQARSECALDVENQMEETIHVYAEENRQVSGDGGEDYELLEASLRSRLVERFGKKSCLNGTIDEGTEGLAVGKVAAEHGKQSAYVGHQLQEAEQNIMTTTLEGTMELENDGAEKTVGLSNSCSGPSMGNCDPEDNISSLKELCMPLVMDSLIFPSSAPLNAARQIKRAFPGICKELSDYKNDHLTSDAVSEVTGSVQDMIHDLVGENMKMLPTTQNDNNMVHSVIDPFWPFCMFELRGKCNDEECQWQHFEHHDWRKLELTKHSMISVSGQIPYGLSQYILPVPVYRVGSNLIKADLNLTQSVLASSLWQYWQRGFCASFPLPLSVQRVLPSDAPFFQAGDGRIADFDRNRQLLKFRMLDSRKNKIVQGSVDIEFFLEAALDLYCGKVNKPDRIKALSFLARSIEADPSTVILWVFYLHIYYQKDEGLGKDDMFSDAVQHNVYSYELWLMYINSRLRVDDRLDAYNDALSMLCQMTAETDKDLQERSAFILDIFLQMIYFLCMSGNIDKAVSRIIGILPTAMPDNSGDKLLADVISCLTMSDRCIFWISCLYVLIYRNLPEEIIDQLEFQKALPRALIWPSIDPSVDNRDKITDLLNFAACKMAEDISECVKNGDPSYLMLSQFLAVNHISCLAAIGGLKSSVDMLVTYMKEYPMCPQILLISARLDRKHGTCPGLKSFDELILNWPKEAQGIQYMWNQYVEHALATDAELAEKVLTCWFEEHGKDCDIQSNAAICIELSSEEPGTSSLVSPQAVGSGPSISEDLVFRLLNLSLYKILENNLQEAQMAASKALKLAHGEWYEHCIREHAAIHALELEKSSSSTDAQTRATFSLIIGYLADHCNLPTRELLSRRFCQNIKKHRLRQLIDDTIGSVPADSSLINSVLEVCFGPSLLPKSISDVKYLVDFVETVMEALPANYRLGLAVGGFVAKHFTGYGAASTGTRFWASSVLINAIFRAVPVAPESVWLEGAGLLEKLHATEILKRFYQQAASVYPFSFKLWHAHLNYCKASGSNTESILESARQRGIELNLTPT

SEQ ID NO: 60798 - protein, 122 aa, Zea mays
  Coding DNA Sequence Number=SeqID_19019
  Subcellular localization annotation: CTP_CleavageSite=71; ConfidenceScore=5.39e-01
MAAALRGGPTVAAALGRGGLGQGGLGGRAASGRAATLKRRRCSARAPLGQAAAQAGRLGRGRPAGSGGAARAGSASPAALGQGRLGRRSGSVAVEQGRRSGRDCANGEEMSPARLWPGSKKD

SEQ ID NO: 60799 - protein, 57 aa, Zea mays
  Coding DNA Sequence Number=SeqID_19020
MAKLEFTGTCGSCGSEQLGVSTTGVNRISRRCWEAPRVHLQPWSSGCASSLRVSVLA

SEQ ID NO: 60800 - protein, 277 aa, Zea mays
  Coding DNA Sequence Number=SeqID_19021
MCRYSNTRVRQQRQMEVVAEEMGMDRLYVMDGSFGSTISAKAVVAVMCRYSYTRVRQQRQMEVVAAEMGMDRLYVMDGSFCSTISGMNVDEQGGFDWQGTARYKLRRGSTDYDGERRRDGARGWRARAREGVLRGRGFYRRRGRGRGGQGREMRPGLHGAIDGSVSSMEESNGGVTAPLKMRNGHGRRVRAGHGSVGLPGVGAQRVGSRGCLVRSCSAASGSAQVGVLACWVRMLQGRGGRGVGVAAPWVGARFRSSWAQAGPRPVKGVGVAEVGLR

SEQ ID NO: 60801 - protein, 54 aa, Zea mays
  Coding DNA Sequence Number=SeqID_19022
  Homolog annotation: Hit_ID=Q7XE25; Match level="QueryCoverage=67%, HitCoverage=11%, E-value=5e-08, Identity=69%"; Hit description=Heavy metal-associated domain containing protein, expressed
MAGKGDGPKEPKEETVTLKIQLHCDGCMDCIKRRICKIKDLSLYVRFSLGTEIR

SEQ ID NO: 60802 - protein, 276 aa, Zea mays
  Coding DNA Sequence Number=SeqID_19023
  Gene Ontology: Mol. function=protein binding; Cellular component =spliceosome; Biological process=mRNA processing
  Homolog annotation: Hit_ID=UPI0000DA43ED; Match level="QueryCoverage =83%, HitCoverage=99%, E-value=5e-24, Identity=29%"; Hit description =PREDICTED: similar to keratinocytes proline-rich protein
MGEVEAPPKSRSSLSSKAEVESEPLGRARRRPWAEAWAESEPWGRAKRSSSPSEAEPESQPWGQAKRSSSSSGAEPKSEPWGRAKRSSSSSAAEPESEPWGQAKRSSSSSGAEPESEPWGRAKRSSSSSGAEPESEPWGRVKRSSSSSGAEPESEPWGRAKRSSSSSGAEPESEPWGRAKRSSSSSGAEPESEPWGRAKRSSSSSGAEPESEPWGRAKRSFLWRLRLDLAAISLTLSSGTAVRAAQAALSSCQAGQWSGEVTTVTSALSTGGRVSG

SEQ ID NO: 60803 - protein, 138 aa, Zea mays
  Coding DNA Sequence Number=SeqID_19024
  Gene Ontology: Mol. function=protein serine/threonine kinase activity; Biological process=protein amino acid phosphorylation
  Homolog annotation: Hit_ID=Q9STK6; Match level="QueryCoverage=79%, HitCoverage=27%, E-value=4e-10, Identity=33%"; Hit description =Protein kinase-like protein
MPPTPPETETEPEFAEVDPTGRYGRVMPLFPSPDHPPRLRSLATPDVVLTHSALLQYTEVLGKGAFKTVYPSIPPGRFSHQGRCASTGLSNADIRALKKWSRQILSGLVYPHSHDPPAIHRDLKLVKIEDPWLSDYPG

SEQ ID NO: 60804 - protein, 621 aa, Zea mays
  Coding DNA Sequence Number=SeqID_19025
  Gene Ontology: Mol. function=protein-tyrosine kinase activity; Cellular component=integral to membrane; Biological process=protein amino acid phosphorylation
  Homolog annotation: Hit_ID=Q69UH7; Match level="QueryCoverage=94%, HitCoverage=93%, E-value=0.0, Identity=58%"; Hit description =Putative SERK1 protein
  Pfam annotation: Domain name=LRRNT_2; Domain location=25-68; Score =37.0; E_value=6.7e-08; Accession=PF08263.3; Description=Leucine rich repeat N-terminal domain
  Pfam annotation: Domain name=LRR_1; Domain location=120-142; Score =10.0; E_value=3.9; Accession=PF00560.23; Description=Leucine Rich Repeat
  Pfam annotation: Domain name=LRR_1; Domain location=144-163; Score =12.9; E_value=1.1; Accession=PF00560.23; Description=Leucine Rich Repeat
  Pfam annotation: Domain name=LRR_1; Domain location=96-118; Score =6.8; E_value=15; Accession=PF00560.23; Description=Leucine Rich Repeat
  Pfam annotation: Domain name=Pkinase; Domain location=352-617; Score =12.9; E_value=2.5e-09; Accession=PF00069.15; Description=Protein kinase domain
  Pfam annotation: Domain name=Pkinase_Tyr; Domain location=352-617; Score=30.4; E_value=2.4e-14; Accession=PF07714.7; Description =Protein tyrosine kinase
  Pfam module annotation: Pfam domain module=LRRNT_2::LRR_1::LRR_1::LRR_ 1::Pkinase::Pkinase_Tyr; Domain location=25-68::120-142::144-163::96 -118::352-617::352-617
MPSRSSLLPLLLLCAAAAAAAASSRNAELDALMELKAALDPAGRALASWARGGDPCGRGDYFEGVACDARGRVATISLQGKGLAGAVPPAVAMLPALTGLYLHYNALRGEIPRELAALPGLAELYLGVNNLSGPVPAELGRLGSLQVLQLGYNQLTGSIPTQLGLKKLNEGFLYENNPELCGAQFDSLKACPNDGNDDGRTPRKPESTSVIKPQQIQKAADLNRNCGDDGGCLKPSTLPTGAVVAGTFVIVAGAAACGLSAFSWHRRQKQKIGSSSVEHLEGRPSLDRSKEAYERSAVSSLINVEYSSGGWDTSSEGSQSQHGVARLSSAAECGSPSVRFNLEEVECATQYFSDVNLLGKSSFAATYKGVMRDGTAVAVKSISKSSCKSEEADFLRGLRALTSLRHENLVGLKGFCRSRASGGCFLVYEFMTNGSLSRYLDAKESDAADAAAVLDWPTRVSIIKGVAKGIEYLHSSKLAHQSISADKVLLDHLHAPRLSGAGLHRLLADDVVFAALKDSAAMGYLAPEYATTGRSTDKQGDVYAFGVVVLQVLAGRRAVSPPHLQQDGGGRLDDLVDPRLRGRFSRAEAAKLAGVALLCTAEAPAQRPAMAAVLQQLGTSS

SEQ ID NO: 60805 - protein, 352 aa, Zea mays
  Coding DNA Sequence Number=SeqID_19026
  Homolog annotation: Hit_ID=Q6ZJ59; Match level="QueryCoverage=94%, HitCoverage=92%, E-value=2e-68, Identity=48%"; Hit description =Putative glycine-rich protein
  Subcellular localization annotation: CTP_CleavageSite=87; ConfidenceScore=5.86e-01
MSGFFGGANPFDDPFFTNPFGGMMQPSFSTPFSGMMQPSFMNPFGSMMQPSLLGSSMFASHGNLNGGTFGSQTHLNQGMSNASGFIQQASESSRPKGPIIKELSSDDEDKPEDDKEDGKKNGNFRKHPRESREPCVEDPDEEEEEDNKRPKHRQFGRELSRSGTSRLQPQTFMFQSSTVTYGGPNGACYTSSTTRKTGANGFIPSPDPTRGSFGTGVKGRPGEVVRVVSLSTHVGASRTGSVLFCLYVGSKVIVGHSLTRNLNSDGRVNTLQTLHNLNEDELGGFEESWQRNARQNMPGWDTRMNMLGNGNLHTGFRDANQRPALPAPGRSRKANSSWNFQNGSSTGRAPRT

SEQ ID NO: 60806 - protein, 124 aa, Zea mays
  Coding DNA Sequence Number=SeqID_19027
  Gene Ontology: Cellular component=integral to membrane; Biological process=protein insertion into membrane
  Homolog annotation: Hit_ID=Q9FWB8; Match level="QueryCoverage=69%, HitCoverage=17%, E-value=2e-26, Identity=64%"; Hit description =Putative Oxa1 protein
MAPITTHSATAQPEGGVQDAVFCYWTSSNIFTLLYGLVIRRPAVRKWFDLPALENTRSLTAKPVFNMFGGSKAIPAAQSPVAIAGAQQSGLDQPDASALGYKVKNLEKKVKSRGKSRKHRGGRG

SEQ ID NO: 60807 - protein, 151 aa, Zea mays
  Coding DNA Sequence Number=SeqID_19028
MAVTRRRARAGVRAGWVVVGASVATGYRRRERGGLVAAARGPGGDGAGAVWRRLRRSGQLTWCRVEAAEKQRHLRGGQLLFFYFSLLLTRAPGVSSDLQIERQRTLRSGTKVVAHKVAAVRTNLCTCMAARSTSERKQLLLVDVSQSDRST

SEQ ID NO: 60808 - protein, 162 aa, Zea mays
  Coding DNA Sequence Number=SeqID_19029
MAAPRREARGSWRLRRPARGDLNTEDPRSSDPLLLSRLNRPRCGQYWGFWAREFCHRRGHDWPSSVKPSYTSGEHCVVSWRVAVVAPWGIIGGGAKNLSPEFLCRGGSAPRCRLVTAQHKSGGCAWANPANSAAAGWLHRWDGWPGVEDGSCAVDSALNGRD

SEQ ID NO: 60809 - protein, 36 aa, Zea mays
  Coding DNA Sequence Number=SeqID_19030
MTNVDASPKIVEILLTQGSVIQTIVVVRENEMVLGG

SEQ ID NO: 60810 - protein, 112 aa, Zea mays
  Coding DNA Sequence Number=SeqID_19031
  Subcellular localization annotation: CTP_CleavageSite=21; ConfidenceScore=5.12e-01
MPRPESTVDPAPTVPNPSPRRRSTVARNPSWRDGKRGGPGEARMRGWPPHGIRPIALMPSLLTQAEGDGAEEMDACWGLVLNRYESRIRQHKIINDNDLRPMKHYSLGDNAF

SEQ ID NO: 60811 - protein, 231 aa, Zea mays
  Coding DNA Sequence Number=SeqID_19032
  Subcellular localization annotation: CTP_CleavageSite=49; ConfidenceScore=5.56e-01
MPRMGPGHDSAQSWTATQGPQQRPTAPHGRVQSRHVSMKEGMLQVTNSSDQAVSQAAFLSVPLAGSAPVLRRALCSSSLTRCQEGFRCTLILCRLRILGRKEIALATSISCSKFYIRYVPRPTCRGSTPFCDWGRNERNKRPQSQRGNNGSCPVHPNSRHSVAECREIIELAKHVSEQREQSDGSPPRRRPSKERVDDDEVAAAEQDLGYQSPKGVLKDVFTRDSDSGDDN

SEQ ID NO: 60812 - protein, 149 aa, Zea mays
  Coding DNA Sequence Number=SeqID_19033
  Gene Ontology: Mol. function=heme oxygenase (decyclizing) activity; Biological process=inflorescence development
  Homolog annotation: Hit_ID=Q69XJ4; Match level="QueryCoverage=56%, HitCoverage=38%, E-value=1e-18, Identity=61%"; Hit description =Putative heme oxygenase 1
MTPATGEKDVDAPFTEEMRAAAMRLHSRDQARDGTKEAPLEPPVAKWQTTVEGCRVQGYWFGEIGAARQGSGMVQAARSRSSGTIWALLQICCNSSEGSVYNVHGHFSVLVYFDQATKHFRLAHYIRAPLSLVLSLSQAQAGPGNQTYP

SEQ ID NO: 60813 - protein, 191 aa, Zea mays
  Coding DNA Sequence Number=SeqID_19034
GVELEELSEGYCDAWSYSNFAGMVKATKPFAQKLCVVSPKRRSGSVPGMLGGLAYGCYLFVPAIGGRSSCNFLYPVFYSSSCGGLKPAMQGARGAVGDGGRGCGSWRDSPKGRFPSMVRRPVLALPGAMACGVRPQRVDDEAADQFWASSRVPIKALTPGYGGYGAGDDLGSRHNTAEGLAGLGCGTGRSR

SEQ ID NO: 60814 - protein, 141 aa, Zea mays
  Coding DNA Sequence Number=SeqID_19035
MCEDCVAAAAPEKVLLSSMGWCDLDERDLACACCSVALESGFYWSSHARHGSDCGHKQEEKAPRSNGRRWSEMRWMKRGEERHLEACVDGTLERQRDCGSEEARTGSTAAGIWLGCRPITHGEATQFMRVANDDGHIWTWK

SEQ ID NO: 60815 - protein, 97 aa, Zea mays
  Coding DNA Sequence Number=SeqID_19036
MELFVLVIAGLCLLPIIKVNKVAYCFVDILLWTLCFKWSSLTIPHVQKGIKEERPFLVEIYADDINPTTTIKGKHYIGSGTSVKRFHHMQVHVYDKS

SEQ ID NO: 60816 - protein, 354 aa, Zea mays
  Coding DNA Sequence Number=SeqID_19037
  Homolog annotation: Hit_ID=Q1SGC9; Match level="QueryCoverage=77%, HitCoverage=75%, E-value=6e-09, Identity=24%"; Hit description=HPr serine phosphorylation site
MAMAPRAGVLEEANPSRPSARREGVDQVPGRRPTAAARQGVDGVLGLPFLSGLAAGGDAKDLRFDLSTAFPSVPALRLSYRPNEPLQPFALSVRTGSPIRAPFALAAEFNLTSSNPPAFSLLFKPRIGDFAVASSVHSPPTPPPTSTPPPLAIKMVDLTTNSDDHDCEAHGNDLSFAENVFGANVAAATGTNGGGVGALLSGMRLTTRSVLPLWSKASLWFQWGLRVPPEIKATLADNGYGRKAGSLAISKLPLLVMNKITIEHTPKVPSQSEADKKRKKDTPPAAEDEEFSLMKRQLDKLNAESTMLRRAVEDLSAEIGAGKGNDRFVVNNNTSSLEKIAKGQFSPSLEPGGK

SEQ ID NO: 60817 - protein, 94 aa, Zea mays
  Coding DNA Sequence Number=SeqID_19038
  Subcellular localization annotation: CTP_CleavageSite=12; ConfidenceScore=5.35e-01
MAPFPPPLLLPQASSSPSSSCPWRQFCALPAQLHFPHGRELPIWPPSTPVLGPPSAASTNLRNDAGPQPRAPSIYTALVAIVSQHVGIELRELR

SEQ ID NO: 60818 - protein, 186 aa, Zea mays
  Coding DNA Sequence Number=SeqID_19039
MVDLTTNSDDHDCEAHGNDLSFAENVFGANVAAATGTNGGGVGALLSGMRLTTRSVLPLWSKASMWFQWGLRVPPEIKATLADNGYGRKAGSLAISKLPLLVMNKIIIEHTPKVPSQSEADKKRKKDTPPAAEDEEFSLMKRQLDKLNAESTMLRRAVEDLSAEIGAGKGNDRYPVLYKFSYFDLK

SEQ ID NO: 60819 - protein, 194 aa, Zea mays
  Coding DNA Sequence Number=SeqID_19040
MVPVGSTCAAAGPRRGGCNASRDAYNSATPRGEEGGQLWQDWAVVTEAAEACAPGTGYSPKPSELAGLAASAPCPRAIVKVSIPPSPLPSPPFPAPLPPPFFFLGTQQLDTGAQIPGPRASSQHGGQRVALAWLGLARAWHGARQSGLRGVASSAHGVASAARSAHGVASAGRAPCRALGAARGATGVQRDFGA

SEQ ID NO: 60820 - protein, 471 aa, Zea mays
  Coding DNA Sequence Number=SeqID_19041
  Gene Ontology: Biological process=response to jasmonic acid stimulus
  Homolog annotation: Hit_ID=Q2QWM9; Match level="QueryCoverage=99%, HitCoverage=99%, E-value=0.0, Identity=75%"; Hit description=VTC2, putative, expressed
MEMKLTIRRVPTVVSNYQEDADKPRAGCGRNCLGDCCLPASKLPLYAFKLTPAKGSQEDAASTKLLVDILLSEGIEEAKILYAFKLTPAKGSQEDAASTKLLVDILLSEWEDRMTRGLFRYDVTACETKVIPGNLGFVAQLNEGRHLKKRPTEFRVDRVLQPFDPAKFNFTKVGQEEVLFQFENSGGDDSYFLNNAPIIAVDRAPNVIAINVSPIEYGHVLLIPRVLDRLPQRIDPESFLLALQMAAEGGSPYFRLGYNSLGAFATINHLHFQAYYLSVPFPVEKAATHKIPLSEDTKKNGVTVSKLINYPVRGLVFEGGNTLDDLATVVSNACIWLQDNNVPYNVLISDCGKRVFLFPQCYAEKQALGEVSQELLDTQVNPAVWEISGHMVLKRRMDYEEASETSAWKLLAEVSLSEERFEEVKAYIFSAAGLVQYDEEEEEASDGEGPTAYVPVKVTPLPVAEGCLVLP

SEQ ID NO: 60821 - protein, 178 aa, Zea mays
  Coding DNA Sequence Number=SeqID_19042
  Gene Ontology: Mol. function=transcription regulator activity; Cellular component=nucleus; Biological process=regulation of transcription
  Homolog annotation: Hit_ID=Q8LSP3; Match level="QueryCoverage=98%, HitCoverage=38%, E-value=1e-25, Identity=46%"; Hit description =Putative bHLH transcription factor
MDELNKWRHLHPDPEDELAYMYRQQEEDHAGMQQQHHHFAERLPEQQQYYTPPPPAAAPPTSSSPFLPRLHHTSSFPGFGDPAVPPRLPFRPAKEEPGQPSSLSNRILSFGGQPPSTLNFSGSDWTEAGVEAVQQMPPERRSRMHWNTQEHVIAERKRREKMQQQFVTLATIVPDLTK

SEQ ID NO: 60822 - protein, 145 aa, Zea mays
  Coding DNA Sequence Number=SeqID_19043
  Gene Ontology: Mol. function=transcription regulator activity; Cellular component=nucleus; Biological process=regulation of transcription
  Homolog annotation: Hit_ID=Q8LSP3; Match level="QueryCoverage=89%, HitCoverage=29%, E-value=2e-39, Identity=67%"; Hit description =Putative bHLH transcription factor
MRFLIGSWVLRMEKTDKISLLGSTIEYVKHLEEKVKALEGRRERRTYEPTDFESKCHISTDIDASSSSGSAFGAGGFNPTVDASIHGDTVLLKICCKERRGVLVMIISEIENQGLAIINTSVLPFTDSCLNITITAKAMHSLSHV

SEQ ID NO: 60823 - protein, 80 aa, Zea mays
  Coding DNA Sequence Number=SeqID_19044
  Subcellular localization annotation: CTP_CleavageSite=26; ConfidenceScore=5.26e-01
MTGHAELLATKTKGPKGPHVFLALPRVDNVGGSRREGASQTPYSPSPGAGSRRRQVPKTYFLDYKCTPKLKMKMTTTTMQ

SEQ ID NO: 60824 - protein, 178 aa, Zea mays
  Coding DNA Sequence Number=SeqID_19045
MVVAALAQWQWPPPLVAHLPATRGTAAAAGHINQSKPEAGFCAQHSPRALGLLDSGFLLLLLLLITSHSHSASPTHRRPPTQRGAQEQIDPASRPRHATDRAACLPACLRGDHVAPGGGVGPAGNKGASMASNNGGAMQEPLLPKAPKSGGWLWKGTRPVRVRRPSRRPRPCCGCPRH

SEQ ID NO: 60825 - protein, 41 aa, Zea mays
  Coding DNA Sequence Number=SeqID_19046
MALLSPGRPAFPAASRRDNGLGFCLASRPCLPLSPADHVQV

SEQ ID NO: 60826 - protein, 162 aa, Zea mays
  Coding DNA Sequence Number=SeqID_19047
MGTRKPDGFYLICRQESENVKETKKLKIEKKKKKREEQSCAWARSPPTQPKSREKKGRAERERERCREGVQRCRTLDVQGHSCACGVERSGPPRRALRTARAPSSGWVADQGMLEVVGDWSRVSSPGSRRRASVELVRRNSGHDRIAGVLVRRNRLRASICG

SEQ ID NO: 60827 - protein, 241 aa, Zea mays
  Coding DNA Sequence Number=SeqID_19048
  Pfam annotation: Domain name=DUF1645; Domain location=67-219; Score= -39.7; E_value=0.0091; Accession=PF07816.2; Description=Protein of unknown function (DUF1645)
MPDTERRPPPRRRCPLPASWISWHLPAAPATTSSSRATTTATATATARHDDEEEDGFTFAAVAVPCPVYAVFGRPRWSPQKQRQQEEEEEEEGPAGTGAATARRVPLGRLLLEERWCDDGAPSVSGKQPADAAEAELDGVPAETYCLWSPASPAAGSSRRASPARCRTRGSAGLSVLRWQRQRRVAAGKDKFVFLAGAGEGHGSAARGGGKSTTTTFLPWKQDLVGLVASAITFRPSCQPF

SEQ ID NO: 60828 - protein, 428 aa, Zea mays
  Coding DNA Sequence Number=SeqID_19049
  Gene Ontology: Mol. function=methyltransferase activity; Cellular component=nucleus; Biological process=rRNA processing
  Homolog annotation: Hit_ID=Q1EPL1; Match level="QueryCoverage=100%, HitCoverage=59%, E-value=1e-137, Identity=53%"; Hit description=FtsJ- like methyltransferase family protein
  Pfam annotation: Domain name=FtsJ; Domain location=22-156; Score =143.3; E_value=6.4e-40; Accession=PF01728.9; Description=FtsJ-like methyltransferase
MGKAKGKQRQDKFYHLAKEQGYRSRAAFKLLQLDARFHFLPTARSVLDLCAAPGGLMDSNGVSAFDVVLHDGSPNVGGAWAQEATSQSALVIDALRLATMFLAPKGAFITKVFRSQDYNAIMYCLKQLFEKVEATKPTASRSTSAEIYIICLKYKAPAKIQPELLDIKHLFRYEEGNTTLRKVGLASDFIWSDTQAPLEFLGSYNAISFDNPESLPIKNHELTTDDIKNFCEDLLLLDKHSFKHILKWRIRLRKSLSASSQVTPKVNDAVESTKVMDDDVLLQEMEELTSVIDRKKKREKKRLSKRRAKDKARKATGMQVDATGDDYGDPDLFSISVIKGGKELEAVESAEIDVEDEIGDGDNEDTQALEDSDEEMDSDDEQQRYDAQLEEMLDEAYERFVTKKGGEIKQERKRAKRINPDADAELLE

SEQ ID NO: 60829 - protein, 503 aa, Zea mays
  Coding DNA Sequence Number=SeqID_19050
  Gene Ontology: Mol. function=ATP binding; Biological process=electron transport
  Homolog annotation: Hit_ID=Q2HSF1; Match level="QueryCoverage=57%, HitCoverage=57%, E-value=4e-54, Identity=40%"; Hit description=WD40 -like
  Pfam annotation: Domain name=WD40; Domain location=160-196; Score =39.1; E_value=1.6e-08; Accession=PF00400.22; Description=WD domain, G-beta repeat
  Pfam annotation: Domain name=WD40; Domain location=211-248; Score =18.9; E_value=0.018; Accession=PF00400.22; Description=WD domain, G -beta repeat
  Pfam annotation: Domain name=WD40; Domain location=252-289; Score =5.8; E_value=7.7; Accession=PF00400.22; Description=WD domain, G -beta repeat
  Pfam annotation: Domain name=WD40; Domain location=75-113; Score =12.3; E_value=1.3; Accession=PF00400.22; Description=WD domain, G -beta repeat
  Pfam module annotation: Pfam domain module=WD40::WD40::WD40::WD40; Domain location=160-196::211-248::252-289::75-113
MAPPPQPKQLVLAASSADAGVAAWDLRTGAEDIRLRPCASRPRSLASVADRFLASAQALPAGGNSGTIHFYYWDKPQVAVKSFPAEPIRALIADQEGSYLIGGGSNGNIFLWECVSLVASELKVVRSGCSWCARGILSHVSNGKRGRVKAKLTQEEVSSGELLHTWHAHYRAVRCLGLYDYLLVSGSEDGTIKVWDLITVLDEQSRLEVQTPYLYSFSQHALPVTDIACFLGAIAISSSEDRTCKIWSLSEGRMLRSISFPTSIDSIALDPRSHIFYAGGRDGKIYVTAMGVDLSFHGRDESSILGALDDHSRQLGNSFLSQDITSVAGDRTCNMYIMHSIRNIKQSCVARAFGLDEGQPEAAWSKAVTSLASSRDGLLLVSGSEDGPVTNVLIVTPQRVNLPPLQPLRKVRSANGEAERQAVLLHRPENDVPIPGNKTFIFMERYLDELQKHGGSSRLFDFGPNAQNGTPNQQGTEWRDRYLELQDLFVHEVLHQMPSSRNP

SEQ ID NO: 60830 - protein, 64 aa, Zea mays
  Coding DNA Sequence Number=SeqID_19051
MRRQAGQWDWEEGWQRRKGEGWPERHERESWEEGRESPTVTVALVALDQIGDFGSGIGLHFLIR

SEQ ID NO: 60831 - protein, 333 aa, Zea mays
  Coding DNA Sequence Number=SeqID_19052
  Gene Ontology: Mol. function=acyltransferase activity; Cellular component=integral to membrane
  Homolog annotation: Hit_ID=Q688V9; Match level="QueryCoverage=92%, HitCoverage=59%, E-value=1e-140, Identity=80%"; Hit description =Putative beta-ketoacyl-CoA synthase
  Pfam annotation: Domain name=ACP_syn_III; Domain location=232-302; Score=-8.8; E_value=0.0065; Accession=PF08545.1; Description=3 -Oxoacyl-[acyl-carrier-protein (ACP)
  Pfam annotation: Domain name=FAE1_CUT1_RppA; Domain location=96-333; Score=524.6; E_value=1.1e-154; Accession=PF08392.2; Description =FAE1Type III polyketide synthase-lik
  Pfam module annotation: Pfam domain module=ACP_syn_III::FAE1_CUT1 _RppA; Domain location=232-302::96-333
MNGGAAPPSAAAAATPPHRRLPDFLQSVNLKYVKLGYHYLITHLLTLMLLPLMAVILLEAGRTDPEDLRQLWLHLQYNLVSVLVLSAVLVFGATVYVLTRPRPVYLVDFACYKPPAHLQVRFEEFMRHSKLCGFSDDALEFQRKILERSGLSEETYVPEAMHALPPQPTMANARAEAETVMFGALDSLFRSTGVRPKDVGVLVVNCSLFNPTPSLSAMIVNKYKLRGNVRSFNLGGMGCSAGVIAVDLARDMLQVHRGTYAVVVSTENITQNWYFGNRKSMLIPNCLFRVGGAAVLLSNRGGDRRRAKYVLRHVVRTHKGADDRALQLRVPGA

SEQ ID NO: 60832 - protein, 679 aa, Zea mays
  Coding DNA Sequence Number=SeqID_19053
  Gene Ontology: Biological process=ripening
  Homolog annotation: Hit_ID=Q6K2M1; Match level="QueryCoverage=89%, HitCoverage=89%, E-value=0.0, Identity=66%"; Hit description =Polygalacturonase isoenzyme 1 beta subunit-like
  Pfam annotation: Domain name=BURP; Domain location=465-678; Score =300.5; E_value=3.1e-87; Accession=PF03181.6; Description=BURP domain
  Subcellular localization annotation: CTP_CleavageSite=71; ConfidenceScore=5.49e-01
MAFTGCAHLLLTMSILLLLCHRRTRAFPLPSPSASSSAASPSPPPVPALPRGLPRLIPVWTSLPVNPFTAKAAFIRYWNRKVSSNRPHPAFLFAKLSPLSAPDAATFSNLASAGKLASRIHDFCDAASLLCPSTPAASWSASSTSMDGAAGVASSGGGSGAASAAPFKDYENGNFSSYGNSGGGGSDQFAIYSSGKSGPVDSFKRYGKGSLGRNDSFANYEEGANVGTSTFNSYTTGATGGAGEFAGYAGQTNTVAVAFATYDSVGNGRTHEFTAYSQDANSGVQSFTGYGKTANGAGESFETYGNNSNTVASGFINYGEKSNGFNDTFTSYGLVGNAPENTFRSYASGSNAGVDQFKAYRDEANVGDDSFMSYANNANGAAADFDSYGKSTNPGSVAFKGYGQGSNPNHRIGFKHYAGENTTFKAYSNEGVEFKEYQNMSKMEVSKAAAAAPGRRLPAWSPEPGKFFRERDLMMGNRMPMPDIADKMPRRAFLPRDIATKIPFEENAVSALFGAPPGTAMRQVVASTVAECARPPSPGETKRCTTSAEDMLDFAVEMLGSNIAVRSTESTAGSGRDVRLGKITGIAGGSVTRSVSCHQSLFPYLVYYCHSVPRVRLYEADILDVDSNRKINHGVAICHLETSDWSPNHGAFVALGGKPGQIEVCHWIFEGDMAWTLVD

SEQ ID NO: 60833 - protein, 248 aa, Zea mays
  Coding DNA Sequence Number=SeqID_19054
  Gene Ontology: Mol. function=metal ion binding
MVTPSKRSWTFAGATNGSSRFLEFVESKGDSVLELLSTPTKISGVHYVQGSVTFHDVIDNAHNGGVAQIRLEGVYIWPFRQLRMVANSGADGEPLQEEDYFLSNPYHLLRIFSSQVFQESSEEKNRRKNSLTYDMEKHCNTEIAAKVVRVSSNPNDGEHEKYRLEGLMESPAVDDDGECFSPILLNATSLNVEVYYNKAVNYTLMGAAKVSILMIGQQAIMDAYLCLLHLTAGILVVPFCSVTQFMLK

SEQ ID NO: 60834 - protein, 82 aa, Zea mays
  Coding DNA Sequence Number=SeqID_19055
MAWQKIGERTSNPAIEVPQHLTHLIAPRTSGGCGSDGRDVLPERPQRRGQRQGSGRCPTSTRPYHSGPDHDGYCRERARSPF

SEQ ID NO: 60835 - protein, 228 aa, Zea mays
  Coding DNA Sequence Number=SeqID_19056
  Homolog annotation: Hit_ID=Q6Z493; Match level="QueryCoverage=28%, HitCoverage=13%, E-value=2e-24, Identity=86%"; Hit description =Putative MATE efflux protein family protein
MSRQSKRLSISCMTHSDEDSLASRFGVARNSVAHATVALYFRLVHGHAMLTGHGHAMLTAESLFHAGASSLLSQAKRPRPRPRARYKQHRHRSTLLGRSPVSRSSSGGGGEKAANWWPAVRRELRHASGPADGSSSMYSAAPLLGDEAGGGEPAPRTPPPPSSWVGRVVDAAEARAQLGFAVPMVLTSMAYYGIPLVSVMFSGQLGDVHLAGATLGNSWATVTGYAFV

SEQ ID NO: 60836 - protein, 141 aa, Zea mays
  Coding DNA Sequence Number=SeqID_19057
  Homolog annotation: Hit_ID=Q6ZII7; Match level="QueryCoverage=66%, HitCoverage=57%, E-value=2e-30, Identity=68%"; Hit description=Zinc finger and C2 domain protein-like
ELFDHDTFTKDDRWDAEFSILNFVEIAKQDLSDVPDGTVMKTIHTEKGSCLATDSHITCKDGKVSQDILLRLRDTETGDLVLRLTWVNIPGVARSDKVCKKAHATGSNASAAQPGAPAPGKMQFCRASDHSTKLTISILEQ

SEQ ID NO: 60837 - protein, 169 aa, Zea mays
  Coding DNA Sequence Number=SeqID_19058
  Gene Ontology: Mol. function=cytochrome-c oxidase activity; Cellular component=mitochondrion; Biological process=electron transport
  Homolog annotation: Hit_ID=Q9SXV0; Match level="QueryCoverage=93%, HitCoverage=92%, E-value=3e-41, Identity=56%"; Hit description =Cytochrome c oxidase subunit 6b-1
  Pfam annotation: Domain name=COX6B; Domain location=98-161; Score =72.8; E_value=1.1e-18; Accession=PF02297.7; Description=Cytochrome oxidase c subunit VIb
MAAEGKTPSLAEEYSLPPQEVPVEKAAEEKPSSGTESEAAPSTNDETPPSVEDKNGTSEVQDAAENPEAEETNTAAEETPAVEEASETTEEEEAEKPEIKIETAPADFRFPTTNQTRHCFTRYVEYHRCVAAKGEDAPECDKFAKYYRSLCPGEWSYKWLDVLLHLVLV

SEQ ID NO: 60838 - protein, 599 aa, Zea mays
  Coding DNA Sequence Number=SeqID_19059
  Gene Ontology: Mol. function=electron-transferring-flavoprotein dehydrogenase activity; Cellular component=integral to membrane; Biological process=electron transport
  Homolog annotation: Hit_ID=Q337B7; Match level="QueryCoverage=86%, HitCoverage=94%, E-value=0.0, Identity=74%"; Hit description =Electron transfer flavoprotein-ubiquinone oxidoreductase , mitochondrial, putative, expressed
  Pfam annotation: Domain name=DAO; Domain location=52-402; Score= -29.5; E_value=0.00048; Accession=PF01266.14; Description=FAD dependent oxidoreductase
  Pfam annotation: Domain name=ETF_QO; Domain location=438-532; Score =23.4; E_value=7.2e-10; Accession=PF05187.3; Description=Electron transfer flavoprotein-ubiquino
  Pfam annotation: Domain name=HI0933_like; Domain location=51-313; Score=-265.1; E_value=0.02; Accession=PF03486.5; Description=HI0933 -like protein
  Pfam annotation: Domain name=Pyr_redox_2; Domain location=52-231; Score=-39.6; E_value=0.078; Accession=PF07992.4; Description =Pyridine nucleotide-disulphide oxidore
  Pfam module annotation: Pfam domain module=DAO::ETF_QO::HI0933 _like::Pyr_redox_2; Domain location=52-402::438-532::51-313::52-231
  Subcellular localization annotation: CTP_CleavageSite=6; ConfidenceScore=5.21e-01
MQRAIRIAAAATRRALSSSAARASPPPPRGPLAPGWGATRWLCSGREALSYDVVIVGAGPAGLAAAIRLKQLCRAADTDLSVCVLEKGSEVGAHVLSGNVFEPRALDELIPKWRQEDSPIRVPVSSDKFWLLTKNQAWTLPSPFDNKGNYVIRGSGFAEKLIVSSLSQLVRWMATKAEELGVEVYPGFAASEILYDENQIVTGVATNDVGIAKDGTKRETFQPGVELRGNLMLRIIIFQKIIRNHKLRERGQGQHQTYALGIKEVWEIEEGKHNPGSVIHTVGWPLDTKTYGGSFLYHLDDRQLAIGLVVALNYRNPFLSPYDEFQKFKQHPAVRKLLEGGTAIQYGARTLNEGGFQSIPYPIFPGGAIIGCSAGFLNVPKIKGTHTAMKSGMLAAEATFKSLVEGSSMELYWENLKKSWIWEELHKARNYRPAFEYGLIPGMVLSALERYIFKGKSPYTLKHGRPDHEATDSHFVATESDKRLHCGQTANLHAPIQYPKPDGHITFDVPTSLYRYISDEKGDPKLHINAQNCLHCKACDIKDPKQNIEWTVPEGGGGPGYTPFGEDVCELQHGRDIENVNVTGGDTLVDEMKVDLHVR

SEQ ID NO: 60839 - protein, 107 aa, Zea mays
  Coding DNA Sequence Number=SeqID_19060
MKPSSGGKTWRRHKVNFVLSRAQRKEVLQWIKMLMFPNGLSRALYGGIYRCLSAQRLNTKAGAKGSVFAFAPTFALRGTSSTKSSSAEDVARWWRRCPRSKWFRGGF

SEQ ID NO: 60840 - protein, 305 aa, Zea mays
  Coding DNA Sequence Number=SeqID_19061
MTMEMLSEILAKLEDLSAQWPSGAAVLSHRSSTPSSCTYRRHRGFWTRVPHLHGLQQRVSDGRWSPCHRPRVTHPGLHAYTTSHQLRGSHYLLRARRGDAPQLFDAEPASSPPTPTTASSRSRSPPPAWTSSPLYPSPALTTKNHPQPLLPHKSQHVNLAEAYASTKLVQVMPARCLMPGHGCSLCVPMPVRKSSTVLTLPAVLPCLGTIPCNAHKVSEWHYKRSCSCHGVCQAQPNFGIALTHLRYCDTNAGILLDFVGSFEHHECKCLGIAYVYCWDKHMPPNIWWLTWKDSRIFRKGLWKTN

SEQ ID NO: 60841 - protein, 82 aa, Zea mays
  Coding DNA Sequence Number=SeqID_19062
  Homolog annotation: Hit_ID=Q6YPF2; Match level="QueryCoverage=74%, HitCoverage=9%, E-value=5e-13, Identity=59%"; Hit description =Putative MA3 domain-containing protein
MASVLLSYPYGELVHSTQIKLGFVLLLEVVEDLAIDTNVIELFMAHTILDDILPLAFLSKAKVPKVHNKPIKRTNVGFKIES

SEQ ID NO: 60842 - protein, 110 aa, Zea mays
  Coding DNA Sequence Number=SeqID_19063
MQPRYGEARQPLPGRKVYLNPKQAIFISYLTPKCRCSPTDVMLRRAPSDRVACVQPPGSHGVVWCVMIPRSGHNNDNGDALIEVRDGMWRLYAVRACKEPHAFSPLDDCL

SEQ ID NO: 60843 - protein, 195 aa, Zea mays
  Coding DNA Sequence Number=SeqID_19064
  Gene Ontology: Mol. function=binding; Cellular component=integral to membrane; Biological process=transport
  Homolog annotation: Hit_ID=Q2QPD3; Match level="QueryCoverage=66%, HitCoverage=65%, E-value=1e-54, Identity=81%"; Hit description =Mitochondrial carrier protein, expressed
  Pfam annotation: Domain name=Mito_carr; Domain location=47-134; Score= 77.2; E_value=5.2e-20; Accession=PF00153.17; Description =Mitochondrial carrier protein
MVEREGARSLYLGLAPALARAVVYGGLRFGLYEPCKHVCSYAFGSTNFAFKFASGVIAGGLATALTNPMEVLKVRLQMSKSSTSTIREMRKVIAHEGFKALWKGVGPAMTRAGCLTASQMATYDEAKQELFLECYNRGDWKYNTLSANNMKVVVTEGVKSLYKGGFATFARVGPQTTITFVVCEKLRELAGMTAI

SEQ ID NO: 60844 - protein, 239 aa, Zea mays
  Coding DNA Sequence Number=SeqID_19065
  Homolog annotation: Hit_ID=Q6Z7E3; Match level="QueryCoverage=19%, HitCoverage=24%, E-value=1e-10, Identity=65%"; Hit description =Microsomal signal peptidase 25 kDa subunit(SPC25)-like protein
MEPKISSVGVRDLRRVVFPTPVLVVDLSRVVIPTPVLVVPLDAHRDLHRVIIPTPCPSTRVVIPPPAIGSGSSKAPLESASTTYALSSEPTSKLRVTVLFHSVSLKLARRRRLGVARSRGRRCRWGRRNALDDRLPVAPRVVDLRNGAARLRLAGSSSRCRHRLPVPDLGAMDLDPEGIFRDDSDEDEDSVKGSFSSNGLTVSSKFPRFSDMYTLTIASVNPQSIAANKPIHFTKSVTK

SEQ ID NO: 60845 - protein, 194 aa, Zea mays
  Coding DNA Sequence Number=SeqID_19066
MAETVKRCRCSGPIKKRHRCRTGASLGAAPGNTAEGTDATSAGAPRAMQGPEQQLSGWRGRGFEALGREMTRWRREKGAAGSQAVLCNCARTDGTRCSSLLVCAGARSRCSRRRLAAEKQGEEGRPVGEWGESSSQQRQWVLAYWEGAKSEGAEKYEGNKGKSVGPLSFPFYGSMPTTTIDVGPPFFSFSIIKW

SEQ ID NO: 60846 - protein, 85 aa, Zea mays
  Coding DNA Sequence Number=SeqID_19067
MESASCVGAPVDVGAPVDVSAYDPMTDPKRRPKFNDPSWNYGYWIEIEKQDMVTFNLCKIVTTGGIKNIVIKAVRRPTPFLSFRR

SEQ ID NO: 60847 - protein, 391 aa, Zea mays
  Coding DNA Sequence Number=SeqID_19068
  Homolog annotation: Hit_ID=Q75GB5; Match level="QueryCoverage=61%, HitCoverage=80%, E-value=4e-73, Identity=61%"; Hit description =Putative senescence-associated protein
  Pfam annotation: Domain name=DUF581; Domain location=318-376; Score =70.1; E_value=7.2e-18; Accession=PF04570.5; Description=Protein of unknown function (DUF581)
MRPRFNNMVNRHVAFPASVALAPTGAIMNGLIASVKMVGVTQETDSGDVPQEGIRRLLGEAEATPEAPAMLRNRSRRAVGGGANQAQGRAGGLMAELPAAAAAQSPRHPSSSSSSSPAAAPVFPSPRPFVAMAALPQAGLLPDGSSEGPRSAVSPTSILETKHFCCSPLPPFLSERSLRRAARVDAAAAAEPAGVGLADVLRDHGDAKVAGGKVVLGSQLRVQVPSGRAVELLSSPIEFGAKNRDAQLAALSPARRLLPEVVSSPSARVFAAGGVAVVPPGEMAMSEDYTCVISRGPNPRTTHIFDDCIVESCGDLLADKPAAGGAAAAACGFFSSCHACNKQLGHGNDILIYRGHKAFCSSECRYQETLLDEAVDGEFALGDGGKGGGRC

SEQ ID NO: 60848 - protein, 75 aa, Zea mays
  Coding DNA Sequence Number=SeqID_19069
MGGEGVDTGTRNRGFDGRGDGRRQRRVRRRDWIRCGTVCETGARRTPPRTVCENCATRHERTPPWTVCENCAGEA

SEQ ID NO: 60849 - protein, 60 aa, Zea mays
  Coding DNA Sequence Number=SeqID_19070
MEKVQRGGEADDGEGAADHAARVFFCHQFVWPWPAFTDVQVQVIKIWDHGQVDFCVVYYG

SEQ ID NO: 60850 - protein, 512 aa, Zea mays
  Coding DNA Sequence Number=SeqID_19071
  Gene Ontology: Mol. function=binding
  Homolog annotation: Hit_ID=Q10N57; Match level="QueryCoverage=77%, HitCoverage=83%, E-value=1e-135, Identity=64%"; Hit description=HEAT repeat family protein, expressed
MHNQKTKQFLGLLVDANVLIRDAARKIFGLVNMPKLQIFKSAVDGLVTSLEKYPEEEDIYGIMFSIGKNHGSFSANIAKHLAKEITMASDGELILDKPRVKALLIVSISAPFSDDKHKQLGIPSIIFSYAIPLLEKISCALGEVDQDSLLSYLYHKGGMPFWENRSVSAEFGESESCNVETVKIGAHIENTAKEAKCLDEVLVMKSILEIVEGVWTMRMSCNVCEVRTIFRTCKEELRLLAENSSGSIGALLSFLSEYLDAILFIVEIWQLIQLDKPYTCGLTSLDILLERLDMSVRRMKYCYIGLNRVLEVQVLELSLIAHLCRLSKIAVCSKVVLGKVLWVINRLEDLCADGSCELSDFSGEIKKACDTNRIGDNLIGNINNLFQLFHLKPTTDFGMLKVISAMLRVCDNDSENPLQYICGLPVGVSFKISLWNISGHHRLWLRMTIGESVQHTFLEFSRFEGNDEVMSGSMVVPLYATPKTCSFVLRGSAPTRVDMEDRVIVWFNSLMN

SEQ ID NO: 60851 - protein, 321 aa, Zea mays
  Coding DNA Sequence Number=SeqID_19072
  Gene Ontology: Mol. function=RNA-directed DNA polymerase activity; Cellular component=nucleus; Biological process=RNA-dependent DNA replication
  Homolog annotation: Hit_ID=Q8S472; Match level="QueryCoverage=99%, HitCoverage=29%, E-value=1e-150, Identity=80%"; Hit description =Putative gypsy-type retrotransposon RIRE2
MLKEPCPYHQGPVKHTLEECAMLRRHFHKAGPPAEGGRARDDDKKEDHQAGEFPEVRDCFMIYGGQVANASGRHRKQEHREVCSVKVAAPVYLDLSDKPITFDQDDHLDRVLSPGKYPLVVDPVIGNVRLTKVLMDGSSSLNIVYAETLRLLSVDLSSVRAGDAPFHGIIPEKHVQPLGQLDLPLCFGTPSNFRRETLMFEVVGFRGTYHAVLGRPCYAKFMAVPNYTYLKLKMPGPNGVITVGPTYRHAYECDVECVEYAEALAESEAIIADLESLSKEVPDVKRHAGNFEPAETVKSVPLDPSNDASKQIRIGSELDPK

SEQ ID NO: 60852 - protein, 164 aa, Zea mays
  Coding DNA Sequence Number=SeqID_19073
  Subcellular localization annotation: CTP_CleavageSite=44; ConfidenceScore=5.08e-01
MGDPHPLSSAHLTAAASSAREHRGPTNERLAASDPSTSFAKRPRVAAEPSDSGGCVPCVEADVRALVSVSGGIYPLARAGALRGLTAVLEKVDTSSCVSAAITDCCYKCAVELMRDDDNGVRQHLMFLYLLMSVLQRKTLKDLYRKLRIRQNDLDTPQSTGGQW

SEQ ID NO: 60853 - protein, 113 aa, Zea mays
  Coding DNA Sequence Number=SeqID_19074
MAQTATPACSSVVNPVPVRLRRCRLPEMKMVDHGYRRCQFQPDQRERLGPRALAGDVYTTPSSRGSRKYEMIALSRDGHGTMVVPPRGHLDLEALTAEAAFVLGGILKDAQEA

SEQ ID NO: 60854 - protein, 231 aa, Zea mays
  Coding DNA Sequence Number=SeqID_19075
  Gene Ontology: Mol. function=RNA-directed DNA polymerase activity; Cellular component=mitochondrion; Biological process=RNA-dependent DNA replication
  Homolog annotation: Hit_ID=UPI00004C1731; Match level="QueryCoverage =81%, HitCoverage=14%, E-value=4e-89, Identity=78%"; Hit description =UPI00004C1731 related cluster
  Pfam annotation: Domain name=RnaseH; Domain location=1-124; Score= -31.1; E_value=0.046; Accession=PF00075.14; Description=RNase H
MFFDGSLMKTGAGAGLLFISPLGKHLRYVLRLHFPASNNVAEYEALVNGLRIAIELGVRRLDARGDSQLVIDQVMKNSRCRDPKMEATAMRFGAWKTSQELLQEIHSGACGHHAAPRALVGNAFQQGFYWSTAVADATRIVRTCEGCPFYARQTHLPAQALQTIPITWPFAVQGLDLVSPLQKAPGGYTHPWEGPFVIAKVLKPGTNKLADSQGEVYTNTRNIQQLRRFYP

SEQ ID NO: 60855 - protein, 196 aa, Zea mays
  Coding DNA Sequence Number=SeqID_19076
MERDRQDAAQKRRAVTRIGDPFREAKKARGGTKSAAPGNSKPPPAAKPAAPGPSKCSAGARAATSGASKEPSAEAAKEQRPASLALTKVAVACVADFDTDICVADYLVGKFFFEDEAAAFADHVAAGALTSEFAAEVERLRAQHTDAVWEKSAAENKSHRLTERLVATEAEKEELRRQLAEERRDANKAIADVQAA

SEQ ID NO: 60856 - protein, 80 aa, Zea mays
  Coding DNA Sequence Number=SeqID_19077
MRPTGPVPVYIRRDPAPKREQCPSCEQAPCPVTIHRYTQFPFIPRADSGTKFSPLFWSGGKPSRNVVSCVSHELGVLDKS

SEQ ID NO: 60857 - protein, 346 aa, Zea mays
  Coding DNA Sequence Number=SeqID_19078
  Gene Ontology: Mol. function=hydrolase activity, hydrolyzing O -glycosyl compounds; Cellular component=vacuole; Biological process =carbohydrate metabolic process
  Homolog annotation: Hit_ID=Q9ZNY8; Match level="QueryCoverage=92%, HitCoverage=93%, E-value=1e-117, Identity=69%"; Hit description=Beta- 1,3-glucanase precursor
  Pfam annotation: Domain name=Glyco_hydro_17; Domain location=25-340; Score=604.4; E_value=1e-178; Accession=PF00332.9; Description =Glycosyl hydrolases family 17
MRMAGLWIAAFSLLLCSSLSGVEGIGVNYGTIASNLPSPDKVIALCKAKGITDVRLFHPDTAVLAALRGSGLGVVLGTLNEDLARLASDPSFAASWVQAYVRPFAGAVRFRYVAAGNEVVPGDLASHVLPAMQNLESALRAAGLGGVRVTTAVSTSVLGTSYPPSQGAFSDAALPSMGPIASFLAPRSTPLLVNVYPYFAYSADPASVSLDYALLRSDSGGGAVVVADGGASYGNMFDAIVDAVYAALERAGARGLELVVSETGWPSGGGGAGASVGNASAYVNNVVRHVGSGRGTPRRPGKPVEAFIFAMFNENQKPEGVEQHFGMFQPDMTEVYHVDFTAASSS

SEQ ID NO: 60858 - protein, 130 aa, Zea mays
  Coding DNA Sequence Number=SeqID_19079
  Homolog annotation: Hit_ID=Q8S2G4; Match level="QueryCoverage=63%, HitCoverage=22%, E-value=6e-08, Identity=46%"; Hit description=Mucin- like protein
  Subcellular localization annotation: CTP_CleavageSite=41; ConfidenceScore=5.59e-01
MFVVLNRTSSVATSLRRRPPLPPPPLGFSPSYASSPPPLFPGQRRWGQMGRLLLPQRRRRGWEVGDEWGSTWSTGLTKDHFDGSSVSKPVSAEVTEVLGHEDKAESVHGLKRSDRIRRKNVRLSGPEWMA

SEQ ID NO: 60859 - protein, 551 aa, Zea mays
  Coding DNA Sequence Number=SeqID_19080
  Gene Ontology: Mol. function=hydrolase activity
  Homolog annotation: Hit_ID=Q8S2H5; Match level="QueryCoverage=89%, HitCoverage=94%, E-value=1e-140, Identity=65%"; Hit description =Putative diphosphonucleotide phosphatase 1
MMAFFVVQRGSSQLTPLLALALLGLLRCAAVSCSAAAAATTLLHRESYAGKSEFRTVNRKPLGSCVDPSPYLAIDVGAAGPIPDEAFLQVTVSGVQRPDPSDWVAMITPSNSSVAGCPLSESELRGDRRPGESPAPLPLSCQASNLPDAKVQAQYLTSDPGYLGCKNAGCGKRDASGACTARTCAATLTFHVVNFRTDVEFVLFSGGFKAPCLLKRSGARRFANPASPLYGHLSSTDSKATSMRLTWVSGDGNPQRVQYGDGKSSTSEVATFTQDDMCSISVLPSPAKDFGWHDPGYIHSAVMTGLQPSQSYTYRYGSDSVGWSDTVKFRTAPAAGSDELSFVIYGDMGKAPLDPSVEHYIQETSAMPQDSWVEWDFFLHLITPLASQVPYMTAIGNHERHRPMYSSHGGILPNVDSNFVASVEPLLLNYQVDLVFFGHVHNYERTCAVYQGNCKGMPTTDKSGIDVYDNSNYTAPVHVIVGAGGFSLDSFPNKGEAWSLSRVSEFGYGKVHATRTDMLVQFVNSSSMEVRDQFRIVKGAPANKSLSLIIQ

SEQ ID NO: 60860 - protein, 361 aa, Zea mays
  Coding DNA Sequence Number=SeqID_19081
  Gene Ontology: Mol. function=nucleotide binding; Cellular component =nucleus; Biological process=multicellular organismal development
  Homolog annotation: Hit_ID=Q2R4Z0; Match level="QueryCoverage=80%, HitCoverage=41%, E-value=1e-114, Identity=69%"; Hit description =ATPase, histidine kinase, DNA gyrase B-, and HSP90-like domain containing protein
MRLGADAIVFSRCCTRSSGPTQSIGLLSYTFLVETGHTNVVVPMRLERHGSKQFFSNLSALLKWSPFATEEELMQNFCDIGPHGTKIIVFNLWSNDDGNLELDFDTNPEDIMISGAPNPEQISNSVRRANENHLANRLRYSLRVYASVLYLQLPDYFRIMLRGREVERHHIASDLIYPERISYRPQSCGIIREAEVLTTIGFLKGAPTISVHGFNIYHKNRLILPFHRVLSTASSKGRSVSGVLEVDFIKPTHDKQDFEKSQLFQRLMNRLKEMTNEYWDLYSNKIGYVKVPRVRAAPTPAPPVMLAIENGPAEPSERSAPAPTQPLRWQHGNSSCVNAVPIAMAPPAFHPAPVKTETDAP

SEQ ID NO: 60861 - protein, 346 aa, Zea mays
  Coding DNA Sequence Number=SeqID_19082
  Gene Ontology: Mol. function=transcription factor activity; Cellular component=nucleus; Biological process=regulation of transcription, DNA-dependent
  Homolog annotation: Hit_ID=Q9LRF3; Match level="QueryCoverage=64%, HitCoverage=93%, E-value=2e-37, Identity=43%"; Hit description =Ethylene responsive element binding factor3
  Pfam annotation: Domain name=AP2; Domain location=31-95; Score=137.5; E_value=3.6e-38; Accession=PF00847.10; Description=AP2 domain
MAPRVADKSPLPLATGLKLGVGGGVGGMGLGPHYRGVRKRPWGRYAAEIRDPAKKSRVWLGTYDTAEEAAKAYDVAAREFRGAKAKTNFPFPLAVAVAGGAGSPSSDSTTLESSCGGSGCGVEAPVQAAMPLTPALDLDLFHRAAAVSAVTTGGMPFPFKAFPVVRPTPHQYFLYNQAAAAAAAGYRMFKVASAPVTVAAVAQSDSDSSSVVDRTCSPPAVTAKKEGGSRATRVPAAKAGPVVVVAGCGGIPCARPAVAGRLAGTAGVFRVRGGRVLRMRREDRAGRGLSRPTAVGLAQLEERHQGAVIRAAAAGSFSSPWGPRAAPRLASGSLPLYYMRWLSWCA

SEQ ID NO: 60862 - protein, 45 aa, Zea mays
  Coding DNA Sequence Number=SeqID_19083
MGVASALQRWRRRLLERVWLRRVTKWTDAGVHVSLNTKMSRSDSG

SEQ ID NO: 60863 - protein, 118 aa, Zea mays
  Coding DNA Sequence Number=SeqID_19084
MGPLPRLADSLLHRLGGYTVVRLADSCFADSETGPSLASSAYCLTGSGARPSPASPTCCFVDYVRLHHRLVSSGAVVHLTKTTRRNKLLDPQSMEDTIRKFSKTTRPSILKADFGPSS

SEQ ID NO: 60864 - protein, 529 aa, Zea mays
  Coding DNA Sequence Number=SeqID_19085
  Gene Ontology: Mol. function=metal ion binding; Biological process =RNA-dependent DNA replication
  Homolog annotation: Hit_ID=Q2QZM2; Match level="QueryCoverage=98%, HitCoverage=81%, E-value=2e-52, Identity=39%"; Hit description =Expressed protein
  Pfam annotation: Domain name=DUF594; Domain location=465-520; Score =73.8; E_value=5.6e-19; Accession=PF04578.4; Description=Protein of unknown function, DUF594
MKHTKVVADYMMTEHESGHVFDATNMQGYRYIFHGEDLTLPYLSKPDYRTALAACAFTTVDTVWQWIDSQSVSVFSREHGGILKDIALSFTLFKLLKRRFGKYDHGEAGRPKTRTLIVSGLLREEAGYSRAFRVIEMELTFLYDFFYTRHQSHTQYVGMTVVFVLPVIVWNAISGAFSRHYHRTSLEQTVNGTDVIHCITIVLMVVVVVVLVVESRINDQKWRVVDDLHTLTGASKITWKGEAVPFDDGSRKQATKGIKKRKHRKLTGRNWDRKLGQYSLLHSFDYHPRNVASILSLGLIEPTRDGQKASKKVELPEEVVMHVLSRFKANDGRLADGRAALAVAGNDASRLTWACELPTSVHTVLVWHIATTICDTTTPRQQTGDRLVAKCTSEYCAYLVAFVPDMLPGHAYDTRRIFNAVVMEARDYLAGCDTMRDRCVKLLELQCNELTILGMGAKLGSELRYRVHDRSRRWKVLADFWAELVLFLAPSSNADIHAEKLAAGGEFMTHLWTLLIHAGILERPSSSSP

SEQ ID NO: 60865 - protein, 458 aa, Zea mays
  Coding DNA Sequence Number=SeqID_19086
  Gene Ontology: Mol. function=DNA-3-methyladenine glycosylase I activity; Biological process=base-excision repair
  Homolog annotation: Hit_ID=Q5VQI7; Match level="QueryCoverage=79%, HitCoverage=99%, E-value=1e-112, Identity=56%"; Hit description =Putative DNA-3-methyladenine glycosylase I
  Pfam annotation: Domain name=Adenine_glyco; Domain location=273-451; Score=259.4; E_value=7.1e-75; Accession=PF03352.4; Description =Methyladenine glycosylase
MVPTFGSDQVRATDEQTRQRMATLPFHKVHGHALCPPCSIGFGYPWWLTTENVAFFIRSPLEDIENQPANQPTNRRSQSQEGRQRAHPVRMCNSNVKSAGVAQIDGRPVLQPAGNRVAAPEPDASRPLKKSLQKSLSMPVYYDSNATAGARPAPAENTTRAAANSSPLPPAKAATKAAGAFPAEKSGRRPGAVPPPVVAFAALEALEPAGSIAAAQREHAAQAQAQRKLRIAHYGRTASFSRVEGRVVGAAAAAAERAVPASPTGHDEKRCSFITPYSDPLYVAYHDEEWGVPVHDDELLFEMLTLSGVQVGADWTSILKKRHVYREAFSGFNVDAVAKYTEKQMASLSADYGLDLGTVRGTVNNACRIIEVRRDLGSLDRYVWAFVNNRPLSPSYKYSRKIPAKTSKSECISKDMVRRRFRFVGPTVVHSFMQAVGLTNDHLVSCPRHRACSAAAVN

SEQ ID NO: 60866 - protein, 248 aa, Zea mays
  Coding DNA Sequence Number=SeqID_19087
MSGAAPDAEPGREGFTCSALLMCLYLPGLLSKKKPEEAISTSPPPTAHAAPAPDQPAEHIQETPPHAPSRRAASLDKSECASLCSRSNIVFDFVAEEWDQGQASAQAILHGYCPSPCFDLPVELIRAGERFGAVAAVSEPTKPVPVTAAFVSVDDGQRGATLKKVASCLAPGVDDGRSEPRPPRLARFLSASGRRSSVPRPLVMPSRAAPPGQAVGGDCELGGSAVVPACNAMQYNERRQPVGTASCD

SEQ ID NO: 60867 - protein, 78 aa, Zea mays
  Coding DNA Sequence Number=SeqID_19088
  Subcellular localization annotation: CTP_CleavageSite=17; ConfidenceScore=5.12e-01
MKWKATSRSSKITTSSRCGLAATPSRLPVKAAVIYVSFPHFDLLYKQNMQRENPLALLKRVMWFVFERVGFVYHTVSF

SEQ ID NO: 60868 - protein, 138 aa, Zea mays
  Coding DNA Sequence Number=SeqID_19089
  Subcellular localization annotation: CTP_CleavageSite=38; ConfidenceScore=5.67e-01
MAPPLHPSSPTLVPSLSRLVGVPCPSLSSVPRPSLLMRGVAGRSHAMARPPPPAWRPGPHGFMAFLSLLLQMAMAPRTHALPLVGASVKEPQPAWTFTCERWPASPSPAIAMAEPPLSQPEPSTPLHASALRANPCHA

SEQ ID NO: 60869 - protein, 90 aa, Zea mays
  Coding DNA Sequence Number=SeqID_19090
MGQGASPRIKEGGRPKSDEDDLGSPVRSCRVRALGKLHGPLAKANREAGTTCTRLERAGRGGRGLGSDGGRRKGSPKLRRGVWQVRVSTG

SEQ ID NO: 60870 - protein, 106 aa, Zea mays
  Coding DNA Sequence Number=SeqID_19091
MGRAQGREDQQAPWSKAKGAERIPWQRAERDEVSWSKVQGTTAMASSRRVAELELEEGSSVPMYCTHREKGALEANTRMRPGEVLGRGARRWRKKLHGLEKIKTGR

SEQ ID NO: 60871 - protein, 138 aa, Zea mays
  Coding DNA Sequence Number=SeqID_19092
MAEVGTSGKGECRDTIDDTQASTQEERGDHGGTDEGLLGKMDCIWASERSLEAAAHRELGTVRSEQRPGAHAREMGESRAPWRRDGGRERSRNQGARPWELHSREDGAAGQSAGRSREGARDRGRRRGRKSSVGRDGA

SEQ ID NO: 60872 - protein, 87 aa, Zea mays
  Coding DNA Sequence Number=SeqID_19093
MAGTRALARRSHTRMESAQLQGEGCASTVVGNIKPELQRWWKISVDAFSERQILKKNRRRCSLVRRGRSAAGGRTVRDLAQGLGFPA

SEQ ID NO: 60873 - protein, 79 aa, Zea mays
  Coding DNA Sequence Number=SeqID_19094
MADQIVSDLDRRHTCCEGHATDVRAGYETRPNAQEWWLTGLTHLSVRGQGARLEKEWAEWWLVPAQNQVEYLLYIVTLA

SEQ ID NO: 60874 - protein, 145 aa, Zea mays
  Coding DNA Sequence Number=SeqID_19095
MGKNNKRKREPTPPSEDFDDSEYSEEEFSSESEGSPAPIPLRESSDDSDDSQGLAAEVWTYIRAVERSGLEGSDESEYSSDEEDSSEGDGGDGDDDDDDDDDGGGGNDGDGGGRGGSGGSKDGDGGSSRGSNRGGSGRGSNRASG

SEQ ID NO: 60875 - protein, 102 aa, Zea mays
  Coding DNA Sequence Number=SeqID_19096
MPCLADPTAKTPRVHGGATSWLKLSELTRMEAVPAAPNSRPGIHALFPAILLASNAALFKPEPDEASVTTHLNMSSLQLPLCYLLAHGAELHLLASHIIPNI

SEQ ID NO: 60876 - protein, 102 aa, Zea mays
  Coding DNA Sequence Number=SeqID_19097
MAVRSLTRSRGAIGWWDAVFRVRGDVVKFVSQFDLSLGHRRGEGKLIRAKGAALARLSPGDGEGRGRGRCEEKGSSRRPFYRCPRVGSGRGWLAPVRSIAVA

SEQ ID NO: 60877 - protein, 94 aa, Zea mays
  Coding DNA Sequence Number=SeqID_19098
MGRPGWARMRLLHGVHGQEPDSVHRLLHQLGLRRLGSCAEHGDQPRACPRRGSQRKEAAGRDSGGGGVPRLPPTGPPTAGRLPDGDYRDYFRLP

SEQ ID NO: 60878 - protein, 129 aa, Zea mays
  Coding DNA Sequence Number=SeqID_19099
MGDSGGSVVSVDVERISFGGKRWVSASRGRYGIRWWFGRRRRDWCGGPLNSVTSGRNRISRVALLLRFLLRFRRLFRSVAFFLLMWIPNYRFGSRPLSTRITRPGLNPVAPARLVTGFPGLHFLVSSAS

SEQ ID NO: 60879 - protein, 406 aa, Zea mays
  Coding DNA Sequence Number=SeqID_19100
  Homolog annotation: Hit_ID=Q6Z8A8; Match level="QueryCoverage=67%, HitCoverage=61%, E-value=5e-77, Identity=57%"; Hit description=F-box family protein-like
  Subcellular localization annotation: CTP_CleavageSite=52; ConfidenceScore=5.24e-01
MESLLQSQGVAAALLPASRPRPRRGNRLRRRTRAQANIRHLVSVDDLRQVARDAATVGCGGADDHALNGRAPVETPTPERDNWNHLLLHATNSLALTASLASALAPASPTLPALRASAGVLLATAAVTMAAVNRMQPSQLAEEQRNATRLWRQLERDVRAALDHRTATTAEADDDVQEAMDRVLALDAAYPLPLFPGMLDKFPSAVEPTRWWPRRQPRKRPAQSAAKTVNGATASNCNGWTRELEDEMRGIVRVLRAKDEQEYVSNAKLALRLNRGLAVAGPALAGTAALATAFIGSSGEAGSLAPGAAVLCGALAAAVNTLEHGWQLGMLFDLFRNVAGFYRKIQEDIEACLDEVDVERRENGEVFQTKVALLLGRSTSDLSHFREMASPSFKDEDIKDFAGKLF

SEQ ID NO: 60880 - protein, 136 aa, Zea mays
  Coding DNA Sequence Number=SeqID_19101
MGKSNKRKREPTPPSEDFGDSEYSEEEFSSESEGSLAPVSPPASSDDSDDSQGLAAEVWTYIRAIERSGLEGSDESEYSSDEEDSSEEGGGGDGEDDDDDDGGDGGDDGDGGGRGGNGGSKGGNGGSSRGSNKASG

SEQ ID NO: 60881 - protein, 76 aa, Zea mays
  Coding DNA Sequence Number=SeqID_19102
MACSVDVGPSVPIREALPGHQQCVRDCAGQNLKAVVGKFLIDDCDRPYGAEVTHLGAIGYGAEVCANPDDVTPMWH

SEQ ID NO: 60882 - protein, 87 aa, Zea mays
  Coding DNA Sequence Number=SeqID_19103
MEQMQTLCWLSGAPTVCQLCANAQKRRRLNRVFDAIGFFYPDYPHAVQESKKRKKRAMPEATSIPAIEETFLIITTLETHEATASKT

SEQ ID NO: 60883 - protein, 395 aa, Zea mays
  Coding DNA Sequence Number=SeqID_19104
  Homolog annotation: Hit_ID=Q69T18; Match level="QueryCoverage=84%, HitCoverage=60%, E-value=1e-163, Identity=79%"; Hit description =Tubulin-specific chaperone C-like
  Pfam annotation: Domain name=TBCC; Domain location=166-283; Score =218.4; E_value=1.6e-62; Accession=PF07986.2; Description=Tubulin binding cofactor C
MSLISTGGAVALDWSWYIHYASAREFSLRKWWAKVNKGASKEMRKDLNSLIILVLTMETFEHLGFFLQLSEGTPLSQAATFFANSDPDMPAAPVPAALKTVAKENSQHNAFDPDVTMSDAVTNTRIHSSSPTGSSAPNYPGYYRNASFVEGCSKTSVVKQASDLKGHSIKVLNCHDSVIYILAPLKYATVYGCSDTTIILGAIGKVVKVEHCERVQIIAASKRICIANCRECIFYLGVNHQPLIVGDNHKLQVAPFNTYYPQLGEHLAQVGVDPNVNKWDQPFVLGVVDLHDSLSHPAGVSDVQAESTTCLDPDLFTNFLIPSWFEVEGPTKYNPFTLPEVYWASQRKKHASLEDIQKNIRELEIDDIRKKELACALHAQFKDWLYVSSCNLGSS

SEQ ID NO: 60884 - protein, 254 aa, Zea mays
  Coding DNA Sequence Number=SeqID_19105
MAEAQGRDGATVAELRLCKNHSEGANGRGEVGEQGAGFKRGVGLGHGRRTRGRGCVHGGEIVGESPPRPCPAHAPSRCPSARVWERRRCLCALSAASRAPAQPRSPAHFAQPRAQPRSHAAARPAESVTCYSSSPTAHAHNLPLKHRDALISSSSFPKPSAPLPSPLPVGRAASSYVSNSQPRAAPSSSLSLPHVCVSPRMVARIVAVPCVGLAVPQRRRPSAACSHGCQPTAVAARGPARPALALARGWPASA

SEQ ID NO: 60885 - protein, 262 aa, Zea mays
  Coding DNA Sequence Number=SeqID_19106
  Gene Ontology: Mol. function=protein serine/threonine kinase activity; Biological process=apoptosis
  Homolog annotation: Hit_ID=Q53PN4; Match level="QueryCoverage=46%, HitCoverage=23%, E-value=2e-20, Identity=42%"; Hit description=NB -ARC domain, putative
MPVKWEPPSSQMLEYSPNDEAMRGGPMKALRRSSTSSAPSPRDAGDGDATTVAASSAGKRSFALCRSFSRAKRSRVTSLIVGGDGGTERLAAVAEELEGLTRDYMREFILLVQGYPRKVHRPERTTMYMDRCVFGRHVEKERVVDFLLQRAPYLSALAVVGAKKVGKTTLVKHACDDERVRGHFVCIEWFETPDVVRAGSLPGQYLWESGGPEYLAGVRRILGEPRFANAAGPSLLVFEDAWPMDESAWAALASSPTPLGDL

SEQ ID NO: 60886 - protein, 167 aa, Zea mays
  Coding DNA Sequence Number=SeqID_19107
MEIPRDVYDLNINFRYLRMILDVQAALKYSCVDTTGCLGQFLALGAKVYAAEACEIVVLKEDARVKLVQRVIAQEEEEDLNWEVDDDEEEEQQRDNTEELAEHRQEPIKEKVRQDMAEKENVERIVEESGVETVEEAPGLVKEEKNDDTDGVMQEYYLLACAGGFSD

SEQ ID NO: 60887 - protein, 644 aa, Zea mays
  Coding DNA Sequence Number=SeqID_19108
  Gene Ontology: Mol. function=nucleic acid binding; Cellular component= chromatin; Biological process=DNA integration
  Homolog annotation: Hit_ID=Q8H6I0; Match level="QueryCoverage=95%, HitCoverage=36%, E-value=0.0, Identity=84%"; Hit description =Putative gag-pol polyprotein
  Pfam annotation: Domain name=RVT_2; Domain location=345-599; Score =503.8; E_value=1.9e-148; Accession=PF07727.4; Description=Reverse transcriptase (RNA-dependent
  Pfam annotation: Domain name=rve; Domain location=1-119; Score=68.4; E_value=2.4e-17; Accession=PF00665.16; Description=Integrase core domain
  Pfam module annotation: Pfam domain module=RVT_2::rve; Domain location=345-599::1-119
EKTQTQETLKGFLRRAQNEIGLRIKKIRSDNGTEFKNSQIEGFLEDEGIKHEFSSPYMPQQNGVVEKKNRTLLDMARTMLDEYKTSDRFWAEAINTACYAINRLYLHRILKKTSYELLTSKKANVSYFRVFGSKCFILIKRGRKSKFAPKAVEGFLLGYDSNTRAYRVFNKSTGLVEVSCDIVFDETNGSQVEQVDLDELDEEEAPCVALRNMSIGDVCPKESEEPPHAQDQPSSSMQASPPTQDEDQAQDDENEDQEEPPQEEDNDQGGDVNDQDKEDDDRPSHPRVHQAIQRDHLVNTILGDIQKGVTTRSRVAHFCEHYSFVSSIEPYRVEDTLRDSDWVLAMQEELNNFTRNEVWHLVPRPNQNVVGTKWVFRNKQDEHGVVTRNKARLVAKGYSQVEGLDFGETYAPVARLESIRILLSYATYHGFKLYQMDVKSAFLNGPIKEVYVEQPPVFEDSEYPNHVYKLSKALYGLKQAPRAWYECLRDFLIANAFKVGKADPTLFTKTIANDFFVCQIYVDDIIFGSTNKSTCEEFSRIMVQKFEMSMMGELKYFLGFQVKQLQEGTFIRQTKYIQDILTKFGMKDAKPIKTPIGTNGHLVLDMGGKSVDQKGVRLIERAHQELASSWEDLWCLGLLRNKIL

SEQ ID NO: 60888 - protein, 177 aa, Zea mays
  Coding DNA Sequence Number=SeqID_19109
  Homolog annotation: Hit_ID=O24587; Match level="QueryCoverage=32%, HitCoverage=5%, E-value=3e-25, Identity=89%"; Hit description=Pol
MADNPVEYSRTKHIDIRHHFLRDHQQKGDIEVYHINTENQLADIFTKPLDEKRFCRLRRSPIHPPLGALTWFLLKGLVPPYSSHNILSHPFVVRVPVACSMLAPSYQMSPTERVLGKVEVSDNSPEPSCNSLELVSGFLARVESPECAQAHQYDVAPEPRVICEDCLGVYLVHGRSP

SEQ ID NO: 60889 - protein, 118 aa, Zea mays
  Coding DNA Sequence Number=SeqID_19110
MGKRKKLKQKVSKLVNIQDLKRGLEKLSTALKPDKVGHARSSGKELDEENDFFVRHLASGDLNEEDASKLKEQAKAIGYNSRAMIFGGGKDVLVCIPKLEKLKLLRTLLEALGSQRSR

SEQ ID NO: 60890 - protein, 94 aa, Zea mays
  Coding DNA Sequence Number=SeqID_19111
MESHDLRAERESRLVGKVTTRLMDLVVTLVMMARLIHTARKSVIPFLPSRVVERPLRRPVTGQSGHLERMHHRLHEEQERQRQEQEQQGSSFSL

SEQ ID NO: 60891 - protein, 87 aa, Zea mays
  Coding DNA Sequence Number=SeqID_19112
MESSTFVRVSSSYMTSVRRKKVVASMATGVRRDDERRERPNVASELRSIAGAGWDDDLGTEMVVVGSKGAEVEVPDDGLGMAAAGGC

SEQ ID NO: 60892 - protein, 132 aa, Zea mays
  Coding DNA Sequence Number=SeqID_19113
MSPGWTNPGIHHQIDAPSGDSSHNRRWDARGCAKWKPIRWNLIIYSIPYYKSLAGAMDSGYYTNLLVNGVQESQAPPSDARAAVKGKCAFGPFLNILVIECQHKCLNVNLCPRMNKVQITSKETNGKLGRMT

SEQ ID NO: 60893 - protein, 950 aa, Zea mays
  Coding DNA Sequence Number=SeqID_19114
MAMARFLSWLFTCFAALAVLEATVPARSWRAPSPTPRHEARRFEQKTDRFWEYQEQSNTWVQVRAPFDLMSCINGTCTKVGSIGRLAREPGRHGLPPVQSQEEEEEDTRRVQGDGAEEDPVLPVRRRISLTRMSESSVWVTGQSGSIYERFWNGVVWVIAPHELPASAGYATATFIVNTTILALSEAGTLYQLQLNEHAQPIWTEMAFNSSQQSANLGLKTQSQAMRIRNGIVSNDGRKLFLSIMNGSLLEVTEIQPLRWNYHGRPPGADVSYISDAGNLRPGTLFTVRLDMQCSSTGDLYEFDKETKPSWKKHIWSEELAKNISLKSSAGFALHGLSGSNSVSLFLISKVVIDWQDGLLVERRLHRRKWKWDKHGAPTGQRLSSIAEVQKDELNDATSMFLTTTTGKVYEYQFPKYTGGAQSNKIRGQWINHMSPEHAKVARNVPGVHVQVGRMVFPLDDGRLGELHFPGMGGTDFGPSAQSTIRRKLSNKYEWSILDAPETEGWNAEYCTEEHGPTNCISGAKNIAADTESNDLSNNPPSRRRKVEEKQHYLNVNRYQQSDETESYNFLSRTIDLNFHMRVMHADRSLFLIADNGLTFEYLNSNGVWLWLRHEHVTAMKGTLGSYNGSLYLVDVHGNLHIRERNGDELLWINCTAMKKGRQVASGSPWDGIPGLLRRVTTDDALFFVNKRGRLLQFTVALRKFKWKDCHSPPDTKIAFIVDQEVFRRNIIFVVGRNGRLYQYNRITELWHRHYQSPHLFLSCSPGTAMRPSPLSLAGSLFMVSEHGGLVEYHFSPQDGWEWVEHGTPHRGVTLVGAPGPCFDGSQLFVVGSDGHVYRRHMEGRTWRWTSHGHPPSEPAAVDEQSCATPDTGAGAHYADGFRGSCDGKVAAVRPVPFSEDAVVFELRDGRLAELRRPPSADGCGGWEWARIIGTPASACMTSYWTAVAT

SEQ ID NO: 60894 - protein, 41 aa, Zea mays
  Coding DNA Sequence Number=SeqID_19115
MAALLVYRCKRCKSTCSTKCPPGSIHSIRQHAGSDWPVLDQ

SEQ ID NO: 60895 - protein, 55 aa, Zea mays
  Coding DNA Sequence Number=SeqID_19116
  Subcellular localization annotation: CTP_CleavageSite=28; ConfidenceScore=5.23e-01
MAAPPWHPSSCSNSGGKLALADQGSPASSSHPASLAVRRRHKQVEEKETVFPSHS

SEQ ID NO: 60896 - protein, 97 aa, Zea mays
  Coding DNA Sequence Number=SeqID_19117
MGYPNYPPKNAPIEIRMKPPRGDNREQTGPQSLRLAQSTVQTAGATSLPRPIPGLAFGRKISVSPDLEPSLRAQDLRFRPNPGPAFGRKISASPLGT

SEQ ID NO: 60897 - protein, 621 aa, Zea mays
  Coding DNA Sequence Number=SeqID_19118
  Gene Ontology: Mol. function=RNA-directed DNA polymerase activity; Cellular component=intracellular; Biological process=RNA-dependent DNA replication
  Homolog annotation: Hit_ID=UPI00004C1733; Match level="QueryCoverage =99%, HitCoverage=45%, E-value=0.0, Identity=92%"; Hit description =UPI00004C1733 related cluster
  Pfam annotation: Domain name=RVT_1; Domain location=56-225; Score =145.8; E_value=1.2e-40; Accession=PF00078.17; Description=Reverse transcriptase (RNA-dependent
  Pfam annotation: Domain name=RnaseH; Domain location=455-582; Score= -2.8; E_value=0.00011; Accession=PF00075.14; Description=RNase H
  Pfam module annotation: Pfam domain module=RVT_1::RnaseH; Domain location=56-225::455-582
MPGIPREVAEHSLDIRAGARPMKQPLRRFDEEKRRAIGEEIHKLMATGFIKEVFHPEWLANPVLVRKKEGKWRMCVDYTGLNKACPKVPYPMPRIDQIVDSTAGCETLSFLDAYSGYHQIRMKESDQLATSFITPFGMYCYVTMPFGLRNAGATYQRCMNHVFGEHIGRTVEAYVDDIVVKTRKASDLLSDLETTFRCLKAKGVKLNPEKCVFGVPRGMLLGFIVSERGIEANPEKIAAITNMGPIKELKGIQRVMGCLAALSRFISRLGERGLPLYRLLRKAECFTWTPEAEEALGNLKALLTNAPILVPPAVGEALLIYVAATTQVVSAAIVVERREEGHALPVQRPVYFISEVLSETKIRYPQIQKLLYAVILTQQKLRHYFESHPVIVVSSFPLGEIIQPREASGRIAKWAVEIMGETISFAPRKAIKSQILADFVAEWVDTQLPAAPIQPELWTMFFDGSLMKTGAGAGLLLISPLGKHLRYVLRLHFPASNNVAEYEALVNGLRIAIELGVRRLDARGDSQLVIDQVMKNSHCRDPKMEAYCDEVRRLEDKFYGLELNHVAQRYNETVAELAKIASGRTTVPPDVFSRDLHQPLVKTDDTPEPEKASAQPEAPSA

SEQ ID NO: 60898 - protein, 145 aa, Zea mays
  Coding DNA Sequence Number=SeqID_19119
  Subcellular localization annotation: CTP_CleavageSite=32; ConfidenceScore=5.39e-01
MAAALTLIQAATVAPCSALPSRSRSTASLVVRCARIMARENHDTSIYRAGEEPKAGSVRRADFGEFGAAVTTFRGRRSNGSGPTIQLTGEPGSTPVLAPTRQGTKSPRAEGLLASERVMRGKEEHPPGVDPQSSDWETRPCLRGH

SEQ ID NO: 60899 - protein, 193 aa, Zea mays
  Coding DNA Sequence Number=SeqID_19120
  Homolog annotation: Hit_ID=Q948Y5; Match level="QueryCoverage=39%, HitCoverage=10%, E-value=2e-28, Identity=79%"; Hit description =Replication licensing factor MCM7 homologue
  Subcellular localization annotation: CTP_CleavageSite=74; ConfidenceScore=5.50e-01
MLVGCISSAASQQTPHQISAGRNHNLPSFSSINTGVARLLGNPAHRMPMQWWLGAESSLLPPSCILAFSASHSLAAAATGTKNPDLAADKALARDFLSNFVGPHGDPKYLSVLQDVANRKIRAVQIELDDPFHHKDVDVVFLLRVIENARRYIDIFADRGHGIGAASITLRNPSMLFIVSSPTYCSVESWYGA

SEQ ID NO: 60900 - protein, 126 aa, Zea mays
  Coding DNA Sequence Number=SeqID_19121
  Homolog annotation: Hit_ID=Q9LHL2; Match level="QueryCoverage=39%, HitCoverage=13%, E-value=3e-12, Identity=68%"; Hit description =Similarity to RNA binding protein
MASSSCYAFLSTSACWISSANAHSTVLDVVSVLVEIKRTIPKGSVYSTSKDFKTKKIFAGGLPSTLTEEDFNRFFARYGTVVEIKKAAPNKSSNAPPPPVYGRNARSSYGSASRDHPSADNYGALV

SEQ ID NO: 60901 - protein, 442 aa, Zea mays
  Coding DNA Sequence Number=SeqID_19122
MGRTAGFSNWAERNEISPSADPSLLRYPRKVAEDLLPPSSAIPVIRAAINAPSRPPLPLLRDPPPQSVPLSSLPPNAYPSRQFSPPPRPSSSSSCTAPPPLNQRRGRWPRARARHLGARFTTHPRLPCLLLLHQLTLLQIWIPSSSPRSRPWCYCSAPSQISLYATSYRVRVHRIHASASAERASIITIARLRSPAPRVRVRNPRLRRWKAHPRLNPHAPDGIYSCLAAIQVSHMEGIIVGRNPRQNPRWMGSIALPPHPSLHPIYGPGDPRRINIASARRDFPTRAELLLNLHPHGTLSASSSAEPQLLCHDGGPLAHGRAPTGDPTPAPASLQRGLLVLALGGTVRYGYKSVTAVQPYAPRAAAVVVVQSSAVWQGPWRRRWKGIRKEQGEGFVTCGIDADVWCALGIPFAAETLSVSTASLLLSEHDLIWIFIRFLVHL

SEQ ID NO: 60902 - protein, 249 aa, Zea mays
  Coding DNA Sequence Number=SeqID_19123
  Homolog annotation: Hit_ID=Q9FL05; Match level="QueryCoverage=27%, HitCoverage=14%, E-value=9e-16, Identity=57%"; Hit description =Similarity to intracellular protein
MPAIKLLNEHTCKTTIPVTIGGLYKGTLVTCPFQQAMFGYAAHRKYVCPLLDDEKLDFNGSRKNLTLMIQRRTLCYPLLEEKGTQLHTRCDNGIILDFNNATIDHESLERLLFISHITEDFEEVQAVELMLVNALVEANDYLGTSLHAHDPEDFWKLDDTIIKTIETAPNNELKKAKEIIQRIRRRELYKGSVQLFHLIRIYELCLSPGFLIPSSVHFLQLLSIANQLLSNCTAGIGLLETPPLGLGNS

SEQ ID NO: 60903 - protein, 160 aa, Zea mays
  Coding DNA Sequence Number=SeqID_19124
MDYGDETTTPTRSTPWQSRIHGGQLAPIPRSLRTTMSPYETDSTQGPPSAPSRGWRHDFAQLRPRRHTTFSLYFSVHGDGSGMEERVAPETLGGYLSSTWTSREEGRGLRGRDPRARCGGDARYVRDSVEGAADKRIPRVSGNGEALGTCQAGPRRSECN

SEQ ID NO: 60904 - protein, 92 aa, Zea mays
  Coding DNA Sequence Number=SeqID_19125
MACGNGRRERFAEVVSDAEACGACGIAAGLRRGVGMVVGRHRRFRGGLRRDCGLGSRRAEVGGFGGDVSDVRRETGKSVYNGVMPMAASGRW

SEQ ID NO: 60905 - protein, 87 aa, Zea mays
  Coding DNA Sequence Number=SeqID_19126
MMVQIIEHRDLPSKDVPMEEGAASSVPRGSNRLVPDVDPRAIDLAMRIAERMFLKMKEVTVKAKVRMRRSKKVIVKMRMIFNNSSLS

SEQ ID NO: 60906 - protein, 219 aa, Zea mays
  Coding DNA Sequence Number=SeqID_19127
  Homolog annotation: Hit_ID=Q8H8J8; Match level="QueryCoverage=37%, HitCoverage=12%, E-value=1e-24, Identity=69%"; Hit description =Putative zinc finger protein
  Pfam annotation: Domain name=DUF1218; Domain location=82-197; Score =175.3; E_value=1.5e-49; Accession=PF06749.3; Description=Protein of unknown function (DUF1218)
  Subcellular localization annotation: CTP_CleavageSite=68; ConfidenceScore=5.48e-01
MAGSTKVLAAILLVDLVAFGLAIGAVQSRPSVHSYCRRLSSLPAFSFSRSLTRAPPPLFSLFAVPVPQARLETDERQEWTYCVYRTDAATALGGAALALVFVGQAVAAAASRCFCCGSVLRPGGARACALVLFISSWVTFVIAEACLLAGLLQSAYHTGYRKVFFQNPPDCETVRRGTFGAGAAFALFTCVLTSAYYYCFSKARIYYHRPEAAIGMTPL

SEQ ID NO: 60907 - protein, 137 aa, Zea mays
  Coding DNA Sequence Number=SeqID_19128
  Homolog annotation: Hit_ID=P49597; Match level="QueryCoverage=44%, HitCoverage=14%, E-value=8e-10, Identity=51%"; Hit description =Protein phosphatase 2C ABI1
MRGNAIRGGGGEAGKSDDAVTLIPEPVAPKTMGSAVVIAIIYSSHIIVSNYGDSWAVICRGKQTYVLVLQPNSDYEYARIEGEGGKFNLKFSDKECNSNNKDITCFKHYTSKFKEAMKVVNLAYNQLYPLTKFVRWY

SEQ ID NO: 60908 - protein, 67 aa, Zea mays
  Coding DNA Sequence Number=SeqID_19129
  Gene Ontology: Mol. function=DNA binding
MAVTYTCRNSDGFDVPSYFSGSEVLIEVAPIDVLAALARPFQRYPGIYSRTPAVEFCPEIIGLRAPH

SEQ ID NO: 60909 - protein, 57 aa, Zea mays
  Coding DNA Sequence Number=SeqID_19130
MGVTLMPIEEPLLELERPPIFSAQVYSDSDQNHNMKKHKEHEGGRRAEAMCRRASAR

SEQ ID NO: 60910 - protein, 90 aa, Zea mays
  Coding DNA Sequence Number=SeqID_19131
MVVDLTLPPLHLVVEQFHRRRRQRSSHQVLPPLHPETTDQAKDGGKKSFEVPSAREKVKETRNPKAGVKKKTCKVKVDRVKSYGASRITT

SEQ ID NO: 60911 - protein, 389 aa, Zea mays
  Coding DNA Sequence Number=SeqID_19132
  Homolog annotation: Hit_ID=Q56XM8; Match level="QueryCoverage=94%, HitCoverage=67%, E-value=2e-83, Identity=47%"; Hit description =Nodulin-like protein
  Pfam annotation: Domain name=MFS_1; Domain location=28-386; Score= -44.8; E_value=0.035; Accession=PF07690.6; Description=Major Facilitator Superfamily
  Pfam annotation: Domain name=Nodulin-like; Domain location=47-263; Score=278.5; E_value=1.3e-80; Accession=PF06813.4; Description =Nodulin-like
  Pfam module annotation: Pfam domain module=MFS_1::Nodulin-like; Domain location=28-386::47-263
MGEARGEAAGLLQEPMGWCWWPQCGCSPWPASATSSAPSRRCSRPRLGYNQRQLAALAVAKNVGGYVGVVAGTLSAALPAWAMLLMGAAQNLLGYGWLWLIVTGQAPPLPLWMMCVLIFVGNNSATYFNTASLVTCVQNFPASRGPMVGILKGFLGLTSAILTQVYAVTRATDQASLILIIAVGPSLVAVAVMLVVRPVGGHLQARASDRVSFVFVYAVCLLLASYLAGVKLVQDFLQLSDGVVVSLTVVLLVLLVSPVAVPVALTLTPEAECPIREALLSSSEPLTGEGNASQESPPCASESGGRPAPYLGENFTMMEALVKADFWLIWVSFLLGSGSGLTVMDNLGQMSQALGFEDAHIFVSLTSIWNFLGRIGGGYFSEIIATYRP

SEQ ID NO: 60912 - protein, 163 aa, Zea mays
  Coding DNA Sequence Number=SeqID_19133
  Gene Ontology: Mol. function=carboxyl- and carbamoyltransferase activity; Cellular component=ornithine carbamoyltransferase complex; Biological process=amino acid metabolic process
  Homolog annotation: Hit_ID=Q8SA97; Match level="QueryCoverage=64%, HitCoverage=15%, E-value=2e-10, Identity=41%"; Hit description =Ornithine carbamoyltransferase
  Subcellular localization annotation: CTP_CleavageSite=22; ConfidenceScore=5.23e-01
PSPSPGSGGAEFAVFRGLARVRALGQAERSSPSSGTKPESEPWVGRSEVRRLPGLSPSPSPGSGGAELPVVPSAGPDCLSVSLCQVAPQSEWHRRRCPSVRPLCADGGYQLRIRSLEGAQRHAQKYLRVICRTWSPSDGVRGLDASLRWDSVTRSFPLVSEMS

SEQ ID NO: 60913 - protein, 143 aa, Zea mays
  Coding DNA Sequence Number=SeqID_19134
  Gene Ontology: Mol. function=protein binding; Cellular component =intracellular
  Homolog annotation: Hit_ID=Q01FY7; Match level="QueryCoverage=88%, HitCoverage=66%, E-value=2e-32, Identity=49%"; Hit description=[R] KOG3157 Proline synthetase co-transcribed protein
MEGSTLSCSPTTVFLHCSKYKAGVPNLDMVESVDDEKIANRLDRVVADLGRKPLKVLVQVNTSGEESKFGVDPSGCMELAKHVKLNCPNLVFSGLMTIGMLDYSSTPENFKALANCREEIEMGSTNVRVGSTIFGAREYPKKN

SEQ ID NO: 60914 - protein, 515 aa, Zea mays
  Coding DNA Sequence Number=SeqID_19135
  Gene Ontology: Mol. function=protein binding; Cellular component =nucleus; Biological process=multicellular organismal development
  Homolog annotation: Hit_ID=Q570C0; Match level="QueryCoverage=95%, HitCoverage=95%, E-value=1e-155, Identity=51%"; Hit description =TRANSPORT INHIBITOR RESPONSE 1 protein
  Pfam annotation: Domain name=F-box; Domain location=15-63; Score =21.2; E_value=0.0037; Accession=PF00646.23; Description=F-box domain
MGRGGARAAPAAAVPPWHALPDEVWEHAFSFLPADSDRGAAACACHAWLRFERRSRRRLAVANCYAASPRDAVERFPAVRAVEVKGKPHFADFGLVPPAWGADAAPWVAAAAAGWPLLEEISFKRMVVTDDCLEMIAASFRNFQVLRLVSCEGFSTAGLAAIAAACSNLKTLKLNNAIPLDKLANLLRKAPQIVELGTGRFSADYHPDLFSKLEAAFAGCKSLRRLSGAWDAVPEYLPAFYCVCEGLTSLNLSYATVMDLIEDHGLAVVASSCNKLQELRVFPSAPFEAAEQVSLTERGLVDVSASCPMLESVLYFCRRMTNEALITIAKNRPNFTCFRLCIIEPHTPDYITHQPLDAGFSAIVESCKGLRRLSVSGLLTDSVFKSIGAHADRLEMLSIAFAGNSDLGLHYILSGCKSLKKLEIRDCPFGDKPLLANAAKLETMRSLWMSTCSMTLGACRQLARKMPRLSVEVMNDPRRGFPLDSLTDESPVETLYVYRTISGPRSDTPACVQIL

SEQ ID NO: 60915 - protein, 70 aa, Zea mays
  Coding DNA Sequence Number=SeqID_19136
MAWKRLEELKNAAERARVIAKLSPPPEPYNPEVDPSLKGALDIIRVANEAVDEGVQRQLDEAAEKVLKDD

SEQ ID NO: 60916 - protein, 118 aa, Zea mays
  Coding DNA Sequence Number=SeqID_19137
MSMYSSVNDPDRGSIEPLTLSEIKARVKVISVLPSEPFMDEDLLHPPFLGHAGDLASPSFHSSLFSFCFVRDVESWFLQGISPLAPSLPPLPEGGGTVQLEHKRKRSDRETLGRMSHL

SEQ ID NO: 60917 - protein, 135 aa, Zea mays
  Coding DNA Sequence Number=SeqID_19138
MATQPTEAAAMVCQGKGRGATRVRRKKSMAIGGRIGGEDFSTRHGDAEARRRGWNVDSGRELRRTGEEIGCSSKVRAARGFIGCYAIARRELFLGLRTERRGGEFLSAGAYRAEVVARLTGSVGTCASTQPSRRS

SEQ ID NO: 60918 - protein, 472 aa, Zea mays
  Coding DNA Sequence Number=SeqID_19139
  Gene Ontology: Mol. function=cation transporter activity; Cellular component=membrane; Biological process=cation transport
  Homolog annotation: Hit_ID=Q84NH0; Match level="QueryCoverage=87%, HitCoverage=100%, E-value=3e-65, Identity=71%"; Hit description=Zinc transporter
  Pfam annotation: Domain name=Cation_efflux; Domain location=58-418; Score=243.8; E_value=3.6e-70; Accession=PF01545.11; Description =Cation efflux family
MESHNPSHSQIAEVTMDIAASASGAAGSKFCKGAACDFSDASNSSKDARERSASMRKLIVAVVLCVVFMAVEVVGGIKANSLAILTDAAHLLSDVAAFAISLFSLWAAGWEATPRQSYGFFRVEILGALVSIQLIWLLAGILVYEAVVRLVGESGDVRGSLMFAVSAFGLAVNVLMAVLLGHDHGHGHGHGHGHSHDHGHGHGDSDDGHSHHDDEEQEQGRVHHHEHGHGGAITVTTHHHHHHHDHDVEEALIKHEGTQSAGRAGKKPRRNINVHSAYLHVLGDSVQSVGVMVGGAIIWYKPEWKVIDLICTLVFSVVVLFTTIRMLRSILEVLMESTPREIDATRLESGLCGMEGVVAVHELHIWAITVGKVLLACHVTIARDADADEILDKVIGYIKTEYNISHVTIQVERDRMDLWEKKLGQMVAWRRCLRGGDGTLLAGRRGAGTYTGRREAMARCSQQGGRRDTPPA

SEQ ID NO: 60919 - protein, 134 aa, Zea mays
  Coding DNA Sequence Number=SeqID_19140
MRSLPAPRRDVTPVDHASCWIPSLLRNPSPHPRPPPPPEIAGLPHLIPLLAWAAPRSRRGRRTRKAVKLVTLTEFTFDGHEGLDFYDVSLVDRYNLSMMVEPHDYRILTFRLLGSSHSSLVPGSPQPAPGSRDG

SEQ ID NO: 60920 - protein, 124 aa, Zea mays
  Coding DNA Sequence Number=SeqID_19141
MKTRAACSLRFEFGDKVLPSTGNGVLKIVIAQFLTELPRGHVEPCPCCAHVAFLETGMNPRVLMAFNFCYSVVSATASHHRVTAMPPPRRKRKAAPSEPRRHPPSRLEFHAIVDGAWYEARVAM

SEQ ID NO: 60921 - protein, 68 aa, Zea mays
  Coding DNA Sequence Number=SeqID_19142
MEDVEDLTVSESVEGVEELTASYSGDRGGRWGNRGCGGGMRGHRAGSGRGLGARCGGGGGRWRHGEAL

SEQ ID NO: 60922 - protein, 153 aa, Zea mays
  Coding DNA Sequence Number=SeqID_19143
MGISSPWVERESWLMGKVVRIVTTAQEKAKPWKETSRSSKTTTNSRALGSGGAEFAVFRDLARVRALGSGGAELPMVPLAGPDCLSVSLCQVALQSEWRRRRCPSVRPLYADGGYQLRIRSLEGTPNYGPRHFYRRKEWIQVYNGGYSRVLRV

SEQ ID NO: 60923 - protein, 124 aa, Zea mays
  Coding DNA Sequence Number=SeqID_19144
MGMHRGRRTSRSLGDVLHAREKLGRLQGSYLGLMCARFDVCQTGNGEGELAKGAATQGHREPRPGPAPAGSWDAAAHWRRKRRREREAYPDGEARWCRRRALVVVKPTPKSNLRMPPKGHEKDL

SEQ ID NO: 60924 - protein, 354 aa, Zea mays
  Coding DNA Sequence Number=SeqID_19145
  Gene Ontology: Mol. function=peptidase activity
  Homolog annotation: Hit_ID=Q6K722; Match level="QueryCoverage=70%, HitCoverage=91%, E-value=2e-95, Identity=64%"; Hit description=OTU -like cysteine protease-like
  Pfam annotation: Domain name=OTU; Domain location=166-278; Score =137.3; E_value=4.3e-38; Accession=PF02338.9; Description=OTU-like cysteine protease
MDAYCIMVYALEALLWDGFPPCALRSHRRTAWARRMNMCEKDQNLPWGYDLFRDPFAPPNGYYGPPPGYCDGHCCDLHHYGRGSTHEHEHEHETVYVEPSSSSPDTGGDGCFEMEEEVGKRFYPMVPVPHVPKINGEIPSIDEATMDHERLTERLRLYELVENKVKGDGNCQFRALSDQLYQSPDHHEFVRSQIINQLKTNRDAYDGYVPMAYDDYLEKVARNGEWGDHVTLQAAADKYGVKIFVMTSFKDTCYIEILPKVQKSNKVILLSFWAEVHYNSIHPQNVVGIMCKHNQTSSVYCVGEDDSVDQVVVPVPAIVQMILQGTYDIMINIYIPRAEQKDLIRELVGMNEME

SEQ ID NO: 60925 - protein, 337 aa, Zea mays
  Coding DNA Sequence Number=SeqID_19146
  Subcellular localization annotation: CTP_CleavageSite=66; ConfidenceScore=5.18e-01
MDELTCSSQMSLPLPPLGLPQADASAPPPHSLTPVYLPRSPATTLAPRRQPPLLLFPPTPLLLFLEAARRLSDGVKTKALTLHLLLLWGSSGSRRSYKEVLIAEKPPDPRVGDGGWVRVVGQRDHRRRSCLSKPSSSPVPVDLRGKEPSPVEASICAMEGNSRVGGAGNGGGLKKRTRRGQRRRKKVLGGGQDVHGSSSRASPLPSSSSPSKDSAPLVRIFGRSRMVDRAEDDLHCALVVTVLGQESSDCAAEVLYALASRLGLAADELQLRRAASNSFMVFFPFEDHVVHAYNGGQSLFIPSRLHLKRWSRQALVANGGVLHVLLDVELSGLPTHL

SEQ ID NO: 60926 - protein, 228 aa, Zea mays
  Coding DNA Sequence Number=SeqID_19147
  Gene Ontology: Mol. function=RNA binding; Cellular component=voltage -gated potassium channel complex; Biological process=potassium ion transport
  Homolog annotation: Hit_ID=Q6K9R1; Match level="QueryCoverage=57%, HitCoverage=13%, E-value=3e-62, Identity=91%"; Hit description =Pumilio-like
  Pfam annotation: Domain name=PUF; Domain location=112-146; Score =35.7; E_value=1.6e-07; Accession=PF00806.9; Description=Pumilio -family RNA binding repeat
  Pfam annotation: Domain name=PUF; Domain location=154-188; Score =30.6; E_value=5.6e-06; Accession=PF00806.9; Description=Pumilio -family RNA binding repeat
  Pfam module annotation: Pfam domain module=PUF::PUF; Domain location =112-146::154-188
MIPLSHNPHPATIANAGVWGLFCDQHLLIRTTRSTATPKKQQMKRQGLRLHTIAEPSSSLQEEQQRGGWEKEERRLTTGSKGGGRRPWKIDRREAHVLQHGKPEERSTIITQLAGQIVKMSQQKFASNVVEKCLTFGNPEQRQILITEMLGTTDENEPLQAMMKDQFANYVVQKVLEICDDQNRELILSRIKVHLNALKRYTYGKHIVARVEKLIAAGERRIGAPSSC

SEQ ID NO: 60927 - protein, 67 aa, Zea mays
  Coding DNA Sequence Number=SeqID_19148
LEVSDEHEAEECRRPTVVGNVGRDRQTEGVADGGGGQQRRALAASPAEEDAGGLTGGGGHKRCWIMG

SEQ ID NO: 60928 - protein, 581 aa, Zea mays
  Coding DNA Sequence Number=SeqID_19149
  Gene Ontology: Mol. function=protein kinase activity; Cellular component=integral to membrane; Biological process=protein amino acid phosphorylation
  Homolog annotation: Hit_ID=Q1SE30; Match level="QueryCoverage=61%, HitCoverage=77%, E-value=2e-51, Identity=36%"; Hit description =Protein kinase
  Pfam annotation: Domain name=Pkinase; Domain location=177-472; Score=- 54.7; E_value=2.7e-05; Accession=PF00069.15; Description=Protein kinase domain
  Pfam annotation: Domain name=Pkinase_Tyr; Domain location=177-468; Score=-58.1; E_value=6.6e-09; Accession=PF07714.7; Description =Protein tyrosine kinase
  Pfam module annotation: Pfam domain module=Pkinase::Pkinase_Tyr; Domain location=177-472::177-468
MVDGKTAIDKNMCFVNVVASHPSLGRCFPALTTTHPSQFTHAGESERQTAKKDQASFSVSTSKHAPDSRGPPMAGPKPRKPDRMCKSKSDIAASTSSSAMAASTPRHHRSPRTTSTSFPEVSSYSTSSSFTASSLAAFRDSLPELPLLFTFQDLAAATANFSAAHRLVPAAPSSNSFRCALRGHPAAVFRRPLRRDARDVAARLAALGHCHHAAIARLLGAAASPDRTTLFLAYELVPNASPLSVLLRNPKNPSFTPLASWHSRLQLAVDVCDALYYVHLQADTVHNRLSASSVLVCGDGPLPRAKIAHFGAADLAGELPVEHKDDDDDGGGGGSRGSSGSGDNRRTRSRGRRIEGTRGYMAPELVAGGPPSRRSDVFALGVVLLELVSGQEPVRYELLNRGTGEYERTSLIDTAAAAVAEGMRRWVDRRLRDSFPVDAAQSLTTLALLCVAKDPLARPDMSRVAAKVSKLFLEAQEWAAKFKVPTDISISIAPRLPRLVFLAVDDVDVSEFWWSVQLLLLMMWMCLNSDASASMEPGRLVRLAPVVDGTHDSRPRLIRFLFFHLIPIPIPYAMHQRGGTL

SEQ ID NO: 60929 - protein, 420 aa, Zea mays
  Coding DNA Sequence Number=SeqID_19150
MVFTGVFIGNRGTALPYQGRLCPWLPTLSPEYSPLGGYGGPLQLPEKRLRFRTTVDASETQVIEAMQKIASHIGNASKFSKASKLALQLIEAGSVKPGTIGHFFAILEAAMSSPGVCNEPSVRADYHKLFDAAQGVTEVKFLMYLKRIVARLCQLATFTNNLRLNVQLLNQEQKNRFNIWVLHAVVANDLFTDDSFVFSKAVGKIKDAISALPVATVDDDNDEAAALAAASKTDVATDNEAGHGVPAAASDSVVDDGAHAVALEPEEESSDPFGLDGLLEHRPKKTSGRAREKAVAALNRKTVEEEAKRVLKSQREALLKCLEIAARRYRIPWTQTAIDILAKQAYDDAARFTRRQRDAIAKLWNSIKEQQIRRKQGKSVSGKLDVNAFEYLQEKYSREKMSIRHSVGGGGDRRATQWLG

SEQ ID NO: 60930 - protein, 811 aa, Zea mays
  Coding DNA Sequence Number=SeqID_19151
  Gene Ontology: Mol. function=RNA-directed DNA polymerase activity; Cellular component=intracellular; Biological process=RNA-dependent DNA replication
  Homolog annotation: Hit_ID=UPI00005A975E; Match level="QueryCoverage =99%, HitCoverage=46%, E-value=0.0, Identity=87%"; Hit description =PREDICTED: similar to Retrovirus-related Pol polyprotein from transposon 297
  Pfam annotation: Domain name=RVT_1; Domain location=56-225; Score =146.7; E_value=6.2e-41; Accession=PF00078.17; Description=Reverse transcriptase (RNA-dependent
  Pfam annotation: Domain name=RnaseH; Domain location=455-582; Score =7.5; E_value=1.2e-05; Accession=PF00075.14; Description=RNase H
  Pfam module annotation: Pfam domain module=RVT_1::RnaseH; Domain location=56-225::455-582
MPGIPRDVAEHSLDIRAGARPVKQPLRRFDEEKRRAIGEEIHKLMAAGFIKEVFHPEWLANPVLVRKKGGKWRMCVDYTGLNKACPKVPYPLPRIDQIVDSTAGCETLSFLDAYSGYHQIRMKESDQLATSFITPFGMYCYVTMPFGLRNAGATYQRCMNHVFGEHIGRTVKAYVDDIVVKTRKASDLLCDLEVTFRCLKAKGVKLNPEKCVFGVPRGMLLGFIVSERGIEANPEKIAAITSMGPIKDLKGVQRVMGCLAALSRFISRLGERGLPLYRLLRKTECFAWTPEAEEALGNLKVLLTKAPILVPPADGEALLVYVAATTQVVSAAIVVERQEEGHALPVQRPVYFVSEVLSETKIRYPQVQKLLYAVILTRRKLRHYFESHPVIVVSSFPLGEIIQCREASGRIAKWAVEIKGETISFAPWKAIKSQVLADFVAEWVDTQLPTAPIQPELWTMFFDGSLMKTGAGAGLLFISPLGKHLRCVLRLHFPESNNVAEYEALVNGLRIAIELGVRRLDARGDSQLVIDQVMKNSHCRDPKMEAYCDEVRRLEDKFYGLELNHIARRYNETTDELAKIASGRTTVPPDVFSRDLHQPSVKIDDSSEPEVPSAQPEAPSARPEAPSVQPEVPSASEGEALHVEEERSEATPDRNWQTPYLQYLRQGELPLDRAEARRVARRAKSFVLLGDEKELYHRSPSGILQRCISIAEGQELLQEIHSRACGHHAAPRALVGNAFRQGFYWPTAVADATRIVRTCEGCQFYAKQTHLPAQALQTIPITWPFAVWGLDLVGPLQKAPGGYTHLLVAID

SEQ ID NO: 60931 - protein, 975 aa, Zea mays
  Coding DNA Sequence Number=SeqID_19152
  Gene Ontology: Mol. function=nucleoside-triphosphatase activity; Cellular component=membrane; Biological process=transport
  Homolog annotation: Hit_ID=Q53KA2; Match level="QueryCoverage=99%, HitCoverage=88%, E-value=0.0, Identity=75%"; Hit description=ABC transporter-like protein
  Pfam annotation: Domain name=ABC2_membrane; Domain location=725-922; Score=-8.0; E_value=0.0044; Accession=PF01061.14; Description=ABC-2 type transporter
  Pfam annotation: Domain name=ABC_tran; Domain location=402-592; Score= 141.3; E_value=2.6e-39; Accession=PF00005.17; Description=ABC transporter
  Pfam module annotation: Pfam domain module=ABC2_membrane::ABC_tran; Domain location=725-922::402-592
MRFYFDSLMGGDDTAEANYVRPNVNCNRSSWIDGCEPGWACSAGADQKINLQDTKNMPYRPLKCQSCCPGFFCPHGLTCMIPCPLGAYCPRSSLNTSTGICDPYNYQPPPGNPNHTCGAADIWADVVTTDDIFCPAGFYCPSTIQKLPCSSGYYCRKGSTSQTRCYKKSSCPPNSATQDITIFGALLVVASCLVLLIIYNFSGQILTNREKRQAKSREAAARHARETAQARERWKSAKGVAKKAGVGLQSQLSRTFSRKKGGGGGGGQSSQLQAGASTKVGDDAGGKKHSNLADMVRSIDDNPESDEGFNLEVGDKALKKPTGKEMHTRSQIFKYAYGQIEREKAMQQENHNMTFSGVISMAQDHDVSTRLSVEIAFKDLTLTLKGSKKKLLRSVTGKLSPGKVAAVMGPSGAGKTTFLSAIAGKATGCDTSGLVLINGRIEPIRGYKKIIGFVPQDDIVHGNLTVEENLWFNARCRLSAEMSKADKVLVVERVIESLGLQPVRDSLVGTVEQRGISGGQRKRVNVGLEMVMEPSVLILDEPTSGLDSASSLLLLRALRREALEGVNISMVVHQPSYTLYRMFDDLILLAKGGMTVYHGPVKKVEEYFTGLGIVVPERVNPPDYYIDILEGIVKPSLSSGGSVKDLPIRWMVHNGYDVPRDMLQSSSESESTSRGDAGHAPDEPSSVVSLLWGNLRDILGQKKDEYDYNKTSEDLSKRKTPGILRQYRYFLGRCGKQRLRDARIQGVDYLILCLAGICLGTLAKVSDETFGALGYTYTVIAVSLVAALLCKIGALRSFTLDKINYWRERASGMSSLAYFLSKDSIDHFNTVVKPIVYLSMFYFFNNPRSSIWENYIVLLALVYCVTGIGYTFAVFFQPGSAQLWSALLPVVLTLIATQQKDTILADLCYTKWALEAFVIANAQNYSGVWLITRCGSLVRSGYDIEHEALCIAVLIANGVLFRCVAFFCMVTFQKN

SEQ ID NO: 60932 - protein, 170 aa, Zea mays
  Coding DNA Sequence Number=SeqID_19153
  Homolog annotation: Hit_ID=Q6K719; Match level="QueryCoverage=81%, HitCoverage=75%, E-value=9e-44, Identity=65%"; Hit description=Zinc finger-like
  Pfam annotation: Domain name=zf-DNL; Domain location=94-158; Score =96.5; E_value=8e-26; Accession=PF05180.3; Description=DNL zinc finger
MATTRLLPLLRRRLAAAIAGSPAPYSLRGPSFPAPAAAGLRSLLKAAGASDTATEPQDQQHSETTPPPASVPTPESGLKVRDTSNLKISPRHDLAMIFTCKVCETRSMKMASRDSYENGVVVVRCGGCNNLHLMADRLGWFGEPGSIEDFLATQGEEVKKAFEPIKYAML

SEQ ID NO: 60933 - protein, 75 aa, Zea mays
  Coding DNA Sequence Number=SeqID_19154
  Subcellular localization annotation: CTP_CleavageSite=38; ConfidenceScore=5.15e-01
MAATLRLRILAAAATAAVVASSLVGVATASEAPGPIPRQLHRGRRRRRHRAPALRLLERSLWPPVGYPLPLELPP

SEQ ID NO: 60934 - protein, 777 aa, Zea mays
  Coding DNA Sequence Number=SeqID_19155
  Gene Ontology: Mol. function=DNA-directed DNA polymerase activity; Cellular component=DNA polymerase III complex; Biological process =DNA replication
  Homolog annotation: Hit_ID=Q2QW40; Match level="QueryCoverage=93%, HitCoverage=60%, E-value=0.0, Identity=66%"; Hit description=ATPase, AAA family protein, expressed
  Pfam annotation: Domain name=AAA; Domain location=499-689; Score =27.7; E_value=1.7e-06; Accession=PF00004.19; Description=ATPase family associated with various cellular activities (AAA)
MGGSEAICEASTEPQGKGRYELLCLLIVKFAVLIYALHIPFRFNQVMATIVEGCVGPSELHLKKELIALRKARFLRDPETCSSWRSPLSSKSFLSTSGVINHNEVGSSLSEKRTEPAAAPVKSEKKRKNVYLYNWRHHSNKSSESGVKLDVDDRQASVDCSLESPCISNGMDSRSDTCLEVPVSIYSVQGSNSCTPVKRTVRRVRRSSFSKKGAMRNSTVSKLLDLHVNSAEQSEDTENYNSETHEHLQKVGYFSHSTSPLFAASGCFSSTNPSKLLRVPRREGSSFSCTPVSTSSYYRYKGRNPSTVGSWDGTTAASLDDDGLNQPELLTNQRCGIPCYWSKRSKHKGSERSCSPSLSDTLRRKGTSLLCGSQTMHGRKKSSGSNKYGYLKKSSQGVPLLGDSSHFAYSSFDSASDEVSTIFGELDLEALSRLDGRRWSSCKSQDGIALSVSGADHVVSDHRSLSQKYRPRSFLEIVGQNFVVQSLSNAIARERIAPAYLFHGPRGTGKTSSARILSAALSCTATGETKPCGVCTECSDFFTGNGTNLIEVDATNRKGINRVRHLIENIPASATSSRYKVFVVDECHMVSSKVWSAFMKFLDEPLPRVVFIFITIDPENLPRSVVSRCQKYMFSKIKDIDIVCRLRKIAMKENLDVELAALDLIALNSDGSLRDAETMLDQLCLLGKKITPSLVNDLVGVVSEEKLLDLLEIAMSSNTAETVKRSRELMDSGVDPMALMSQLAGLIMDIIAGTYRLADPTCGGDGIGGRNSESLTF

SEQ ID NO: 60935 - protein, 77 aa, Zea mays
  Coding DNA Sequence Number=SeqID_19156
MGWLRSRALPRSGSSGAASTRCSARVRPVCPKRGIYILYDDVKSCQCEDVHVLWAILVESHGLPTPTPTPPLLSLKR

SEQ ID NO: 60936 - protein, 98 aa, Zea mays
  Coding DNA Sequence Number=SeqID_19157
MHRRTYLFAFFQHNLVASIAISSLDYFVYSTLTTVWQTWTTPRSRRFDNIVISIDFILYECLDCVAVFVYGALLLCHHQPGTSWRAAGLLVCCVYARN

SEQ ID NO: 60937 - protein, 365 aa, Zea mays
  Coding DNA Sequence Number=SeqID_19158
  Gene Ontology: Mol. function=transition metal ion binding; Cellular component=endoplasmic reticulum; Biological process=Golgi organization and biogenesis
  Homolog annotation: Hit_ID=Q5ZCF3; Match level="QueryCoverage=99%, HitCoverage=88%, E-value=1e-140, Identity=67%"; Hit description =Putative vacuole membrane protein 1
  Pfam annotation: Domain name=SNARE_assoc; Domain location=164-289; Score=-26.6; E_value=0.031; Accession=PF09335.1; Description=SNARE associated Golgi protein
MGRRKMSAAAPPSRSWSNVGGSVIPELRAKHKTDLQNLTLTKQPLRTLHFFLLAMLQYLKRLATYILSKGGFFFLLIVLLVASGILLVVSDGLHKKVLVCIHLCCIWVLILLCSLLRLFNVVEIDLKIAPYDTIQLKVGPSWLDKKCSEFGPPVYPASAHSVRIPVFDLLPQIQLEAVLWGIGTALGELPPYFISRAARLSGSESKAVQELDAATSKEDGPVASSLNRTKRWLLSHSQHLNFFSILILASVPNPLFDLAGIMCGQFGVPFWEFLFATLIGKAIIKTHIQVYSVSATLFIVSLCNNQLLYLIEKELIWIFGHVPGFSATLPSVIARLHAAKDKYLSPPAPVSPSSQMGVSTFGFNL

SEQ ID NO: 60938 - protein, 244 aa, Zea mays
  Coding DNA Sequence Number=SeqID_19159
MGARRDLTRSSKGSRADAGRNRTALEVGEAIVAEAPRPVTGELSMHDHDKRVEHEKGVGAVFIPLCGSQLSKDILRPPPDEDATARDTSECRASSMVEQMPPIKCSREGHHVSNDVVADSRAATRVASIHSQVDDSNSTTCASTCARRELAMSDWLADMTMSSTRSAGTPMERALPDIVPSSAFRRLNGLGPHPSPEPNPAVPPALKAPAPSPCPAVPRRTVRHHLSSVVPRRSSKIEDNPDFD

SEQ ID NO: 60939 - protein, 414 aa, Zea mays
  Coding DNA Sequence Number=SeqID_19160
  Homolog annotation: Hit_ID=Q945F5; Match level="QueryCoverage=26%, HitCoverage=25%, E-value=6e-19, Identity=44%"; Hit description=Auxin- regulated protein
  Pfam annotation: Domain name=DUF966; Domain location=18-411; Score= -50.1; E_value=8.6e-10; Accession=PF06136.4; Description=Domain of unknown function (DUF966)
MDSHKGAVVWGGGEVRRINVVYFLSRGGRSDHPHLFRVNHLSRAGVRLRDVKRWLSDLRGKDMPDNYSWSYKRKYKAGYVWQDLKDDDLVTPVSDNEYVLKGCDVRGTPPPRSQTPKRTCSLGENDQNHPVEVVLTPDSDESSPKPPPHADQDSPGGCESGRRSTVPFKVEKPQGLNNEQKQEEEQVVIKIEVSRSQNHQQHKHEEEENNDEEEEEEEAATKKADDTKAAAEEQQQPQGAGGVRSSHAHAVGKQARRMRVARALHNMLTCARADAVDDAALRPLARRQAGGGDGCPPPPTPTCPGMEGCGLGVSRKKTSRPRRGGGGKDKQRKRDGEKKHDAHRPATLPRCSQCGKEFKPQELHSHMQSCRGFKERMRRSTSADRRRNWTAAGRYPAESERPSSASAVFLLTES

SEQ ID NO: 60940 - protein, 106 aa, Zea mays
  Coding DNA Sequence Number=SeqID_19161
MEPELRPYFERKKKELVDGGASGSGTVTAVLELGDSALGLRDGGRSGSVKGTAALGLGEGDGGARALGDGGARARGQGRRRSGSCSGTGTWRQPGRRNCVSSGGKS

SEQ ID NO: 60941 - protein, 115 aa, Zea mays
  Coding DNA Sequence Number=SeqID_19162
  Subcellular localization annotation: CTP_CleavageSite=42; ConfidenceScore=5.30e-01
MSLGFCFFLGAFASEASAARLAPRTGGGGYRHSAALLMAPAAAAMSSSTTAVLQPPTGDDVGVLSRPLAAAAASITVSSSCHVGGRRALTSGSGAANPRRLLRLPPSGPSKRGHV

SEQ ID NO: 60942 - protein, 79 aa, Zea mays
  Coding DNA Sequence Number=SeqID_19163
MGIAPTLHYTELDDYIDWALCLPRVQTQVPEARSDAPLDENCNETTARPDVASGSGLGPFLTREPNPAAAAKGWLGCHV

SEQ ID NO: 60943 - protein, 108 aa, Zea mays
  Coding DNA Sequence Number=SeqID_19164
MARPHARGDSYGYPSIHPMFSAHAAQPAEVYADTRGPLAIRECPACYAVARARVVISQLRANVARFNDLCRAHRRNWPPWPRSCMVSRTLWPQMWLSLLPSQTAYMLG

SEQ ID NO: 60944 - protein, 51 aa, Zea mays
  Coding DNA Sequence Number=SeqID_19165
MEVIESRDICAELGDDNAGPRDSVTGRALTDGKNTETLLKLRHVEHIVHIR

SEQ ID NO: 60945 - protein, 100 aa, Zea mays
  Coding DNA Sequence Number=SeqID_19166
RNPQRACPELEEAPTRTSPPLFMTPRHREPLPRRPFTARPPHVVSPAPVSPSPALPGETPPRDVRIIGGNENDGFGIDSGDGEDEALEGDFQEFQDYDEF

SEQ ID NO: 60946 - protein, 90 aa, Zea mays
  Coding DNA Sequence Number=SeqID_19167
MGGIGDRGDCGLHVPQIFSSRHQVVPLILIVGAQLPKPRGVNRDPATHSSQSVLSGTAQLAPRAQGKAPVAKTVGAWAGGWGEPDAGPSS

SEQ ID NO: 60947 - protein, 300 aa, Zea mays
  Coding DNA Sequence Number=SeqID_19168
MAFARELVNLNFETLQHFNDKIDARTSEVLHDKTVLARSKARLRSEGHCAWAKATPLYGGSQDALRRHLGPFVSPSSRILMTNMFVRLFIQKSVGHLFCVFVFEAMHIWLAAEASYMMYTHVERRRRSIICRPAAQGDHRGGKAGSAGRARAAPLWVYSRVRPPARARRGVRAAAPTGRGRDSCGLWAWRGLARTASLSRNSNGGQPHPQRVAGAQAEPPRGLPTARVDQPASQPNQTKARHGNHRTRLLYSVPPADRACPAWGLFSPPQRLYFADSLYIQDHTCDVSCRVADVLSASVQ

SEQ ID NO: 60948 - protein, 170 aa, Zea mays
  Coding DNA Sequence Number=SeqID_19169
  Gene Ontology: Mol. function=metal ion binding
  Homolog annotation: Hit_ID=Q69QB2; Match level="QueryCoverage=54%, HitCoverage=23%, E-value=1e-19, Identity=54%"; Hit description =Putative RING-H2 zinc finger protein
MAEARERTVLLSIHQPGARIVKMFDSVLLLAAGSILHHGTVDQLRALLSLVWKSSDANKEVRRGGHEQGQRGEMVAAAGEESLRRTGLRERDGARSTQLGRSDRWPSFITRTLSSRVPFWSASRRAPDLEASSIAAGTTGGAAARTRREKMGDASDGSVTPAKGSVREEK

SEQ ID NO: 60949 - protein, 450 aa, Zea mays
  Coding DNA Sequence Number=SeqID_19170
  Gene Ontology: Mol. function=nucleic acid binding
  Homolog annotation: Hit_ID=Q75L03; Match level="QueryCoverage=46%, HitCoverage=30%, E-value=6e-19, Identity=32%"; Hit description =Hypothetical protein OSJNBb0041A22.17 (Os05g0114500 protein) (Putative RNA recognition ...
  Homolog annotation: Hit description=motif (RRM)-containing protein)
  Pfam annotation: Domain name=RRM_1; Domain location=214-283; Score =31.1; E_value=3.8e-06; Accession=PF00076.12; Description=RNA recognition motif. (a.k.a. RRM, RBD, or
  Pfam annotation: Domain name=RRM_1; Domain location=80-184; Score =9.1; E_value=0.02; Accession=PF00076.12; Description=RNA recognition motif. (a.k.a. RRM, RBD, or
  Pfam module annotation: Pfam domain module=RRM_1::RRM_1; Domain location=214-283::80-184
MAAEDQTPCTKLRPGKAKTRKKTKRDKWGQPISAAAADEEPSVEPEQEHPAGVVEAAVQVEKEEEEEATAAAEGYEPGKVVASGLPYTTTEADIRKLFEFYGPIQSMQLSRFPDSGNFRGLAFLCFEFCFLLDAEVVISCWIIFRWDHLLQSLNFYAARVYSEEDAIKSLELDGFKIGSRYMRVERCRVTATSNKKRKAEFETDPKKSEGCLSAYVGNLSWNVDENDLRGFFGPSKIASVRFAVDKRTGGSRGFCHVEFQDDESLEKGHSDEPVETAGQACQSGVFSQQPGLKSAAPSPADRKRARSGPKRRPQPWPDLGGSPPATSYVLAALDSLIVLCSAAGGCQPCWASLRWADLSKRQRRATTARHVIMLECTAGNPSFDGVQHERVHSRSLMSGVARDRASDALALRCAALVAVADPFGRPGRTRDGRPEPGEHTPPSHSWWCGV

SEQ ID NO: 60950 - protein, 310 aa, Zea mays
  Coding DNA Sequence Number=SeqID_19171
  Gene Ontology: Mol. function=motor activity; Cellular component =myosin complex
  Homolog annotation: Hit_ID=Q5ZB07; Match level="QueryCoverage=99%, HitCoverage=38%, E-value=3e-59, Identity=49%"; Hit description =Myosin heavy chain-like
  Pfam annotation: Domain name=Gla; Domain location=156-200; Score =12.4; E_value=0.084; Accession=PF00594.10; Description=Vitamin K -dependent carboxylationgam
  Pfam annotation: Domain name=IQ; Domain location=137-157; Score=19.3; E_value=0.014; Accession=PF00612.17; Description=IQ calmodulin -binding motif
  Pfam annotation: Domain name=IQ; Domain location=82-102; Score=11.9; E_value=2.2; Accession=PF00612.17; Description=IQ calmodulin-binding motif
  Pfam module annotation: Pfam domain module=Gla::IQ::IQ; Domain location=156-200::137-157::82-102
  Subcellular localization annotation: CTP_CleavageSite=93; ConfidenceScore=5.24e-01
MDGDHRRQAAAAVTVTQVSPARRLIAWLRLLFRAFVHRYGKVASWNAAGRPVFVVLAVFFLQRSLRRRYLSWKESSRLPLMAAAAVTVQTTVRAMAAQRELSVRKQTRAATRIQVLAYYTDQSTVAVLAVWSYLTTKRAAVICQRAWRQSVARKELRKLRLENLEREMLEEVCRLREMVDVLQQAVNDAETRAVNEREAAKDAMAQLEAASAIEETVVMVEDTEKVKSLSAEVDRLKDLLGAEMSETFAAKKALSEAELRNEKLARLLGVEEVKNKRLQDTLKRMEEKASSLDEENRMLRQAVASNPAIV

SEQ ID NO: 60951 - protein, 389 aa, Zea mays
  Coding DNA Sequence Number=SeqID_19172
  Gene Ontology: Mol. function=carbamoyl-phosphate synthase (ammonia) activity; Cellular component=cytoplasm; Biological process =pyrimidine base biosynthetic process
  Homolog annotation: Hit_ID=Q42601; Match level="QueryCoverage=81%, HitCoverage=75%, E-value=1e-140, Identity=53%"; Hit description =Carbamoyl phosphate synthetase large chain
  Pfam annotation: Domain name=CPSase_L_D2; Domain location=150-388; Score=312.9; E_value=5.7e-91; Accession=PF02786.7; Description =Carbamoyl-phosphate synthase L chain, ATP binding domain
  Pfam annotation: Domain name=CPSase_L_chain; Domain location=77-193; Score=148.4; E_value=1.9e-41; Accession=PF00289.12; Description =Carbamoyl-phosphate synthase L chain, N-terminal domain
  Pfam module annotation: Pfam domain module=CPSase_L_D2::CPSase_L _chain; Domain location=150-388::77-193
  Subcellular localization annotation: CTP_CleavageSite=48; ConfidenceScore=5.35e-01
MATSLSTPSQLRTSHCHARRYGRLLGLHPRVSCARCPAPRRAAALSVRANAASTDGDAAVTVRRFPAAPTKAGRLAGVKKIMILGAGPIVIGQACEFDYSGTQACKALAEEGYEVVLVNSNPATIMTDPGLAHRTYIGPMTPPLVERIIDAERPDALLPTMGGQTALNLAVSLADSGALDRLGGHRGATAHCAPRPSLSGARGGGIAYNKAEFEDICRAGLAASHTQQVLVEKSLLGWKEYELEVMRDMADNVVIICSIENIDPMGVHTGDSITVAPAQTLTDKEYQRLRDYSVAIIREIGVECGGSNVQFAVNPADGEVMVIEMNPRVSRSSALASKATGFPIAKMAAKLSVGYTLDQIPNDITKKTPASFEPSIDYVVTKVLFQSVS

SEQ ID NO: 60952 - protein, 73 aa, Zea mays
  Coding DNA Sequence Number=SeqID_19173
MAGARRWALDLGDDSDSGTRLRRTVTRRAGEGPTAEARGARATGRKTGGSAARRASGGCGLRCAVRRCGGSKP

SEQ ID NO: 60953 - protein, 501 aa, Zea mays
  Coding DNA Sequence Number=SeqID_19174
  Gene Ontology: Mol. function=protein phosphatase type 2C activity; Cellular component=nucleus; Biological process=two-component signal transduction system (phosphorelay)
  Homolog annotation: Hit_ID=Q1S458; Match level="QueryCoverage=65%, HitCoverage=63%, E-value=1e-107, Identity=60%"; Hit description =Protein phosphatase 2C-like
  Pfam annotation: Domain name=PP2C; Domain location=120-444; Score =105.0; E_value=2.2e-28; Accession=PF00481.12; Description=Protein phosphatase 2C
MVAVAAGRRAGGVGGRRRSGCGPGQAQQKLLAIAVAARFAEAVAPPSAEASRAGSGGCCVELLECLLGALSVNAAPPPAQHRRAVHSIRRRRPRGGGSADDRHADAPSGRIAGNGASASAAASLYTMQGRKGVNQDAMVVWENFGSKDDTIFCGVFDGHGPNGHLVAKRVRDLLPVKLSANLGKGEFKEISTSDVKSGTTKGVATEHRVEDTDASPGNEENGEYPEFFTALRASFLQAFYVMDRDLKAHRNIDCEFSGTTAVTVIKQGQNLIIGNLGDSRAVLGTRGEHNQLVALQLTVDLKPSIPSMFHFHILPKIKKNESFTGEAERIRQQSGRVFSLPDEPDVVRVWLPTFNLPGLAMARSFGDFCLKKYGIISMPDVFYHRITDKDEFVVLATDGVWDVLSNAEAVSIISNAPSQASAARFLVESAHRAWRTRYPTSKTDDCAVVCLFLKTEAATPKVPENLVTAKDEWSFVDGSSGCVALPTLPEPTSVVKDSSKD

SEQ ID NO: 60954 - protein, 181 aa, Zea mays
  Coding DNA Sequence Number=SeqID_19175
  Gene Ontology: Mol. function=protein dimerization activity
  Homolog annotation: Hit_ID=Q2QNH1; Match level="QueryCoverage=98%, HitCoverage=91%, E-value=2e-34, Identity=68%"; Hit description=HAT family dimerisation domain containing protein, expressed
  Pfam annotation: Domain name=hATC; Domain location=92-181; Score =43.9; E_value=5.6e-10; Accession=PF05699.5; Description=hAT family dimerisation domain
MAIVAIEEQPDNKPEDQGFTPEENIDHEPMVNSPPTENASVDEQPVFTEDIYDPINWDNLDNKSRDILVEKGPIRDENIANTFSFDGSSDVDLNDLISELSVLQLTLSDKPMSAMDIFEYVREVDSYPNTAIAYRLLFTVSVTVASAERSFSKLKLLKNYLRSKMSQERLNGLAIYASRKY

SEQ ID NO: 60955 - protein, 98 aa, Zea mays
  Coding DNA Sequence Number=SeqID_19176
MSGGSTKGEMETGTSHVKAQSKESGTKGREESPPRFKSHRSGNKKKEMKKVVYYETDSSSPSTSGSDPPSVTSKRHEHKKFSKPPVFMVKIIVCGVIK

SEQ ID NO: 60956 - protein, 98 aa, Zea mays
  Coding DNA Sequence Number=SeqID_19177
MYVRSLSRPCSLRPRLADPAIPAAPVRRPRGCSKEGNSDPAINAHALCAPASVIPINALPAINAAPVRRPRCCSKESLLQSAIPEPSINALLYSARLQ

SEQ ID NO: 60957 - protein, 282 aa, Zea mays
  Coding DNA Sequence Number=SeqID_19178
  Homolog annotation: Hit_ID=Q6EPN1; Match level="QueryCoverage=34%, HitCoverage=49%, E-value=1e-30, Identity=68%"; Hit description =Putative BRH1 RING finger protein
  Pfam annotation: Domain name=PHD; Domain location=188-234; Score=0.3; E_value=0.053; Accession=PF00628.19; Description=PHD-finger
  Pfam annotation: Domain name=zf-C3HC4; Domain location=189-231; Score= 39.0; E_value=1.6e-08; Accession=PF00097.15; Description=Zinc finger, C3HC4 type (RING finger)
  Pfam module annotation: Pfam domain module=PHD::zf-C3HC4; Domain location=188-234::189-231
MTAGASKRTQRIDGAKTAESASYDVVFEKKGPGAHNRGEPRRGARFGSPRLPSTTHRQAPYLQEAPGQARRFTTPPHPTFPLHHTTTASQEARPRMGFPAGYSELVLPKQLLHLLLLLGYVRRFLLWAFDAVGLGDLLDLGDDHQAPQPQPQHRRAEFRAAMPAMVIEEALPVARFDELEARVVVGGDCAVCLGGIGGGDEVRRLGNCRHAFHRACLDRWMEHDQRTCPLCRAPLIPGAALWPADASDLDFSYPGAPLTPVVPSPTLLRPHELLLLAGLGGY

SEQ ID NO: 60958 - protein, 110 aa, Zea mays
  Coding DNA Sequence Number=SeqID_19179
MVKNDHPGRRVALRMTSNSDCARCDLKDRRSQRDVDKCVGPPDRTELPSHWSSHTCRHGYGGRPIHVWNMLEFTSPGQFHDILAQAEAAAFDDPKCDDDSYEYVCQQEVY

SEQ ID NO: 60959 - protein, 189 aa, Zea mays
  Coding DNA Sequence Number=SeqID_19180
MKPQVECGFHPRIKIFAHTRAPTGRTVSGAPEAVQSELFTFEFLRPRSAIIHRIVQKPGPAKGTIGSSARPRARTRAQPRKTANSAPPDPGLGLGLSPGRRRTPLRPTQGSDSGSAPEDGELRSARPRARTRAKTRKTTNSASPDPRARARAQPQKTTNSAPPDPGLGLGLSPGRRRTPLRPTQGSDSG

SEQ ID NO: 60960 - protein, 63 aa, Zea mays
  Coding DNA Sequence Number=SeqID_19181
MQILLAKGSTVHFDDLGTCCLVAAPLLVAAGSEIMMTLFTEINLKYVTDNEWDRGSAEDCLVH

SEQ ID NO: 60961 - protein, 314 aa, Zea mays
  Coding DNA Sequence Number=SeqID_19182
  Gene Ontology: Mol. function=nucleic acid binding
  Homolog annotation: Hit_ID=Q10M01; Match level="QueryCoverage=65%, HitCoverage=27%, E-value=7e-25, Identity=71%"; Hit description=Zinc finger C-x8-C-x5-C-x3-H type family protein, expressed
  Subcellular localization annotation: CTP_CleavageSite=60; ConfidenceScore=5.09e-01
MEAAADQQQQCQDFLIRSKGQRLGPAAFPYSPTGSLPGSPSAASKCLSFLLQQQQQQHDRAAAAASLMLGGSDEAHKFMARPRLDRADFASLMIYYYYNPTVGVHTGGAVHVLPPTTRPAHGRIPPAAAPSTTASSPSRINSVAVRTIHGPQFASQFAQSMAGDALLDDLQLQEQLAFLNEGGGYPAHQLQGFDGVECRSPDPGDADGMFAFGLGWHNGGQRTAGAHARMLQHSNSANELLLRRKLEEEQQAAELQHAIELQSRRLMGLQLLDLKARAAATAAAASALPTPVANAFASSHPLSTMAVESPLESE

SEQ ID NO: 60962 - protein, 69 aa, Zea mays
  Coding DNA Sequence Number=SeqID_19183
  Homolog annotation: Hit_ID=Q8S8Q2; Match level="QueryCoverage=61%, HitCoverage=7%, E-value=7e-14, Identity=83%"; Hit description =Expressed protein
MAYALEYNDKKGISFFTDLLVVGENRQTFDLEGDSGSLIILTGQDSSDKMVLITFSFLPLSVELYDLSF

SEQ ID NO: 60963 - protein, 207 aa, Zea mays
  Coding DNA Sequence Number=SeqID_19184
  Homolog annotation: Hit_ID=Q2R0D3; Match level="QueryCoverage=49%, HitCoverage=58%, E-value=7e-14, Identity=44%"; Hit description =Expressed protein
MAGGGSSGEWSAWKAASIVFRIATVALSLASAIMTATSTQCLYREDGSPDGTISYSDYGSLKYSAFANLPTAVLQGVAIYLEVTGHEKAAKTVELIDKLVLALTSTSAPLLFAVDDITSCGGPPRAGGRARGQPSKGFTKKIQTASFASLGTLASAAGAAYTARVERIVAAAPTLPTPTLPSPDLDVNILYKNNIMAGLPEWLRGKT

SEQ ID NO: 60964 - protein, 406 aa, Zea mays
  Coding DNA Sequence Number=SeqID_19185
  Gene Ontology: Mol. function=binding
  Homolog annotation: Hit_ID=Q2R0N3; Match level="QueryCoverage=78%, HitCoverage=54%, E-value=1e-119, Identity=71%"; Hit description =Armadillo/beta-catenin-like repeat family protein, expressed
  Pfam annotation: Domain name=Arm; Domain location=29-69; Score=21.5; E_value=0.0029; Accession=PF00514.13; Description=Armadillobeta -catenin-like repeat
  Pfam annotation: Domain name=Arm; Domain location=320-354; Score=1.6; E_value=7.7; Accession=PF00514.13; Description=Armadillobeta-catenin -like repeat
  Pfam annotation: Domain name=HEAT; Domain location=167-198; Score =9.8; E_value=2.8; Accession=PF02985.12; Description=HEAT repeat
  Pfam annotation: Domain name=HEAT; Domain location=320-356; Score =13.2; E_value=0.95; Accession=PF02985.12; Description=HEAT repeat
  Pfam annotation: Domain name=HEAT; Domain location=35-71; Score=13.3; E_value=0.91; Accession=PF02985.12; Description=HEAT repeat
  Pfam module annotation: Pfam domain module=Arm::Arm::HEAT::HEAT::HEAT; Domain location=29-69::320-354::167-198::320-356::35-71
MPATASGGARPEEEEEEAAAAAGSFACGVDDGARAVLAAGAVGHLTRLLAHPDEKVVDASARALRMIYQSRLAPKFDVNSGENVDFVLSLLDSENENVTELAAAIVSHSCESSAEQLSLCSAGVPQKLVSLFGCSMNLRDACLGSIIAVIQNNQDVASRFASTDHGKGFRSVVGLIHDRSPRTRLLACLCLIALGHASPDHFQDNQIKTKLIMVLLELIEEPGHVGDEAPLALTTLIKDSFELQRQALTTNAVEKLSSHLLANPLGTRRAVTILLALSELCSKLEESRSQLMSVEGGVGFECSLCTIFCTVWVAARAGSSAGQTQVSTLLLEALKHDWADIRVAACSCLKNISRSPKILSGGRLSCDTVIGPLVQLLNDSSTSVQPEVEDEGKKVISPTSPREHEK

SEQ ID NO: 60965 - protein, 201 aa, Zea mays
  Coding DNA Sequence Number=SeqID_19186
  Subcellular localization annotation: CTP_CleavageSite=86; ConfidenceScore=5.36e-01
MQAQAGKGSCIGAVLHNGRSARQLGGGADARAKVISPTPRLCTSSPSPALPHTLSLSHRLSHRRTEQSTMAAPHLAVFSVLALLAVAATAQAPSGAPAAAPKAPATPPPAMPPPTPAPVAPPKAAPAPAPKVAPTPAPTPSASAPAPEAPTASPPAPSPDASSPSPSAEPPASSTPAGAAAGLRPTVAFAVFAVAAAVYSF

SEQ ID NO: 60966 - protein, 146 aa, Zea mays
  Coding DNA Sequence Number=SeqID_19187
  Gene Ontology: Mol. function=DNA photolyase activity; Biological process=DNA repair
  Homolog annotation: Hit_ID=Q8H6B3; Match level="QueryCoverage=81%, HitCoverage=23%, E-value=5e-10, Identity=56%"; Hit description =Cryptochrome 2 apoprotein
MEQLSKSFSPMILRLLEDAVLVNAVDSESRAPSDRRASEQSPSHLPLPGPAAGRLPSVLEGTRSAEPPRPSSVPPFMVVALDASSSRHISDRASCSLALAASSSTNRGEDSWSPAQFLRLAAWKQTVKRGKRLTFVIADLKSLYAS

SEQ ID NO: 60967 - protein, 48 aa, Zea mays
  Coding DNA Sequence Number=SeqID_19188
  Gene Ontology: Mol. function=ubiquitin thiolesterase activity; Cellular component=nucleus; Biological process=ubiquitin-dependent protein catabolic process
  Homolog annotation: Hit_ID=O24454; Match level="QueryCoverage=79%, HitCoverage=10%, E-value=2e-15, Identity=94%"; Hit description =Ubiquitin carboxyl-terminal hydrolase 3
MGASGSKLEKALGDQFPEGERYFGLENFGNTCYCNSVLQDFRCEVCIR

SEQ ID NO: 60968 - protein, 115 aa, Zea mays
  Coding DNA Sequence Number=SeqID_19189
MDSTEWSACGANGRTQTREASLPEPGSPSLPAVASLANEMVRWRGASTDYSRRVMEGAQLTLEQRAAGAQQGGRRVGRRRWRRCGGDGEGAAALEKGARASATVRCVMRVPYRYK

SEQ ID NO: 60969 - protein, 519 aa, Zea mays
  Coding DNA Sequence Number=SeqID_19190
  Pfam annotation: Domain name=DUF827; Domain location=41-375; Score= -112.2; E_value=0.044; Accession=PF05701.2; Description=Plant protein of unknown function (DUF827)
  Subcellular localization annotation: CTP_CleavageSite=62; ConfidenceScore=5.78e-01
MLSARPRSGSFEAGLRGTATASSVSRDRKPSPRLQRSRSPAAGGSNKAFPSPERRRGVGGVGAMQQRVAQLEEELRREREEKARAVRELEELRQHSEDGAAKGVAEKVQLLEREVDKSKESERKMLESLIYQTKQLEQTKISLEEARLEIATLQQANKTLESASASSRRGGGGGGAEQPRSVKDLMFGGADDEIRALRGELRAATQGEERSRKALEDVSVALADVTMEAKQVKAWLSEAQAEVEAASAEVRRLRAALAAASAERDRSRLEADECAAAWGDKERVLLDCVRAAEEEAGRARRDNTKLVESQRVIRDENARLRDVLKQAVAEASAVRDSLELARADNARLNDAVADKESALRSLRQEYDCVRVSEAAAQGSLKELNTLLAATTTTTACSTPASAAAPDRGFDQRVLNGSSNGPTPPQRLVHADKPRTPAGSRRFSQSARMGSQNPKERVFASLSNVADLKSAADAAAVDLDDELDFDHVKRKKRPILRKFGDLFRRKSFYKPNNLAPVHTL

SEQ ID NO: 60970 - protein, 399 aa, Zea mays
  Coding DNA Sequence Number=SeqID_19191
  Gene Ontology: Mol. function=ubiquitin thiolesterase activity; Cellular component=nucleus; Biological process=ubiquitin-dependent protein catabolic process
  Homolog annotation: Hit_ID=Q8H7M6; Match level="QueryCoverage=86%, HitCoverage=87%, E-value=1e-139, Identity=72%"; Hit description =Putative ubiquitin-specific protease 3
  Pfam annotation: Domain name=UCH; Domain location=72-392; Score =210.4; E_value=4e-60; Accession=PF00443.19; Description=Ubiquitin carboxyl-terminal hydrolase
MAAGHGVPGVPTCRPPKLRSWGGEVGTSGRKWQRCGVGDVSHVHEVSETAAGREQLLEYYANNKTPGDAEENLLTCLADLFMQCYCIVFCMSLETSAVCMILQLAMIKKKEISQAKKKTGVIAPKRFVQRVKKQNELFRSYMHQDAHEFLNFLLNELVDILEKESSAAKDSPQSSSPEKAPNGPVQPLANGVKKEPPVTLVHKSFQGILTNETRCLRCETVTARDETFLDLSVDIEQNSSITSCLKNFCSTETLNAEDKFFCDKCCSLQEAQKRMKIKKAPHILVIHLKRFKYIEQLGRYKKLSYRVVFPMELKLSNSSDDVDTEYSLFAVVVHVGSGPNHGHYVSLVKSHNHWLFFDDENVEMVEEQTLQTFFGTSHEYSGNTDHGYILFYEGLGGKS

SEQ ID NO: 60971 - protein, 68 aa, Zea mays
  Coding DNA Sequence Number=SeqID_19192
MKDPTGLVLILGVVGLELMSKDPFAGDHVGARGRVGSASVLRIEDDTCERQNGGGREHQPIDGMKNAG

SEQ ID NO: 60972 - protein, 112 aa, Zea mays
  Coding DNA Sequence Number=SeqID_19193
MDHHIDSQDYNARAKGCSVIGAIGWEICDSNLMNPALGFEMGDGDQVTEFSLRLWSTEEAMPSEHGDGSPELRHVGVPESLTHVRWAREVEGGPRSSTVRVPVMAGCPRSCG

SEQ ID NO: 60973 - protein, 151 aa, Zea mays
  Coding DNA Sequence Number=SeqID_19194
  Homolog annotation: Hit_ID=Q6QP51; Match level="QueryCoverage=32%, HitCoverage=22%, E-value=5e-12, Identity=67%"; Hit description =Putative growth-regulating factor 1
MHAACNRTKGAHPFNFDASNMEAQAHTSCNQRVGCYVQETAPPLAPLPCLLDCGTSTATRGNPANDPTVPIRHIGHEDRERGYPERDPSRQRKRALSPPTDQRFEGWPLGGVQQPPQSARASRPLLVRGSKAGPSEGFNGHLRPLGLRAHY

SEQ ID NO: 60974 - protein, 35 aa, Zea mays
  Coding DNA Sequence Number=SeqID_19195
MMNGRMLLDSSPELKMHPGSTRDVVSTADVFTADY

SEQ ID NO: 60975 - protein, 58 aa, Zea mays
  Coding DNA Sequence Number=SeqID_19196
MARPSQRPRLLWGAVATALFPSIPRSRWMAFDSPLPYDLDQSSDLLVDCSGFPLDLAA

SEQ ID NO: 60976 - protein, 607 aa, Zea mays
  Coding DNA Sequence Number=SeqID_19197
  Gene Ontology: Mol. function=transporter activity; Cellular component= intracellular; Biological process=transport
  Homolog annotation: Hit_ID=Q5N8J4; Match level="QueryCoverage=77%, HitCoverage=85%, E-value=1e-86, Identity=58%"; Hit description =Putative SEC14 protein
  Pfam annotation: Domain name=CRAL_TRIO; Domain location=145-319; Score=-40.1; E_value=0.025; Accession=PF00650.10; Description =CRALTRIO domain
  Pfam annotation: Domain name=CRAL_TRIO_N; Domain location=18-129; Score=39.3; E_value=1.4e-08; Accession=PF03765.5; Description =CRALTRIO, N-terminus
  Pfam module annotation: Pfam domain module=CRAL_TRIO::CRAL_TRIO_N; Domain location=145-319::18-129
MRVVHTVTKSESAILMKRTQKEERKPKKDSFKKRAVTTGYRFRHSLRRKSKTKNDNHIASIEDIRDVQELEIVERFRQCLLDDGLLPEHHDDYHTMLRFLKARKFNIDKAKHMWSEMLRWRKEFGADNIEEFDYTELDEVVKYYPQFYHGVDKDGRPVYIELIGKVDTNKLVQITTIDRYLKYHVKEFERCLQMRFPACSIAAKKAHRLVYYDIGCERRVNSQNFLGGKCRCEEYGGCPKSDKGPWKDPEIFKRVINGEANYGRQVLAVSSINQKEVGCTEHTTLKFQGHASSSDAPPIIGDSIPAAGKVMDACSNPRNSSTPSSSGSFSLRNIPATLGGLKTRIVAWSTFVILTLSAFLCSVLSIVTKRLSNQAITCDHYSADFHQGYMGNGTLTSVLTRLGELEEKVQALEAKPPQVPFEKEELLHTAVYRVDVLEAELISMKKALYETLIRQDELLAYIDQQQTAKFCNINKPLAGVLKTYIRTRDRAFSAPNSLGPRQAISRHVIDRALTAPNSVGKRYQVSSECRGVCGYFPGSVPQRVQSWPFCCAVVHAVVGRAYCGGYEGPMFLCGGDNDTVEPRQCQQADFSDWNLWFFLKIEYVLAS

SEQ ID NO: 60977 - protein, 141 aa, Zea mays
  Coding DNA Sequence Number=SeqID_19198
  Pfam annotation: Domain name=zf-CCHC; Domain location=1-18; Score =21.5; E_value=0.00028; Accession=PF00098.13; Description=Zinc knuckle
MDCYNCGQLGHLSHQYTKLKKNKFKGKKKDENEDEKKEKKLFKKKDGKQKIFHMRKGGKAYIIGDWLTDIESTSGFSSSEEDDEKVASSSWISLYRHHRHHPLHTYNLWLKEIRRYRMMILVMLIVEMIVMMSMLPLSMMS

SEQ ID NO: 60978 - protein, 111 aa, Zea mays
  Coding DNA Sequence Number=SeqID_19199
MEELERRRNELKESQDEALTELEAAHRDIKVLENDREVMKVWCDKEMDKAVQAGHILMKRSGVVVPEETIVDVLTASAEHQVSYCKCSVMYNFVMVAPQGLLISGQLNNNI

SEQ ID NO: 60979 - protein, 223 aa, Zea mays
  Coding DNA Sequence Number=SeqID_19200
MASGRTTWACAQGEREGEGARLRAQMSRGKWASGVRALKGAEACGGGRECANVGASTAGGVGERLGKQRGLRGGSGLALGRNLSASPDPGSNLWVISPPRPSSPTATYYAVNPADGHSAQLWCMSRDGLANTSRRLSPRPRKASTSISTAGNFDVILCKDADAHRRQPLAHTQALLQQLRKGQPLPRGLRCTNDPSTSASSLSGKPVDASQQHSVPSHQLVGR

SEQ ID NO: 60980 - protein, 74 aa, Zea mays
  Coding DNA Sequence Number=SeqID_19201
MARSLCDGVVGVDIPPNFDPFLLLPSIVSTNPFVGGIVELQCEEISSKQYLWEMDIPQVIKTWTRFMGCLKDSR

SEQ ID NO: 60981 - protein, 524 aa, Zea mays
  Coding DNA Sequence Number=SeqID_19202
  Gene Ontology: Mol. function=phosphatidylcholine-sterol O -acyltransferase activity; Biological process=lipid metabolic process
  Homolog annotation: Hit_ID=Q71LX7; Match level="QueryCoverage=85%, HitCoverage=78%, E-value=1e-152, Identity=56%"; Hit description =Lecithine cholesterol acyltransferase-like protein
  Pfam annotation: Domain name=LACT; Domain location=20-409; Score= -82.5; E_value=4.2e-07; Accession=PF02450.6; Description =Lecithin:cholesterol acyltransferase
MGVVRPCRRGWDARRMGAGAPETSAGTRASRRGAREDAAARIVVYPSMEARREGQIGVGRLRSREPSKLGSRGEIIGDDTVYYYHDMIVEMIKWGYQEGKTLFGFGYDFRQSNRLSETLDRFSKKLESVYTASGGKKINLITHSMGGLLVKCFISLHSDVSTSCILDLWLRFAIFNVLRSRAILKTFEKYVKSWIAIAAPFQGAPGYITTSLLNGMSFVEGWESRFFISKWCMQQLLLECPSIYELLANPNFQWKDIPLLQIWRENLDNSGKKSALLESYEPEEAIMMIKEALSSNEIIADGMHIPVPLNLDILNWAKETYDLLCSTKLPESVKFYNIYGIDYDTPHTVCYGSEQHPVSSLSSLLYAQGKYVYVDGDGSVPAESAKADGFNAVARVGVAADHRGIVCSRRVFRIVQHWLHAGEPDPFYDPLSDYVILPTLYEIEKHREKHGDVTSVAEDWEIISPNDGKTLRPGELPPMVSTLTTSREGKEGALEEAQATVVVHPEKKGRQHVQVRAVGVSHGG

SEQ ID NO: 60982 - protein, 467 aa, Zea mays
  Coding DNA Sequence Number=SeqID_19203
  Homolog annotation: Hit_ID=Q10ML4; Match level="QueryCoverage=38%, HitCoverage=27%, E-value=7e-23, Identity=40%"; Hit description=TPR Domain containing protein, expressed
  Subcellular localization annotation: CTP_CleavageSite=51; ConfidenceScore=5.65e-01
MQAVADQATGPSASRRTGSSRASSPRRCTWRRMVVTVSRRRWRENGEGRIRAVHTTGNSGQMPTGPGGGVAEVERRWLETAGPDGGKAEVLLRPTVEGVRTQRRGGRSGGEREPEGRELGRRPREGRETGVRDGGDKEEGQTKHPISLQGTISVCIAVSAVAATPISGELSPSLFFLNNGIMIDSSPRQAMAKGCDSTLRHVSSTLLKWRTASSGRPASSAATAAVEDELHVRRQLRHGLRPCIGGRQQVRRGREPVLRPAHALAPEHHGGEAVVGLEKHQRVLHQAEVEASLAQDQVPPLVGVDAGEGGDQATLEAGHVEAAQEAASVGAVVSANNIHVLLERLCSQCYWANLGGVQPLDNDHEPPSSTLRFSSVQRSARGSGGTVCAALVEEEEVGAAADHLAAEVGVETEEGEVQEGGLERENREGVVRLRPLLRPARRGARVSASVGQGKGSSVNGDPSSNGR

SEQ ID NO: 60983 - protein, 422 aa, Zea mays
  Coding DNA Sequence Number=SeqID_19204
  Gene Ontology: Mol. function=translation initiation factor activity; Cellular component=chloroplast; Biological process=translational initiation
  Homolog annotation: Hit_ID=Q9XIR4; Match level="QueryCoverage=85%, HitCoverage=83%, E-value=1e-137, Identity=62%"; Hit description=APO protein 1, chloroplast precursor
  Pfam annotation: Domain name=DUF794; Domain location=38-422; Score =714.5; E_value=7.2e-212; Accession=PF05634.2; Description =Arabidopsis thaliana protein of unknown function (DUF794)
MEIVNSVSFSSIGVGRIVINKTVKVGCQTHRIGWKLTRTCCEYSPGASRKKQEKYEQQPQNVDLPELHPKNKKKPFPVPIKKMLQASRREKRLAQMHIEKPLEPPKNGLLVPELVPVAHEVLDNWKVLIRGLSQLLNVVSVYGCRKCPQVHVGPVGHQIQDCYGSGSQRRNSHHSWARGSINDVLIPIESYHLFDPFGRRVKHDTRFDYDRIPAIVELCIQAGVDLPQYPSRRRTAPVRMIGKKVIDRGEFVDEPKPQRSEHCVSLLAELDTFSNQQVQSPSPSNMKELAKRTLKAYLNVRRGVEQLMSKYTVKACGYCSEVHVGPWGHNVKLCGAFKHQWRDGKHGWQDAVVDEVIPPNYVWHVPDPSGSPLRSSLRSFYGKAPAVVELCVQAGAEIPDEYRAMMRTDIVIPDSVEARMAA

SEQ ID NO: 60984 - protein, 278 aa, Zea mays
  Coding DNA Sequence Number=SeqID_19205
  Pfam annotation: Domain name=HMA; Domain location=11-71; Score=25.2; E_value=0.00024; Accession=PF00403.16; Description=Heavy-metal -associated domain
MAREEELKRIDLKVNVSCCDGCRRKVMKAMSLKGVLRTEIQPSHDRVTVVGDVDVNVLVKKLAKVGKIAEALPPAPAEQGKKQRDDGVRAVAAQAQPQAEEKCKGKDDAGGKAAAKAAPGKHEGCKKCAREAAARAVGDSGDHCSGKKAPSKKDNNAGGGWGGEEGGDADADGLDAEPLAVAPHHHYAQAQTQQHYHRAEPAMVVPVHVPPTYFYPTPAAAAIPYYGYYCMPPPPPPTMAMTMGVAPPSQRHPQARPQPSRFDEDFFDDDNTVGCSVM

SEQ ID NO: 60985 - protein, 882 aa, Zea mays
  Coding DNA Sequence Number=SeqID_19206
  Gene Ontology: Mol. function=nucleic acid binding; Cellular component= intracellular; Biological process=DNA integration
  Homolog annotation: Hit_ID=Q8W0X4; Match level="QueryCoverage=99%, HitCoverage=77%, E-value=0.0, Identity=90%"; Hit description =Putative pol protein
  Pfam annotation: Domain name=RVT_2; Domain location=478-733; Score =539.2; E_value=4.3e-159; Accession=PF07727.4; Description=Reverse transcriptase (RNA-dependent
  Pfam annotation: Domain name=rve; Domain location=114-265; Score =110.5; E_value=4.8e-30; Accession=PF00665.16; Description=Integrase core domain
  Pfam annotation: Domain name=zf-CCHC; Domain location=16-29; Score =7.0; E_value=0.07; Accession=PF00098.13; Description=Zinc knuckle
  Pfam module annotation: Pfam domain module=RVT_2::rve::zf-CCHC; Domain location=478-733::114-265::16-29
MDSRARLRPRGSDHAQCGKLGHFIANCPDNDSDQEKGNKREKKKHYKKAKGEAHLGKEWDSDCSSSDSDNEGLAATAFNKSTLFPNERHTCLMAREKKVYASGGSSWIIDSGCTNHMTGEKKMFTSYVKNKDSQDSIVFGDGNQGKDKSETQGTLKRFLRRAQNEFELKVKKIRSDNGSEFKNLQVEEFLEEEGIKHEFSAPYTPQQNGVVERKNRTLIDMARTMLGEFKTPECFWTEAVNTACHAINRVYLHRLLKKTSYELLTGNKPNVSYFRVFGSKCYILVKKGRNSKFAPKAVEGFLLGYDSNTKAYRVFNKSSGLVEVSSDVVFDETNGSSREQVVDCDDVDEEDVPTAAIRTMAIGEVRPQEQDEQDQPSSSIMVHPPTQDDEQVHHKEACDQGGAQDDNVMEEEAQPAPPTQVRAMIQRDHPVDQILGDISKGVTTRSRLVNFCEHYSFVSSIEPFRVEEALLDPDWVLAMQEELNNFKRNEVWTLVPRPKQNVVGTKWVFRNKQDEHGVVTRNKARLVAKGYAQVAGLDFEETFAPVARLESIRILLAYAAHHSFRLFQMDVKSAFLNGPIKEEVYVEQPPGFEDERYPDHVCKLSKALYGLKQAPRAWYECLRDFLIANAFKVGKADPTLFTKTCDGDLFVCQIYVDDIIFGSTNQKSCEEFSRVMTQKFEMSMMGELNYFLGFQVKQLKDGTFISQTKYTQDLLKRFGMKDAKPAKTPMGTDGHTDLNKGDSDYAGCKVDRKSTSGTCQFLGRSLVSWNSKKQTSVALSTAEAEYVAAGQCCAQLLWMRQTLRDFGYNLSKVPLLCDNESAIRMAENPVEHSRTKHIDIRHHFLRDHQQKGDIEVFHVSTENQLADIFTKPLDEKTFCRLR

SEQ ID NO: 60986 - protein, 588 aa, Zea mays
  Coding DNA Sequence Number=SeqID_19207
  Homolog annotation: Hit_ID=Q8S8Q2; Match level="QueryCoverage=96%, HitCoverage=97%, E-value=0.0, Identity=58%"; Hit description =Expressed protein
MRPSDGRTQLSGFAQSDESTLDVEGHCYHQQSFPSSPSMQPIASGCTHTENSAAYFLWPTSNLQHCAAEGRANYFANLSKGLLPKSGRLPKGQQANSLLDLMTIRAFHSKVLRCFSLGTAVGFRIRKGALTDIPAILCFVARKVHKKWLNPDQCLPAIVEGPGGIWCDVDVVEFSYYGAPAQNPKVQMFTELVDKLCGSDECIGSGSQVASQDTFGTLGAIVKRRTGNKQIGFLTNRHVAVDLDYPNQKMYHPLPPNLGPGVYLGAVERATSFITDDVWYGIYAGTNPETFVRADGAFIPFAHDFDISTVTTTVRGVGDIGDVKVIDLQSPLNSLIGRQVCKIGRSSGHTTGTVVAYALEYNDEKGISFFTDLLVVGENRQTFDLEGDSGSLIILTGQDNEKPCPIGIIWGGTANRGRLKLRCDHGPENWTSGVDLGRLLDRLELDLIITNESLKEFILDKDAVQQQRLALVAAANSAVGESSTAAVPAPEEKVEIFEPLGIKIEQLPRHDVSATTEGDEAAVINVEERQFISNFVGMSPVRDDQDAPRQIANLNNPSEEELAMSLHLGDREAKRLRTDTESELDLEK

SEQ ID NO: 60987 - protein, 82 aa, Zea mays
  Coding DNA Sequence Number=SeqID_19208
  Gene Ontology: Mol. function=3'-5'-exoribonuclease activity; Biological process=RNA processing
  Homolog annotation: Hit_ID=Q6K293; Match level="QueryCoverage=99%, HitCoverage=22%, E-value=2e-19, Identity=96%"; Hit description =Putative exosome component 4
  Subcellular localization annotation: CTP_CleavageSite=58; ConfidenceScore=5.14e-01
MEYVNPLTGFRVDGRRPNEVMHPRPLSPTRGSREQPYLTRCWTSRRCGNSRARSASLRAQTGRRCSRWATPESSPPSTARER

SEQ ID NO: 60988 - protein, 160 aa, Zea mays
  Coding DNA Sequence Number=SeqID_19209
MTIYDGWNGRLGRGGVRASRVFVEAELGKLHAGTRRPRQGSRENCADGRNRDGEHARTKSKARRGASTAAAWELYDEETQGQAMERDAATKSPERCRELDSGDMDEIRARRDGHDQARRRKQSGAAAGACTRTASDAGGRELCERNSSGEFRSAEEAGRR

SEQ ID NO: 60989 - protein, 88 aa, Zea mays
  Coding DNA Sequence Number=SeqID_19210
MEWGRGRSTTRTKGKRGGGGSDKPRQPQRGLGVAQLEKIRIQSEMAEYLHHPLAQQPPHPIHRTGSFNSESIVYKVAIFSLFEKVVVV

SEQ ID NO: 60990 - protein, 167 aa, Zea mays
  Coding DNA Sequence Number=SeqID_19211
  Gene Ontology: Mol. function=hydrolase activity, acting on acid anhydrides, in phosphorus-containing anhydrides; Cellular component =nucleus; Biological process=nucleobase, nucleoside, nucleotide and nucleic acid metabolic process
  Homolog annotation: Hit_ID=Q9CA92; Match level="QueryCoverage=86%, HitCoverage=19%, E-value=1e-40, Identity=59%"; Hit description =Putative helicase; 55525-51977
YLQHVPSLTLPIGTQGAINLLQNIEELGRFICNIITVVPEGVVMFFSSYDYERRVYDAWMTTGTISRISKKKHVFREPRNSADVEAVLNKYKEAIESCSNFSQDTGVNGALLLAVVGGKISDGINFSNGMGRCVIMVGLPYPSPSDVELIYYGSALEVEESIMRIYA

SEQ ID NO: 60991 - protein, 267 aa, Zea mays
  Coding DNA Sequence Number=SeqID_19212
MLGQPSVSLVSSTKPTVTRPLKVGVVLSGGQTPGGHNVIYDIFSEEKQFGIEMSRIQGLPGGERNKTATAIPNLPQIPRARARPLPPSRDSPQRCARQTNPVEDPLPPDPYLPRIPRAPGKLPLLRIRRRGSPTSRARQRAPTAAILQGATPPASPTPTARRGRHYPPDPYAANPAIRREPHPPSRTPHALRDTPAENAAANPATNPAANRLKPRPHSNSHALTALRNPPSPQTPARPARPRAIRHDLHTQRAAPSSPQTTVTILAA

SEQ ID NO: 60992 - protein, 313 aa, Zea mays
  Coding DNA Sequence Number=SeqID_19213
  Gene Ontology: Mol. function=hydrolase activity, acting on acid anhydrides, in phosphorus-containing anhydrides; Cellular component =nucleus; Biological process=nucleobase, nucleoside, nucleotide and nucleic acid metabolic process
  Homolog annotation: Hit_ID=Q9CA92; Match level="QueryCoverage=93%, HitCoverage=35%, E-value=4e-81, Identity=52%"; Hit description =Putative helicase; 55525-51977
MVRSADLVVLPYQSLLLKSARESRVLILKNSVVIIDEAHNLADSLSNMYNSKITSSQLKTVLSCLDEYLDRFYNVLGAGNRRYIQTLTVLTRSFIRVLINNQDGASTMSSMTINQFLFSLDIDNINIVKLCQFVKESNIIHKDCGYANKLSSIQNQFDLQLHDEGSSIACFQALVDFLRSLLNSNDDGRIIVAKQKLGGQPDEAYLKFVMLCAEKIFSKVTQDAYVVILAGGTLQPIEETRFRLCPSLPPTDIKFFTCNHIVPPESILPIAVTRGPSGMAFDFSYNSRSSPSMVCTFYLISNVPDPFASATQA

SEQ ID NO: 60993 - protein, 250 aa, Zea mays
  Coding DNA Sequence Number=SeqID_19214
  Homolog annotation: Hit_ID=Q9LTQ0; Match level="QueryCoverage=42%, HitCoverage=28%, E-value=5e-08, Identity=31%"; Hit description =Similarity to CAF protein
  Pfam annotation: Domain name=dsrm; Domain location=48-108; Score =40.0; E_value=8.3e-09; Accession=PF00035.15; Description=Double -stranded RNA binding motif
MTICPLQACVWLVRVSSLEQEIVKSVLQQVTRWLFEPIITAETIDEQPVTTLHELCQKHGKVAQFKTWQKDGMIVVNVFVGGEMVGLGSSEQKVIAKLNAARDALGKLIGEVVVDGEITLNEVLEGSVKVESTLLVVAKEVLFPGKLDVAGGMVDGVSENMVLEEELPKNQNHLVVDDGSGLMSHWDILERLVRTTIVGKQSEVVEVTGKGGVLEGGWDIGPRHGCGNREEIRTWGVFTGGGKLVAMEKA

SEQ ID NO: 60994 - protein, 121 aa, Zea mays
  Coding DNA Sequence Number=SeqID_19215
  Subcellular localization annotation: CTP_CleavageSite=30; ConfidenceScore=5.10e-01
MVAARQRTASRAQGAPRRGHGPGGLQGGARSAARHEPLAAPSRDHARPRAASRKPRMGACCRGKSANKAARWGVGPSRRGRDGSKGKGERGGARNVQQGGNEKVEIGEDEKRGVTPEFGGY

SEQ ID NO: 60995 - protein, 260 aa, Zea mays
  Coding DNA Sequence Number=SeqID_19216
  Gene Ontology: Cellular component=integral to membrane
  Homolog annotation: Hit_ID=Q6K4V2; Match level="QueryCoverage=73%, HitCoverage=84%, E-value=2e-60, Identity=58%"; Hit description =Putative NEC1
  Pfam annotation: Domain name=MtN3_slv; Domain location=161-223; Score= 35.6; E_value=1.8e-07; Accession=PF03083.6; Description=MtN3saliva family
  Pfam annotation: Domain name=MtN3_slv; Domain location=43-127; Score =56.8; E_value=7.4e-14; Accession=PF03083.6; Description=MtN3saliva family
  Pfam module annotation: Pfam domain module=MtN3_slv::MtN3_slv; Domain location=161-223::43-127
MIKHDHNSVVNINPKIRGGIQVNVYKFRGLFCKTNLGCRFRDMWLSTTGWNRAIPRPTFIRIWKKGSVEQYSPIPYVATLLNCMMWVLYGLPLVHPHSMLVITINGTGMLIQLTYVALFLVYSAGAARRKVSLLLAAEVAFVGAVAALVLALAHTHERRSMVVGILCVLFGTGMYAAPLSVMALLDAYALIRFDLYITIPNGLGVLFALAQLLLYAIYYKNTQKIVEARKRKAGQVAMTEVVVDGSRASNNNNNGGSGTY

SEQ ID NO: 60996 - protein, 152 aa, Zea mays
  Coding DNA Sequence Number=SeqID_19217
MSWGGTASVAATGLKLIQMPRFLPTRAYLLTTVHELRQSALIAAHCVMMSNYVIVVYGVSDPGTYMMAHIRCTARKSMIPFLPSRLAERPLRRTVPVQSNHLERLYRRLHEEQELRRQEQEQQDSYPSPQQEVESKRPPSPAPQLEMPPAPP

SEQ ID NO: 60997 - protein, 93 aa, Zea mays
  Coding DNA Sequence Number=SeqID_19218
MLAATELLSLDNDSPNGPVPHSGNTHDFLFALALLGCPSWLLGQEDGLPGCVDAGIDFLPAGYSDGTAAAAEKTASGTAAAGSDIDAGAGDLA

SEQ ID NO: 60998 - protein, 139 aa, Zea mays
  Coding DNA Sequence Number=SeqID_19219
MAQQTRPSIYRIVKRRLMNLGETRGGRRGKGALCLEQVAFTVAVTPVITGHAPQGSPRLGLALKNVARNGDRSTAVKVIRSTDELGRYGERSRDQTQTDPDAKIFTCPCLSSDHGARIATISAHRDCESPATVNGWQSI

SEQ ID NO: 60999 - protein, 164 aa, Zea mays
  Coding DNA Sequence Number=SeqID_19220
  Subcellular localization annotation: CTP_CleavageSite=63; ConfidenceScore=5.00e-01
MSGAHRTVRCPLPTVGSATCLAQIARPTVGPADRWLTGQSGSYSRLSVPPGSSSDTYDGGELESFSAAGIVLRRQVEVLLRVTFPSTWSGGVCLRPPLRSGSHLFPLPEPSPDIYDGGESGSSFDICDDDSESKSRLSFDIYDDVGSHLSGLWERRRWGRVGSA

SEQ ID NO: 61000 - protein, 185 aa, Zea mays
  Coding DNA Sequence Number=SeqID_19221
  Homolog annotation: Hit_ID=P43401; Match level="QueryCoverage=31%, HitCoverage=77%, E-value=9e-34, Identity=100%"; Hit description=EC protein homolog
  Pfam annotation: Domain name=Metallothio_2; Domain location=109-155; Score=-18.6; E_value=0.058; Accession=PF01439.8; Description =Metallothionein
  Pfam annotation: Domain name=Metallothio_PEC; Domain location=110 -184; Score=173.9; E_value=4e-49; Accession=PF02068.6; Description =Plant PEC family metallothionein
  Pfam module annotation: Pfam domain module=Metallothio_2::Metallothio_ PEC; Domain location=109-155::110-184
  Subcellular localization annotation: CTP_CleavageSite=28; ConfidenceScore=5.11e-01
MDRRRLSRTGSGTSSPHGPFDSGLFFVVSDSVRGIRTLEQGIIPTSSRAAAGDRTLGLWSSIIYRGKWEPFVQHRYLCSPNATTAASWFKCGERSRRPVEEIKRRRSGMGCDDKCGCAVPCPGGKDCRCTSGSGGQREHTTCGCGEHCECSPCTCGRATMPSGRENRRANCSCGASCNCASCASA

SEQ ID NO: 61001 - protein, 116 aa, Zea mays
  Coding DNA Sequence Number=SeqID_19222
  Gene Ontology: Mol. function=oxidoreductase activity; Biological process=protein modification process
  Homolog annotation: Hit_ID=Q336W0; Match level="QueryCoverage=58%, HitCoverage=14%, E-value=1e-22, Identity=75%"; Hit description =Ubiquitin family protein, expressed
  Pfam annotation: Domain name=ubiquitin; Domain location=31-98; Score =44.4; E_value=3.8e-10; Accession=PF00240.13; Description=Ubiquitin family
MASGGEGAGSGESPPAASVEAAAGEATLHIRCANGSKFTVQTDLGATVGGFKEVVAGSCDVPAPQQRLIYKGRILKDEQTLESYDDINYSLEVAEGLKQTTALSQTHSSHIISNVM

SEQ ID NO: 61002 - protein, 272 aa, Zea mays
  Coding DNA Sequence Number=SeqID_19223
  Gene Ontology: Cellular component=integral to membrane
  Homolog annotation: Hit_ID=Q5JMG2; Match level="QueryCoverage=94%, HitCoverage=56%, E-value=2e-34, Identity=72%"; Hit description =Rhomboid family protein-like
  Pfam annotation: Domain name=Chromo; Domain location=98-143; Score =21.2; E_value=0.0031; Accession=PF00385.14; Description='chromo' (CHRromatin Organisation MOd
  Pfam annotation: Domain name=Rhomboid; Domain location=40-258; Score=- 22.3; E_value=0.01; Accession=PF01694.12; Description=Rhomboid family
  Pfam module annotation: Pfam domain module=Chromo::Rhomboid; Domain location=98-143::40-258
MESADGAVWMLIGANVAVFLLWRVADPGFMRKHFMISLDNFKSGRLHTLLTSAFSHAEFNHLFANMFGLFFFGSSKFEGPAPSQLVPLPPLLHGHVVPAPEKVLRARLNRGVWEVLVKWIGCSEADTSWEQALHFSLTTITERASFIAINLFNITTAEITNVFGPAFLLKLYVGGALTGSVFFLLEKAFLAYRKQDYVGWDTSRAAELGASAAVNATMLLQIFLYPKGLVYIYFVIPVPAALMGAGLIGADLVRLKRTTNWQQQLTGPTAYL

SEQ ID NO: 61003 - protein, 214 aa, Zea mays
  Coding DNA Sequence Number=SeqID_19224
  Gene Ontology: Mol. function=phosphotransferase activity, phosphate group as acceptor; Cellular component=mitochondrial inner membrane; Biological process=nucleobase, nucleoside, nucleotide and nucleic acid metabolic process
  Homolog annotation: Hit_ID=Q08480; Match level="QueryCoverage=68%, HitCoverage=60%, E-value=5e-72, Identity=89%"; Hit description =Adenylate kinase B
  Pfam annotation: Domain name=ADK; Domain location=61-205; Score =217.5; E_value=2.9e-62; Accession=PF00406.12; Description=Adenylate kinase
  Pfam annotation: Domain name=ADK_lid; Domain location=183-214; Score =37.8; E_value=3.8e-08; Accession=PF05191.4; Description=Adenylate kinase, active site lid
  Pfam module annotation: Pfam domain module=ADK::ADK_lid; Domain location=61-205::183-214
MEITVRNATILCSYFWRSSSSSSIKFRWWITVLVVCGVIQTCRLAGSALDFGEFDTSSTNLVGPPGSGKGTQSPIIKDEYCLCHLATGDMLRAAVAAKTPLGIKAKEAMNRGELVSDDLVVGIIDEAMKKPSCQKGFILDGFPRIVTQAQKLDEMLAKQGANVDKVLNFAIDDVVLEERITGRWIHSASGRTYHSKFAPPKSPGVDDQYRHRCD

SEQ ID NO: 61004 - protein, 194 aa, Zea mays
  Coding DNA Sequence Number=SeqID_19225
  Homolog annotation: Hit_ID=Q5VQY3; Match level="QueryCoverage=48%, HitCoverage=21%, E-value=2e-26, Identity=66%"; Hit description =Probable auxin efflux carrier component 5
MRQLRLARAQTGRGGAGRRERLSDEQCAGINHFVALYAVPVLIFHMVSTKDPYHMNERLIAADTLQKAVMLLALTAWAFWSHLSRRRDGGRGKRQVVQGAESPIKWVVTNFSVASLPRVPGGPRIGHCSTADATASGCRAGPASPAATRCTTLEFAYLPSAVVSASSSDDAAYVVRDAVRVHLQPVIRKERVGA

SEQ ID NO: 61005 - protein, 67 aa, Zea mays
  Coding DNA Sequence Number=SeqID_19226
MATAIMRTVAFTTQGECPVGSAHALAWRIQFRHRKEVGTEAQKRIDVIFGQEFDFRPPKMSPLSAHS

SEQ ID NO: 61006 - protein, 64 aa, Zea mays
  Coding DNA Sequence Number=SeqID_19227
  Gene Ontology: Mol. function=glycerophosphodiester phosphodiesterase activity; Biological process=glycerol metabolic process
  Homolog annotation: Hit_ID=Q6AUZ6; Match level="QueryCoverage=46%, HitCoverage=7%, E-value=7e-09, Identity=86%"; Hit description =Putative phosphodiesterase family
MSLAGCAPLFLLLLLHLAFARPLFPLPSKTKNEEKKPIQTFRPYNIAHRGSNGEIPEETAAAYM

SEQ ID NO: 61007 - protein, 411 aa, Zea mays
  Coding DNA Sequence Number=SeqID_19228
  Gene Ontology: Mol. function=carbohydrate binding
  Homolog annotation: Hit_ID=Q10NJ9; Match level="QueryCoverage=99%, HitCoverage=90%, E-value=1e-103, Identity=49%"; Hit description =Lipase, putative, expressed
  Pfam annotation: Domain name=DUF620; Domain location=127-406; Score =510.9; E_value=1.4e-150; Accession=PF04788.3; Description=Protein of unknown function (DUF620)
MRKLCPNLDRDDSLDTVLEVPIPDEMLINAPGADKRRGAGGANMRAWLKNQAFDRATVDGPASATAELQLFLNVVGSPLIPCPVPHDRAFSRSIRDSSIQASTAKYIIQQYIAATGGQAALQGVRSMYAVGKVRMCASEFHLGDQTVTAAQGRAEVGGFVLWQKTPEVWFFELIMAGHKMSAGSDGKVAWRQSAAEHSRVSRGPPRPLRRSLQVTESAEAHVRARIAFSQRRLPSCSFGYLQGLDPRSIANLFSDAVCIGEKILNNEECFILKLEAGAATLRARSAPAFDIIHHTVWGYFSQRTGLLIQLEDSHLLRMKSGKGARRSENIFWETSMESVISDYRYIDGINIAHGGHTNVTLFRYGEGSVNHKRKLEETWTVEEADFNVHGLTTDYFLPPADLKKDDEDHNK

SEQ ID NO: 61008 - protein, 556 aa, Zea mays
  Coding DNA Sequence Number=SeqID_19229
  Gene Ontology: Mol. function=RNA-directed DNA polymerase activity; Cellular component=exocyst; Biological process=exocytosis
  Homolog annotation: Hit_ID=Q6AUZ6; Match level="QueryCoverage=35%, HitCoverage=59%, E-value=2e-87, Identity=66%"; Hit description =Putative phosphodiesterase family
  Pfam annotation: Domain name=Exo70; Domain location=81-556; Score= -85.9; E_value=7.4e-08; Accession=PF03081.6; Description=Exo70 exocyst complex subunit
  Pfam annotation: Domain name=GDPD; Domain location=1-196; Score=-6.0; E_value=2.8e-05; Accession=PF03009.8; Description=Glycerophosphoryl diester phosphodiesterase family
  Pfam module annotation: Pfam domain module=Exo70::GDPD; Domain location=81-556::1-196
DFTLEELKTLRVKQRYSFRDQQYNDRTVGIYPEIKDPVFINKHVKWADGKKFEDKFVDTLLKYGYKGQYMSENWLKQPLFIQSFAPTSIVHVSDFIDSPKSYWEITSDDYLAYISKYVVGLGPWKDTIVPASGNYLMPPSDLVARAHAHNLQVHPYTYRNENQFLHFNFFQDPYNEYDFWINTVGVDGLFTDFTGTLHSNTLFVGSSVTAYQGQVPNMPIAIAQDGSVEDFSSRSSSFNEEQLEGKATPNNISGGPEYFVPDLIQPGALSAVKFIAKFMFLYGYDKECCQAYINSRQSATDEYFGSLGLENLSIEELMNTSWNRMNSLIKRWNWAIMVFLRVYLQLVPQKQKKLFRLLDMYEVLADLLPEAESLFESGYNDMILNEYHEALLQLGESARKTFAEFKYAIQSYTSSSAVARGEVHPLTKYVMNYIKALTAYNKTLDSLLKDTDRRCLVSDIQLMANPYPNFTATAFNLQSVTAVLEANLEAGSRLYRDDRLQYIFMMNNIHYMVQKVKNSDLKSFLGDEWIRIHNRKLQQQATRYERASWNNVLLPQ

SEQ ID NO: 61009 - protein, 183 aa, Zea mays
  Coding DNA Sequence Number=SeqID_19230
  Gene Ontology: Mol. function=glutathione transferase activity; Biological process=auxin mediated signaling pathway
  Homolog annotation: Hit_ID=P12653; Match level="QueryCoverage=80%, HitCoverage=69%, E-value=2e-79, Identity=100%"; Hit description =Glutathione S-transferase I
  Pfam annotation: Domain name=GST_C; Domain location=75-170; Score =98.4; E_value=2.2e-26; Accession=PF00043.15; Description=Glutathione S-transferase, C-terminal domain
MGFVSRQTGGLGFKAAVSRRESKIDKSGNLFHTVNESRAICKYAARKNKPELLREGNLEEAAMVDVWIEVEANQYTAALNPILFQVLISPMLGGTTDQKVVDENLEKLKKVLEVYEARLTKCKYLAGDFLSLADLNHVSVTLCLFATPYASVLDAYPHVKAWWSGLMERPSVQKVAALMKPSA

SEQ ID NO: 61010 - protein, 179 aa, Zea mays
  Coding DNA Sequence Number=SeqID_19231
MKNSSRNTVEGKEIGRRRGPGDEDADGKAGIGGARSWEWQQRPVRKELWRGKKAALGNLERKENVSGLHGGGARRLGLLVSCQLDGALLPLVCARRLSGDGQGRRSGFIGSPARIKSRGVAGSTARRSAGDSCAKLVDSVAHPRNPRGWSSVQRLKGALTRRTHTSARREVDGIRVVRG

SEQ ID NO: 61011 - protein, 187 aa, Zea mays
  Coding DNA Sequence Number=SeqID_19232
MKNSSRNTVKGKEIGRYLTGDEVIEFSSRGAERTGGEVPGRRPGFIGSPARIKSRGGRGFHGEEIGRRQLRQAREFCCAPTESTRLVQCPEVEGSTDAADPHVSAKRGGWDSRCKRLTKALTNMISAPLPMSTKTRGDHHIENPGKTKDKREATKDYKKKLEEIGSKVPKAQWFGYYRTGLVMHQII

SEQ ID NO: 61012 - protein, 131 aa, Zea mays
  Coding DNA Sequence Number=SeqID_19233
MGRERKEAEQARSLRAREEASRGKCAAAREAGKELGRAGGSSVWALEDMGAERAEGRGRDAGSSAWAQERAQGEKSSAREELATGTRRAGRGTVAMARELGRARPEQWDERTGALERPVSAASDREKDPAV

SEQ ID NO: 61013 - protein, 103 aa, Zea mays
  Coding DNA Sequence Number=SeqID_19234
MEAGKELGRAGGSFVWAPEEMGAERAEGRGHDAGSSAWAQERAQGEKSSAREELATGTWRAGRGTAAMARELSRARLEQRDERTGALERPVSAASDREKDPAV

SEQ ID NO: 61014 - protein, 115 aa, Zea mays
  Coding DNA Sequence Number=SeqID_19235
  Subcellular localization annotation: CTP_CleavageSite=40; ConfidenceScore=5.07e-01
MLSESPLLLWLICATTASLLSYGARISTPLPPCPLLQLAVAASLSPWPRLCGCVLSSECSICRGPALSARRRPQVDLGRCRDWTSPQDDVVSRTNLKMDNLTNVKTKDGRQADIV

SEQ ID NO: 61015 - protein, 94 aa, Zea mays
  Coding DNA Sequence Number=SeqID_19236
  Subcellular localization annotation: CTP_CleavageSite=4; ConfidenceScore=5.15e-01
MAPPCAGVVPPLGMSGCVRGTTPLDPPSTVQIRSWAPVGVEPKQMVASAFGIVASAQGLRLENLQWKKGGLLYHFAEGVFVLRTFGGEDPLKVA

SEQ ID NO: 61016 - protein, 46 aa, Zea mays
  Coding DNA Sequence Number=SeqID_19237
MAMMGSTLEKMYLFQVRKQQTFVASVPRWYRKKRIKTKAAGGKALR

SEQ ID NO: 61017 - protein, 40 aa, Zea mays
  Coding DNA Sequence Number=SeqID_19238
MGTAGGNLRAAEFGPWEEDDSWPSDPYRVVAIDEELCGLA

SEQ ID NO: 61018 - protein, 111 aa, Zea mays
  Coding DNA Sequence Number=SeqID_19239
MVEGSIWSEGARDGWSTREEVGKLTGDEDDGDAGSIELEEGGEVVAEARVRKGGAWAVLFIGTGGRRKGRWRAPATLAAMTMMAHSGGDGMARADGVTGWLGQTHGAKLSW

SEQ ID NO: 61019 - protein, 58 aa, Zea mays
  Coding DNA Sequence Number=SeqID_19240
MARVACTLRGKRLDGGVSMLSVGVNPVRKQQTFVVFALRWCPKKNLSSEAVGGCWPPT

SEQ ID NO: 61020 - protein, 80 aa, Zea mays
  Coding DNA Sequence Number=SeqID_19241
MSSRCAKADRKAHGIEHIHLALCGMNTSHCRVGPFASACVGVCSWALDDKWGLGPVDLLPTVANQGELQQMRVRIAPVVR

SEQ ID NO: 61021 - protein, 209 aa, Zea mays
  Coding DNA Sequence Number=SeqID_19242
MAYASLVTYEDDVNALFHKGYQHFKRFEQCSLDFDQEVFQVEELSKKRSSSALFYHMWGVEGNFGFPDNGKGMLDFVVCVMLLSYWSLSSLSDVDSLFDSEPSNSEEGLDFFAEMDNGSSKEDLDFFVALEIASMVEAKNGEGALSGAPLAVVKGRTRQGVTEVDMIPCCSVLTGVLSGIPNLCCVEKSELRTLFEGDELELMLYNYQE

SEQ ID NO: 61022 - protein, 194 aa, Zea mays
  Coding DNA Sequence Number=SeqID_19243
MGFLLGPADTWIGGPKHSGNGRAQPSLTAIVEDFDAGAGWSPPSLLTLLSNMVNDSHIGLIKVRVATLSSAPSSEKTCSEDCWQALNEDGVAEELAYSRPNVRLNCVFELNGMPYGPYPEEGSTDVGDAAEGRKKSRGKHGAADEGFSKGKVVASSLKKLKKVETRARDLAKGVKVSNSFTEEMAEMCAEPRRL

SEQ ID NO: 61023 - protein, 186 aa, Zea mays
  Coding DNA Sequence Number=SeqID_19244
  Homolog annotation: Hit_ID=Q6QP51; Match level="QueryCoverage=84%, HitCoverage=91%, E-value=2e-18, Identity=61%"; Hit description =Putative growth-regulating factor 1
  Subcellular localization annotation: CTP_CleavageSite=33; ConfidenceScore=5.33e-01
MMTASKKGPGKGIFQKRILPSEGNGPRALLLIRGSKVAPSGVRQPPQSTRAPSPLLIRGSKASPSEGFDSRPRARRVRDDPGYVCYMAEARATLPRELRLARPQASASASASAEGLRLARPQASASAPASGEGLCLARPQASASASASGGVTSSPDLGLGLRRRLRLARPQPRTNYATGDASLPYS

SEQ ID NO: 61024 - protein, 77 aa, Zea mays
  Coding DNA Sequence Number=SeqID_19245
MEGAAGQMIILILGIVVAAPMTFYTINFMEMRDGPILSARKTLAAAKLVEVVEENKPKGEAQKEKRVITRIVWLMAN

SEQ ID NO: 61025 - protein, 779 aa, Zea mays
  Coding DNA Sequence Number=SeqID_19246
  Gene Ontology: Mol. function=signal transducer activity; Cellular component=membrane; Biological process=response to light stimulus
  Homolog annotation: Hit_ID=Q69P69; Match level="QueryCoverage=73%, HitCoverage=92%, E-value=0.0, Identity=83%"; Hit description =Putative RPT2
  Pfam annotation: Domain name=NPH3; Domain location=275-530; Score =316.7; E_value=4.1e-92; Accession=PF03000.5; Description=NPH3 family
  Subcellular localization annotation: CTP_CleavageSite=37; ConfidenceScore=5.03e-01
MKFMKLGSKPDAFQSDGADVRPSAQCGDLCCLTVCPMASTRRCSLGSPHPLDLVRKKTMRFSLSDARVRLITNSLLGLVPVRRSNDATVPFTPLTVVVVVVVVVVVVVVVVFPLISKSSRLQRLVLKATEETTDEVRIDDLPGGAKSFEICAKFCYGMVVTLSPHNVVAARCAAEYLEMTEEMEKGNLIFKIEVFMNSSILRSWKDSIIVLQRTKALSPWSEELKVVGRCIDAIASKTSVDPANVTWSYSHNNSKKGGACAEIVESAGKPSIAPKDWWVEDLCELDVDLYRRVMVAIKSKGRMSPELIGEALKAYAVRWLPDSYDALVAEGHMRRNQCLVETLIWLLPSDKSSGCSCRFLLKLLKVAILVGGGEHVKEELIRRISFQLHKATVKDLLLPATSPPNDGTYDVRLVHDLVQRFVARTALSHNGGFIEKSDEKMIELNFEQESTLAVGELVDGYLSEVASDQAPSLPMFVELATAVPEAARPVHDTLYYAVDAYLKQHPDINKSEKKKICSLVDVKKLSTDASMHATQNDRLPLRLVVQVLFFQQLRAGSGKELALVDNGEHACTRPTQDQCEPCERRIPKHPESLDKQVTSLSARESRQHHRTSDSEHRGGGRNSFKDQLGGLLPQSRSRRIFDKLWSSKGQGEHGGKGSETSGSSQSPPLSAKPAEVKPSPLPAVRNRRELRLARPQASASASASGEGLRLARPQASALAPASGEGLRLARPQASASASASASGGVTSSPKPRPQEKTPPRPDLSLGPNYATGDASLPYS

SEQ ID NO: 61026 - protein, 763 aa, Zea mays
  Coding DNA Sequence Number=SeqID_19247
  Gene Ontology: Mol. function=RNA-directed DNA polymerase activity; Cellular component=nucleus; Biological process=RNA-dependent DNA replication
  Homolog annotation: Hit_ID=Q8S472; Match level="QueryCoverage=99%, HitCoverage=73%, E-value=0.0, Identity=77%"; Hit description =Putative gypsy-type retrotransposon RIRE2
  Pfam annotation: Domain name=Retrotrans_gag; Domain location=251-342; Score=76.3; E_value=9.4e-20; Accession=PF03732.7; Description =Retrotransposon gag protein
MPEDGDPPRPMPRVDIPRELVVVPVPAGGHGPRLEQIRGVQARLDEGAGALEPIRWDVGQAWANQPPAGEIRHLPQGLQHRVADDVRVRPPPASSGVGQNLAAAAMLLRAMPEPSTTEGRRIQGELKNLLEGAAVRRAESSASRRQGYPSETHAATSRFMREASVYTGRTLNTAPAAPGRLGNEHHHRDRRAHLDERAFSRAIRRAPFPTRFRPPTTIAKYSGETRPELWLADYRLACQRGGTDDDNLIIRNLPLFLSDTARAWLEHLPPGQISNWDDLVQAFAGNFQGTYVRPGNSWDLRSCRQQPGESLRDYIRRFSKQRTELPNITDSDVIGAFLAGTTCRDLVSKLGRKTPTRPSELMDIATKFVSGQEAVEAIFRKDKQPQGRPSEDAPEASTQRGAKKKGRKKSQAKRDAADADLVAAAEYKNPRKPPGGANLFDKMLKEPCPYHQGPVKHTLEECVMLRRHFHRAGPPAEGGRARDDDKKEDHQAGEFSKVCDCFMIYGGHAANASARHRKQERREVCSVKVATPVYLDWSDKPITFDQADHPDHVPSPGKYPLVVDPVIGDVRLTKVLMDGGSSLNIIYAETLGLLCVDLSSVRVGAAPFHGIIPGKRVQPLGRLDLPVCFGTPSNFRRETLTFEVVRFRGTYHAVLGSPCYAKFMAVPNYTYLKLKMPGPNGVITVGPTYKHAFECDVECVEYAEALAESEALIADLESLSKEVPDVKRHAGNFEPAETVKAVPLDPSGDTSKQIRIGSGLDPK

SEQ ID NO: 61027 - protein, 58 aa, Zea mays
  Coding DNA Sequence Number=SeqID_19248
MAKNHKTAWWCTGLSRSPIHPPSLGALGVTHLARVSKALKHFQGEQLEIHYEAFTKFH

SEQ ID NO: 61028 - protein, 43 aa, Zea mays
  Coding DNA Sequence Number=SeqID_19249
MVDTWDTHSHEDMAERFVLPARLRIGGTRVYDMGMRTRFDWRV

SEQ ID NO: 61029 - protein, 105 aa, Zea mays
  Coding DNA Sequence Number=SeqID_19250
MVADTWDTHSCEDVVEWTVLLVWLRTGGTHVWSWRTHTRCGTHDGFGGLGLKPPALRMIVFAEFVPQNMVVVVLERTGGGMWRDRGGCVKTKQLRVKDMVIGSKT

SEQ ID NO: 61030 - protein, 119 aa, Zea mays
  Coding DNA Sequence Number=SeqID_19251
  Subcellular localization annotation: CTP_CleavageSite=19; ConfidenceScore=5.23e-01
PQPLKAFFGAIAKVYSFRRCSTKTRSGKKPWLTAVLQHGGCRISIWFSAGFEDRWSRSKLLSSSGEGPFKVSIFSLNPFRLCRRGKIPYETLNWAIKEMEDHALEVWKLVMNPPEALFG

SEQ ID NO: 61031 - protein, 85 aa, Zea mays
  Coding DNA Sequence Number=SeqID_19252
MENNFYGIGSSSMPDIGNSTVGFDFGDSYNCPELTKQVDVDQVMPQYAPKEIMGHKKGVVKKIPICSKNFSIQEDELLFSTYPCW

SEQ ID NO: 61032 - protein, 111 aa, Zea mays
  Coding DNA Sequence Number=SeqID_19253
MALGTQCPCPSSLASERVNHPPISAALDGPSGCIYARALPSTLQCPSFLPSGLRSVHSARPSPDSWYGLFPVDPPLSSIASRHSTHDGLRLGQWDCSTISDGDQRWLSVER

SEQ ID NO: 61033 - protein, 153 aa, Zea mays
  Coding DNA Sequence Number=SeqID_19254
MTGAGARVAQLPLPGGAEDYVRDSIHASLGLPVSDRSLRLKLLASEEQRHRLQDHVFSLEEDLRAAQRRIDLLKAEAAMNAAGLRRCVEEKEAVAAAYADLSDKSSKECRLYERDLERAMESCDDLARENDDLRARLNQNTDVSCLLFFQTDS

SEQ ID NO: 61034 - protein, 88 aa, Zea mays
  Coding DNA Sequence Number=SeqID_19255
MAEVVDGAGVTGAGEVGGGVVAVVGVVGAEERSREARRRTRNLWTRNKSVHNLKSMDRTKVEPVPKLRARKLRLNGRKRNRLKGENVI

SEQ ID NO: 61035 - protein, 51 aa, Zea mays
  Coding DNA Sequence Number=SeqID_19256
MTCFGLKRHKCDMGEAAKSCYKAFNNVTEKIGSRDLIQEFLAYNIFPTRIG

SEQ ID NO: 61036 - protein, 144 aa, Zea mays
  Coding DNA Sequence Number=SeqID_19257
  Gene Ontology: Mol. function=membrane alanyl aminopeptidase activity; Cellular component=cytosol; Biological process=proteolysis
  Homolog annotation: Hit_ID=Q6Z6L4; Match level="QueryCoverage=70%, HitCoverage=11%, E-value=1e-52, Identity=93%"; Hit description =Putative aminopeptidase M
MKNYGLVTYHETALLFDEMHSAAANKQRVAVVVAHELAHQWFGNFVTMEWWAHLWLNEGFATWVSYLAADQFFPEWNVWTQFLEESTIGFKLDALAGSHPIEGIEAVMFMPDDSETVQSAGPNRKPPAIVTHWKKLKCTQFKLF

SEQ ID NO: 61037 - protein, 93 aa, Zea mays
  Coding DNA Sequence Number=SeqID_19258
  Homolog annotation: Hit_ID=Q68V15; Match level="QueryCoverage=98%, HitCoverage=67%, E-value=9e-25, Identity=51%"; Hit description =Armadillo-like
MRLLGKFVENECEKIDRLMELYTRYSDRVKEETERLDSLDLEDLEMDDDERYNRKLEAGLYTLQEYHDNIGDLDGPEEKERAQVRTKEIIDAL

SEQ ID NO: 61038 - protein, 126 aa, Zea mays
  Coding DNA Sequence Number=SeqID_19259
MAPRMLYDDGGSQPPYGSRGRRSRALLERVGRAGKDGTALAQGRSLPPAWTLVTPYCKRTRPGCGTNTKVAGFTSYACLPPASSPFALRLAPTHLGWGTLRQFTRRSRDPRVRNADKHLIPTDSPK

SEQ ID NO: 61039 - protein, 227 aa, Zea mays
  Coding DNA Sequence Number=SeqID_19260
MDPQAPTNSDGDQGSHPLIGDGDPLGTRNPNGDEYVMSFAPMIADPEGFTSRPRAPSSDGHTFGSPEAQSSPRSNLGQIATPTDRIARAFNAKASDSGSTPEDDELRLARPRARTRAWPQKTTNSASPDPGLGLGLGPGRRRTPPRPTQGSDSGSAPEDDGLRLARPQGSDSALASADGLRLTRPKGSDSTSTSEDRLDLDLRGASASPYPGLRPTTSQEGPSLPYP

SEQ ID NO: 61040 - protein, 250 aa, Zea mays
  Coding DNA Sequence Number=SeqID_19261
  Gene Ontology: Mol. function=carboxyl- and carbamoyltransferase activity; Cellular component=ornithine carbamoyltransferase complex; Biological process=amino acid metabolic process
  Homolog annotation: Hit_ID=Q6QP54; Match level="QueryCoverage=47%, HitCoverage=35%, E-value=2e-19, Identity=75%"; Hit description =Putative kinase
MEREGGKKPEGDRRESDVVGPSPGLGEVEAPPRSRSSLSSKAEVESEPLGRARWRPSTEARAEPEPCGRAKRSSSSSGAEPEFEPWGRAKRSSSSSGAEPESEPWGRAKRSSSSSGAEPEFEPWGRAMQSSSSSGAEPESEPWGRAMRSSSSSGAEPESEPWGRAMRSSSSSGAEPESKPWCRAKRSILWRLRPDLAALCADGGYQLRFRSLEGTPNYGPRQLPFSEDLVTWIRPDGVLALHIGKGEQSC

SEQ ID NO: 61041 - protein, 59 aa, Zea mays
  Coding DNA Sequence Number=SeqID_19262
MGREQATGIASAATKLILEPNLASREDPVWEERFRACLGVSRLPKTPLDNVEPRREVKK

SEQ ID NO: 61042 - protein, 523 aa, Zea mays
  Coding DNA Sequence Number=SeqID_19263
  Homolog annotation: Hit_ID=Q2QLM8; Match level="QueryCoverage=33%, HitCoverage=72%, E-value=5e-70, Identity=75%"; Hit description=Zinc finger, C3HC4 type family protein, expressed
  Pfam annotation: Domain name=zf-C3HC4; Domain location=309-349; Score= 30.8; E_value=4.6e-06; Accession=PF00097.15; Description=Zinc finger, C3HC4 type (RING finger)
MDPEVRERVLQGNTNLLINTFQEMKLFALNVMSIFGEKEMRYIEELKQCYMSLEKGFHSMTPVPARAAVRVRPPVPGLHPGQRKTLTDAQISDNVIDVMFVAREATATVLTWMFKFLDDHTAFLKAIIEGVKAFERDLIAKANSFVHDNGVSELYHLAPIVCASVNGKPCMWVCTMTSMVDELVVSEEVDEVLNALPNRQPWPPPMHSNCVASIADIHTEEISPERKLVAEGLGHDQRTSEVDLLPGGLKAQTISILVGDELGDYARARGFEIFDKFPRALDMAAANVGESTSGGSSSSGADAGGGFECNICFELPQEPIVTLCGHLFCWPCLYKWLRIHSHSPECPVCKAVVEEEKLVPLYGRGKDRVDPRSKNVPGAADIPSRPAGQRPATAPQADPNNAHFPNAANPANPWFMGGGGGGIPLANARWGNYTFSAAFGGLFPLLSFQVHGFPDATAYGQPAGFPYGYGHGHAFHGGHAGAHAHAAAAAPRHAQHQQQQADVYLKALLILVGVLVIASLVTF

SEQ ID NO: 61043 - protein, 178 aa, Zea mays
  Coding DNA Sequence Number=SeqID_19264
MAGLGQITSWGGGQAGHGVDALTGCVGEGGRRHGCRGEICGGARWELREIHAWRAGGRGCGSPSWEAGWTRSRMWRSLMALPIVGGRVGEVDGETNGVADGSARAARDAGKERRGWGRDGGKGRHGRDAGKGRHGRGRDWREGIARARAGAGARFSKKAIELPYLGIVTVYMLLCSHL

SEQ ID NO: 61044 - protein, 668 aa, Zea mays
  Coding DNA Sequence Number=SeqID_19265
  Gene Ontology: Mol. function=sequence-specific DNA binding; Cellular component=nucleus; Biological process=regulation of transcription, DNA-dependent
  Homolog annotation: Hit_ID=Q2QLM6; Match level="QueryCoverage=99%, HitCoverage=100%, E-value=0.0, Identity=64%"; Hit description =Associated with HOX family protein, expressed
  Pfam annotation: Domain name=Homeobox; Domain location=386-444; Score= 6.8; E_value=0.00097; Accession=PF00046.19; Description=Homeobox domain
  Pfam annotation: Domain name=POX; Domain location=198-336; Score =267.8; E_value=2.2e-77; Accession=PF07526.2; Description=Associated with HOX
  Pfam module annotation: Pfam domain module=Homeobox::POX; Domain location=386-444::198-336
MATYYSSQGSEREPSQNMYSRDPGNGTASYPPLPSALGNLLYLNSPASGGPYTDFGGVQQDCIEMPEPGHPSVMSHDSSAREIEPDMLGQQRRSFGLARGMKDEVLMRMMDGSGSHSSAADAIHDDAPNGIQLDFGVLGSHGPPAQGGQGSLSLSLNTHIMAPALPYWPVVKADMLSPHSYDHGCGGGSGGLGSEPSRAIRNSRYLKAAQELLDEVVNVWNSIKQKAQKEQVEAGKTEGKENEGGGPKSEGPQESGANAAPELSTAEKQELQNKMAKLMAMLDEVDRKYKHYYHQMQSVVSSFDMVAGAGAAKPYTAVALQTISRHFRCLKDAINDQISVIRKKLGEEESSSGREGRLTRLRYIDQQLRQQRAFQQYGMIPQNAWRPQRGLPENSVTILRAWLFEHFLHPYPKDSEKLMLARQTGLTRSQISNWFINARVRLWKPMIEDMYKEETGDIEQDSNSSSDNAPAGSKAKTASSRDKEDHLARSCCTPRAVCESSSQLSEPPGGASMRAMSVAAAAAGAPMGLFQNEPGHDHDHDDSFMSLMLKEQRPNDGGGGLLLHHSAVAQHQDENARFMAYHLAELGRYGNGNVSLTLGLQRSSSSLSVPHAQQSFPGVGIGVGDDDIYNATAAPLGVSVASPDYESMSQMDQRQRFEQSPLLHDFVA

SEQ ID NO: 61045 - protein, 269 aa, Zea mays
  Coding DNA Sequence Number=SeqID_19266
  Gene Ontology: Mol. function=binding; Cellular component=thylakoid; Biological process=photosynthesis
  Homolog annotation: Hit_ID=Q2QLM7; Match level="QueryCoverage=90%, HitCoverage=61%, E-value=6e-67, Identity=51%"; Hit description=TPR Domain containing protein, expressed
  Pfam annotation: Domain name=TPR_1; Domain location=154-187; Score =6.7; E_value=0.84; Accession=PF00515.18; Description=Tetratricopeptid e repeat
  Pfam annotation: Domain name=TPR_1; Domain location=222-255; Score =32.4; E_value=1.6e-06; Accession=PF00515.18; Description =Tetratricopeptide repeat
  Pfam annotation: Domain name=TPR_2; Domain location=154-187; Score =5.9; E_value=6.7; Accession=PF07719.7; Description=Tetratricopeptide repeat
  Pfam annotation: Domain name=TPR_2; Domain location=188-221; Score =8.7; E_value=3.2; Accession=PF07719.7; Description=Tetratricopeptide repeat
  Pfam annotation: Domain name=TPR_2; Domain location=222-255; Score =27.1; E_value=6.1e-05; Accession=PF07719.7; Description =Tetratricopeptide repeat
  Pfam module annotation: Pfam domain module=TPR_1::TPR_1::TPR_2::TPR _2::TPR_2; Domain location=154-187::222-255::154-187::188-221::222-255
MPRREVSLPDAFNLVLGKDRDNWPPAAGLLVAAYYGDIRRLKAQRALIDKVTPLSMALKHSYVSCLKLLVQRNLIHICNAGNTKYDAIQECSYDSTRLPIELAAEYGTWEDVELLFPVTSKIPTVADWSVNGVISNVHMEVTQLEDDEIVNKKKSELKRQGADAFSKEDYLNASVFYTQALKVDQFDATLFSNRSLCWLRLGDGKKALLDAIECKHLRPNWGKAYYRQGAALMSLEDYSSAYDAFSHGLELDPESEEMEKMLWEAMDLK

SEQ ID NO: 61046 - protein, 129 aa, Zea mays
  Coding DNA Sequence Number=SeqID_19267
  Homolog annotation: Hit_ID=Q6QP51; Match level="QueryCoverage=32%, HitCoverage=19%, E-value=9e-12, Identity=76%"; Hit description =Putative growth-regulating factor 1
MGAQAHVSFNWRAGCYVRTTAPPLAPLPCLLDCRTSTATRGNPAYGPAVPARRDGTGKGGYPEKDPSPRRKQAPSLPTDQRFEGWPLGGVQQPPQSAWVPRPLLVRGSKAGPSEGFNGCLRPLGLHAHY

SEQ ID NO: 61047 - protein, 185 aa, Zea mays
  Coding DNA Sequence Number=SeqID_19268
  Gene Ontology: Mol. function=RNA-directed DNA polymerase activity; Cellular component=mitochondrion; Biological process=RNA-dependent DNA replication
  Homolog annotation: Hit_ID=UPI00004C1733; Match level="QueryCoverage =99%, HitCoverage=13%, E-value=6e-96, Identity=89%"; Hit description =UPI00004C1733 related cluster
  Pfam annotation: Domain name=rve; Domain location=46-178; Score=75.3; E_value=1.9e-19; Accession=PF00665.16; Description=Integrase core domain
MGNAFRQGFYWPTAVADATRIVRSYRRCQFYAKQTHQPAQALQTIPIAKPFAVWGLDLVGPLQNAPGGFSHLLVAIDKFSKWIEVRPLTSIRSEQAVAFFTNIIHRFEVPNSIITDNGTQFTGKKFLDFCDDHHIRVDWAAIAHPMTNGHVERANGMILQGLKPRIYNDLNKFGKRWIKELPSVV

SEQ ID NO: 61048 - protein, 263 aa, Zea mays
  Coding DNA Sequence Number=SeqID_19269
  Gene Ontology: Mol. function=structural molecule activity; Cellular component=chloroplast thylakoid membrane
  Homolog annotation: Hit_ID=Q75IA6; Match level="QueryCoverage=59%, HitCoverage=60%, E-value=6e-66, Identity=79%"; Hit description =Putative PAP_fibrillin
  Pfam annotation: Domain name=PAP_fibrillin; Domain location=92-245; Score=102.3; E_value=1.5e-27; Accession=PF04755.3; Description=PAP _fibrillin
  Subcellular localization annotation: CTP_CleavageSite=34; ConfidenceScore=5.79e-01
MAPAFSVSCAPGSSRPLAASPGPSVVVVASSQLPASSRSSERRRAPGLALAAAPGVGGRDGGGRWRAGISSFPFLPPFFTGNKGEKDAEKAMRLKEELLDAIAPLDRGAEATPEDKERVEQIVQQLEAVNQVKEPLKSDLLNGKWELLYTTSTSILQPQRPKYLRPFGKIYQSINADNLRAQNMETWPYFNQVTANLVPLNSRRVAVKFDYFKIFGLVYYLADESGVRFVWQPSQELSGLAMLCVFDDYYIKDCGVISAPEET

SEQ ID NO: 61049 - protein, 478 aa, Zea mays
  Coding DNA Sequence Number=SeqID_19270
  Gene Ontology: Mol. function=glutamine-tRNA ligase activity; Cellular component=soluble fraction; Biological process=tRNA aminoacylation for protein translation
  Homolog annotation: Hit_ID=Q5VRX8; Match level="QueryCoverage=100%, HitCoverage=64%, E-value=0.0, Identity=78%"; Hit description =Putative tRNA-glutamine synthetase
  Pfam annotation: Domain name=tRNA-synt_1c; Domain location=271-478; Score=233.3; E_value=5.3e-67; Accession=PF00749.11; Description=tRNA synthetases class I (E and Q), catalytic domain
  Pfam annotation: Domain name=tRNA_synt_1c_R1; Domain location=14-171; Score=236.4; E_value=6e-68; Accession=PF04558.5; Description =Glutaminyl-tRNA synthetase, non-specific RNA binding region part 1
  Pfam annotation: Domain name=tRNA_synt_1c_R2; Domain location=172 -264; Score=131.9; E_value=1.8e-36; Accession=PF04557.5; Description =Glutaminyl-tRNA synthetase, non-specific RNA binding region part 2
  Pfam module annotation: Pfam domain module=tRNA-synt_1c::tRNA_synt_1c_ R1::tRNA_synt_1c_R2; Domain location=271-478::14-171::172-264
MGTGGDGSKAGPALPLEALLALGLDQRTAENALVNAKVTANLASVIAEAGIKECDKSVGNLLYAVATKYPTNALVHRPVLISYVLSTKIKNPAQLDAALSFLTNTGPDSLDVVKFEEACGVGVVVSIEEIKSTVTDVLEENMEAIKEQRYHINVGTLCGQVRKRHPWGDAKAIKEEIDKRLAEILGPKTEADNIKPVKKKKEKPAKVEEKKVAVATAAPPSEEELNPYTIFPQPEENFKVHTEIFFSDGNIWRAHNTKEILEKHLKATGGKVMTRFPPEPNGYLHIGHAKAMFIDFGLAKERNGHCYLRFDDTNPEAEKKESIDHIQEIVHWMGWEPYKVTYTSDYFQALYEHAVELIQKGLAYVDHQTAEEIKEYREKKMDSPWRGRPIEESLKLFEDMRRGLIAEGAATLRMKQDMQNENKNMSDLIAYRIKLCTLEFDIRRPSYYWLLVALGLYQPYVWEYSRLNISNTVMSKRK

SEQ ID NO: 61050 - protein, 118 aa, Zea mays; identical to SEQ ID NO: 50451
  Coding DNA Sequence Number=SeqID_19271

SEQ ID NO: 61051 - protein, 361 aa, Zea mays
  Coding DNA Sequence Number=SeqID_19272
  Pfam annotation: Domain name=Hin1; Domain location=145-285; Score =124.9; E_value=2.3e-34; Accession=PF07320.4; Description=Harpin -induced protein 1 (Hin1)
MAGVSMSCRLLLCAADYEKNELTFLSITGNLIVELSFSKLGPTSSTRVRCMFSYLRADVKSGSHDTQSTLDQSLQTYIDKVENRKITTSYTVNRFHANFVLSEAPAKRRRGGRSCPFSCCCCFCWTLLVVVLLAVLAAVAGGAFYLLYRPHRPAFTLTAARVTRLSLSSSATAPALSDAIDVTLTARNPNKKLVYVYDDFAVTAATAANAVPLGAATAPGFAHEAGNVTVIRATVSASALAVDPAAAGSDVKRSGEFPIVLDLETRAGVRVGAVRTKKIGILVHCDGVKHAPNDQKQKAVQRSAKTVGDAPHCIIRSDTSVALHGCKPSANHVRPGETEETSTADSGGSWGWMLGVVAITS

SEQ ID NO: 61052 - protein, 300 aa, Zea mays
  Coding DNA Sequence Number=SeqID_19273
  Gene Ontology: Mol. function=translation initiation factor activity; Cellular component=mitochondrion; Biological process=translational initiation
  Homolog annotation: Hit_ID=O42929; Match level="QueryCoverage=58%, HitCoverage=86%, E-value=5e-19, Identity=34%"; Hit description =Density-regulated protein homolog
  Pfam annotation: Domain name=SUI1; Domain location=104-186; Score =85.1; E_value=2.1e-22; Accession=PF01253.13; Description=Translation initiation factor SUI1
MSAEKPAPVRVLYCGVCGLPAEYCEFGPDFERCKPWLRAHAPGVYPDDLVAASSSPGGGDKDVDKIGDRLQGVGISDGSTSAAGDASASKPQEAKRLPGGKLKKKEKQEVVIEKIVRNKRKCVTVVKGLELFGVKLSDASKKLGKKFATGASVVKGPTEKEQIDVQGDISYDIVEFITDTWPDISDTVSAQTIWCHSTQHSHHVLELVKNVIASIRGRYLSRPFSSLKMEGRFLLLDAIWFIRHETNGFTNIIQSLGQIAYTNAYKNSHHAYTAYKNAYISNQVLNKNAYRMHTRKSPWF

SEQ ID NO: 61053 - protein, 98 aa, Zea mays
  Coding DNA Sequence Number=SeqID_19274
  Gene Ontology: Biological process=cell adhesion
  Homolog annotation: Hit_ID=Q6F3A5; Match level="QueryCoverage=54%, HitCoverage=11%, E-value=7e-12, Identity=62%"; Hit description =Expressed protein
MSSCSSLIAIRYLLDPDIYTDGRISVQGIDAVLFAPDDAKATQTVDPNRKPPTIVTHKKKIKLRRDNCSSVMVNGDCSSVSALTYEKLNGSCTNLLVE

SEQ ID NO: 61054 - protein, 791 aa, Zea mays
  Coding DNA Sequence Number=SeqID_19275
  Gene Ontology: Mol. function=structural constituent of ribosome; Cellular component=intracellular; Biological process=translation
  Homolog annotation: Hit_ID=Q33AD5; Match level="QueryCoverage=84%, HitCoverage=95%, E-value=1e-105, Identity=36%"; Hit description =Expressed protein
  Pfam annotation: Domain name=DUF594; Domain location=661-708; Score =38.0; E_value=3.3e-08; Accession=PF04578.4; Description=Protein of unknown function, DUF594
MVVGTNEIQGSVVSAEEQTKERSDPKKQQAFSAESSESSLRMMGGGLINTWKKWEIQVLVLLSFTLQLILLAFARIRRRKGSAPLRVLLWLAYLMADSTAIYTLGHLSLRASSGEKQVVALWAPLLLLHLGGPDTITAYAFEDNQLWLRHLLNLAVQAMGAAYVLYQSVATQTHQRALVTASMLMFVTGLVKYGERTWALKRANIDSIRGGLDLQDDRDRRQPYDGRAGTAELELDSEEVLLGAHYVFNACKSFFTDDLITSGAEREAISRGIQFNGGRYTHELIEMQLSLMYDIMYTKAAVIYTWYGICIRLMSPAATWASFFLFRLSSSRGHGGPGGYSRVDVVVTYVLLAGAFVLEIASLVRVLGSSWACAFLHARRWDRIHGAVRCLRLLVRAARSRRWLDSVGQYNLLDFCTRDRTEIRSWVAKKVGLEKWWDKLHYSGTVSISDSFRDLLLEEIPRRQLGDMRDARGRWTLQQITYPPGSSGRLYDEISWSVNETDFDQSILIWHVAIDVYLCCRRKPGLAAAAAAEDRLAKAVKELSDYMFFLFVVQPHMLPGPVRSTRYDNNCDGLVALWQRLSADHDSMDPTLTPRENLARLLYREYRDKDDDDPDPDSDGRRASPAAADFSVQMTMEEEDNNPHGLAYIDAAGLTGLLLSERSGIPDVLEMIAGVWVEMLCYAARHCTEVSHAKQLSSGGELVTAMGMLVEYTARYDLHPHGRLGSEDDSSMENGEPSGAPAEVSVVDIDSISEDLHMDPSDPWRAPDAIRKGLFSSTRIDSASPEWSQIP

SEQ ID NO: 61055 - protein, 116 aa, Zea mays
  Coding DNA Sequence Number=SeqID_19276
  Gene Ontology: Biological process=response to nematode
  Homolog annotation: Hit_ID=Q69V70; Match level="QueryCoverage=80%, HitCoverage=27%, E-value=2e-37, Identity=84%"; Hit description =Transporter-related-like
MVGGAGVRDPLVASEIHGFLTCAATSFQVLGHMKTVCVLILGWILFDSTLTVKNILGMLLAVMGMVVYSWAMEAEKKAVAPVPRIKSKMLDGEDVPLKARVSGMPAVDLEDDEMKS

SEQ ID NO: 61056 - protein, 442 aa, Zea mays
  Coding DNA Sequence Number=SeqID_19277
  Gene Ontology: Mol. function=transcription regulator activity; Cellular component=nucleus; Biological process=regulation of transcription
  Homolog annotation: Hit_ID=Q5SMX4; Match level="QueryCoverage=84%, HitCoverage=87%, E-value=1e-51, Identity=37%"; Hit description=Basic helix-loop-helix protein-like
  Pfam annotation: Domain name=HLH; Domain location=205-254; Score =38.5; E_value=2.3e-08; Accession=PF00010.16; Description=Helix-loop -helix DNA-binding domain
MQISMRMNMDDEAAVVYHMSSNGGATAIDMHDPIVDGLLDDPHHGAGGRACSSFPSSSSCSSLSLPAASASLSCSPDDPDSSSAHHILAAPAAGGGNQQYPEVSSHVPLLPPPPPPPVVPSYDHHHQYTDLHAPAPAKPTGAFKHYARHLGPKRPPKPGACGQRMFKTAMSVLSKMHVAARYSQQQYYYQAAAAAEAAQPPPSVNQLQHMFSERKRREKLNDSFHALKAALPPGAKKDKTSILIRARDYVRSLEAKVAELEEKNKSLESRLTRRTDGSSDDDDNGSGETTKVEVEITRTANEELCTVKIEVRSPPAAAASPCNRTDVVVRTLQCLKEQIGDGVSLVAMSTSGGAEPAATGVKNAFPRAVLTMQIKSPGTDWEEQPVKDAVAKVVADALTTTTTPPLPPAAATTVPPAASPGLLINDSSSANNSLTIRPAIMK

SEQ ID NO: 61057 - protein, 198 aa, Zea mays
  Coding DNA Sequence Number=SeqID_19278
MAAPLRPTAAFSPEIGHPALRRSISYPDWGYAKRSHPRRTADRGRGEDSGEELLAPRLPIPHGDVPNPLGKPKGSSTTKPGAQGARIRCHGCGASPTISVGGELDAEALVYDCKVRGAATWKEARETGVLSPYVVKRFTRSRHAEKLGGSCANRVRVKVEEIADSKPPPISENERQVWYRLTVLFLLFLKFLNFPLRI

SEQ ID NO: 61058 - protein, 100 aa, Zea mays
  Coding DNA Sequence Number=SeqID_19279
MALPDREEGEERNDQGGGNKDYKGRKGTRDCGGSGRGSGGGGGDFSFDEEGAVDGVAPRGQSVHWKTAWGGRESASIVLTRFLFFLKHQFYPSIFDGLTK

SEQ ID NO: 61059 - protein, 58 aa, Zea mays
  Coding DNA Sequence Number=SeqID_19280
MEKVVVRQKGEEWQFSKLRTLSFQIVTTPPRLPQEWRSSSIALHSEAFEAVRVKLLAF

SEQ ID NO: 61060 - protein, 108 aa, Zea mays
  Coding DNA Sequence Number=SeqID_19281
  Pfam annotation: Domain name=zf-CCHC; Domain location=59-76; Score =15.3; E_value=0.0029; Accession=PF00098.13; Description=Zinc knuckle
MKGLEKKSRNSNLRKNILPLVCKSSTKNQENNKNGIGYNSFVQKKATNQNKAKQNPKPIKCYEFGKEGHFALNCKATLPTPLLKHSRPFAFNAHYVLRKVANGKMFPL

SEQ ID NO: 61061 - protein, 441 aa, Zea mays
  Coding DNA Sequence Number=SeqID_19282
  Gene Ontology: Mol. function=DNA binding; Biological process =regulation of transcription
  Homolog annotation: Hit_ID=Q6Z156; Match level="QueryCoverage=94%, HitCoverage=98%, E-value=1e-172, Identity=73%"; Hit description =Putative CDPK substrate protein 1
  Pfam annotation: Domain name=Myb_DNA-binding; Domain location=244 -295; Score=41.3; E_value=3.3e-09; Accession=PF00249.21; Description =Myb-like DNA-binding domain
MERLSTNQLYSSGVPVTVPTSLPCIPVSLDESFPRLPDAQSVLMERELRSTPLPPHQTTVAPIRGLFHSNTGSVGPLCSPPSVRFSSHSNPEQYPNHNSYNSQVPSTASSSTLNYGSQYGGFEPSITDFPRDIEPTWCPDPVESILGYSGDVPAGNNLTGTTSIGASDDLTKQTEWWTEFMNEDWKDMVDNPTSTETQPVGQPVQSSNSVHQSATQQTVSSQSVEPLAVVAPSPTAGSNTGKARMRWTPELHERFVDAVNILGGSEKATPKGVLKLMKADNLTIYHVKSHLQKYRTARYRPELSEGSSEKKVASKEDIPSIDLKGSFDLTEALRLQLELQKRLHEQLEIQRSLQLRIEEQGKCLQMMLEQQCIPGAEKAQDASTAADELRSPSEIPESSTVKEVPENSQNGSTKQTSLNQVVFVLPWEQMNAIVNFLAKPG

SEQ ID NO: 61062 - protein, 226 aa, Zea mays
  Coding DNA Sequence Number=SeqID_19283
MDSSDSSEEWSGGDGDGGEDDGSSGDDDGEGGGSGDGEGDGTGNGDGSKGDDDGSKGDSDGDKGQTPERNVRGIFKRPIKSNFGIKRSACYMNHEAHATLVAFNAIYNHIGTRNLVEKVVREAKAIKEVKRIKELKGIIEEYNHEEDEELKDSLSLIDIMNKTIDEVVLKICNDVADEDRKNVRMYDVEDIMTKDFGVLSLLLGDSLSDSTFYLKDFEVLSPLMGD

SEQ ID NO: 61063 - protein, 39 aa, Zea mays
  Coding DNA Sequence Number=SeqID_19284
MATESRITGNDSLSPFLTSRFSHGGGTLTATSAIEIANH

SEQ ID NO: 61064 - protein, 61 aa, Zea mays
  Coding DNA Sequence Number=SeqID_19285
MARCMGVAILWQMGNMTCGYRAQPLQSVKLPYTSYELPPLPPTGEEQVVQEEPQSEEFDLI

SEQ ID NO: 61065 - protein, 51 aa, Zea mays
  Coding DNA Sequence Number=SeqID_19286
METKLSGSLCIAPAHAKEGELEDILADLGEESDEESEDFDFEEDNNVNDIQ

SEQ ID NO: 61066 - protein, 518 aa, Zea mays
  Coding DNA Sequence Number=SeqID_19287
  Gene Ontology: Mol. function=sugar porter activity; Cellular component=integral to membrane; Biological process=carbohydrate transport
  Homolog annotation: Hit_ID=Q9LKH1; Match level="QueryCoverage=94%, HitCoverage=88%, E-value=1e-158, Identity=55%"; Hit description =Putative Na+/myo-inositol symporter
  Pfam annotation: Domain name=MFS_1; Domain location=1-462; Score =76.3; E_value=9.4e-20; Accession=PF07690.6; Description=Major Facilitator Superfamily
  Pfam annotation: Domain name=Sugar_tr; Domain location=1-503; Score =358.6; E_value=1e-104; Accession=PF00083.14; Description=Sugar (and other) transporter
  Pfam module annotation: Pfam domain module=MFS_1::Sugar_tr; Domain location=1-462::1-503
SSAANAYNLYAGVISGALLYIRDDFEQVEKSTVLQETIVSMAVAGAIVGAGAGGWMNDRFGRRPSILIADLLFLAGSIVMAFAPTPAVIIVGRVLVGLGVGMASMTSPLYISEASPARIRGALVSTNGLLITAGQFLSYLINLAFTKVSGTWRWMLGVAGLPALLQFVLMLALPESPRWLYRKDRKREAEEIMRKVYPPEEVEGEIEALRTSVEDDMAQERSLGGAGLAGTLRKAFGSVVVRRGLTAGVLCQVAQQFVGINTVMYYSPTIVQLAGVASNSTAMALSLVTSGLNAVRSWGKSQFVDKAGRRRLMLLSLMGVVVCLALFGANGTCPEFDLAAVAGVEWTCAQCIKAPSGCGFCADTEKLLPGACLRTSDASRRACRAGRREWYMRGCPSSFGWLALVALGAYIVSYSPGMGSVPWLINSEVYPLRFRGVCGGIAAVANWTSNLLVTQTFLSLTQALGTAGTFLLFCGVSAMAFLLIFLLVPETKGMHFEEVEQMLGSKDYKAWKKFNSKA

SEQ ID NO: 61067 - protein, 111 aa, Zea mays
  Coding DNA Sequence Number=SeqID_19288
MDKGKTVLRWGPWQKILNELQTVAVEEERGGGSYRQRDCSGKVVEGGRPKSGEDDLGSPVRFYRVRELRRLHRPLAKLTEGQVQHGHDWSGQAVVAEAWAVVVGGGKARRS

SEQ ID NO: 61068 - protein, 46 aa, Zea mays
  Coding DNA Sequence Number=SeqID_19289
MAIVEADTSKDALTVLGIFFKGEELELLLFDYRELCLIVKLELPSP

SEQ ID NO: 61069 - protein, 60 aa, Zea mays
  Coding DNA Sequence Number=SeqID_19290
MEGGCNVMRGVASQGGKGRGGQAKIETYDGYTDAIEWLEIYQLFNMDARGEHNGAWHHEV

SEQ ID NO: 61070 - protein, 106 aa, Zea mays
  Coding DNA Sequence Number=SeqID_19291
MVRTKNVSALGGGDDEDPPRPFRQVKGKTMYLEQQEGRKKRHMDRAARAALAAATEQAEQARFRERDETEVRLLAADPHLIDLQRATAARLIRLPQFQGTLEASCL

SEQ ID NO: 61071 - protein, 212 aa, Zea mays
  Coding DNA Sequence Number=SeqID_19292
  Gene Ontology: Mol. function=ATP binding; Biological process=apoptosis
  Homolog annotation: Hit_ID=Q2R1P5; Match level="QueryCoverage=88%, HitCoverage=13%, E-value=2e-43, Identity=51%"; Hit description =Leucine Rich Repeat family protein, expressed
  Pfam annotation: Domain name=LRR_1; Domain location=107-134; Score =4.4; E_value=43; Accession=PF00560.23; Description=Leucine Rich Repeat
  Pfam annotation: Domain name=LRR_1; Domain location=136-157; Score =8.3; E_value=7.8; Accession=PF00560.23; Description=Leucine Rich Repeat
  Pfam annotation: Domain name=LRR_1; Domain location=159-181; Score =7.3; E_value=12; Accession=PF00560.23; Description=Leucine Rich Repeat
  Pfam module annotation: Pfam domain module=LRR_1::LRR_1::LRR_1; Domain location=107-134::136-157::159-181
MPVPYKEFRHKPTFAKVKALNPPKSVGRWGLVDPAEISGTGKAKSCIVGNRVHGFITMIAKKQHIVETRLSQHLAQHFSIFSDVRLRASEKIRDFLQVLPKQYHFSRLKVLDLEGCKCVGTKNTSYLKDVCCNLLLLKYLNLRSTNVTQLPGEINRLHELEVLDIRHNNVHKTATRYLRLLKLKRLLAGCIDDPTLPSVELPEKIGKMEGME

SEQ ID NO: 61072 - protein, 73 aa, Zea mays
  Coding DNA Sequence Number=SeqID_19293
MAAHSAPFVAEGKRRLMRVAHRQWKKERIRGAYRVTAPRAHESASRPSMHARKLVNDDAAHQPMTWSGRRMAG

SEQ ID NO: 61073 - protein, 48 aa, Zea mays
  Coding DNA Sequence Number=SeqID_19294
MGGCFDSPHQNKGNSILRVLSVIGSLILLNNGIEIPGPWGGDGWATNL

SEQ ID NO: 61074 - protein, 146 aa, Zea mays
  Coding DNA Sequence Number=SeqID_19295
  Subcellular localization annotation: CTP_CleavageSite=46; ConfidenceScore=5.29e-01
MANVESRPSKATQTSRIAMGGLVSSSTITKKGKAGNPNLARRYMLKTMYVLGVVPFTGQVAGSTLPLIIGFVHPSIERYTTSDLRSTVFFTMGVMATIGEDKQQEEVEFLKKAKCAWEGKWRPRQEESLVLRNLSTFVQMTICLFL

SEQ ID NO: 61075 - protein, 406 aa, Zea mays
  Coding DNA Sequence Number=SeqID_19296
  Gene Ontology: Mol. function=RNA-directed DNA polymerase activity; Cellular component=mitochondrion; Biological process=RNA-dependent DNA replication
  Homolog annotation: Hit_ID=Q8S463; Match level="QueryCoverage=99%, HitCoverage=21%, E-value=0.0, Identity=83%"; Hit description =Putative prpol
  Pfam annotation: Domain name=RnaseH; Domain location=1-123; Score= -4.6; E_value=0.00016; Accession=PF00075.14; Description=RNase H
  Pfam annotation: Domain name=rve; Domain location=314-406; Score= -8.4; E_value=0.03; Accession=PF00665.16; Description=Integrase core domain
  Pfam module annotation: Pfam domain module=RnaseH::rve; Domain location=1-123::314-406
MFFDGSLMKTGAGAGLLFISPLGKHLRYVLRLHFPVSNNVAEYEALVNGLRIAIELGARCLDTRGDSQLVIDQVMKNSHCRDPKMEAYCDEVRRLEDKFYGLELNHIARRYNETADELAKIASGRTTVPLDVFSRDLHQPSVKTDDTPEPEKVSALPEAPSAQPEAPSAPEGEALHVEEEQNGVTPNRNWQTPYLQYLHRGELPLDRAEARRLARRAKSFVLLGDGKKLYHRSPSGILQRCISIAEGQELLQEIHSGGCGHHAAPQALVGNAFRQGSYWPTAVADATRIVRTCQGCQFYAKQTHLPAQDLQTIPITWPFVVWGPDLVGPLQKAPGGYTHLLVAVDKFSKWIEVRPLNSIRSEQAVAFFTNIIHRFGVPNSIITDNGTQFTGRKFLDFCEDHHIRVD

SEQ ID NO: 61076 - protein, 393 aa, Zea mays
  Coding DNA Sequence Number=SeqID_19297
  Gene Ontology: Mol. function=hydrolase activity; Cellular component =nucleus; Biological process=metabolic process
  Homolog annotation: Hit_ID=Q67TQ8; Match level="QueryCoverage=79%, HitCoverage=99%, E-value=1e-114, Identity=65%"; Hit description =Putative PrMC3
  Pfam annotation: Domain name=Abhydrolase_3; Domain location=153-371; Score=188.3; E_value=1.9e-53; Accession=PF07859.3; Description =alphabeta hydrolase fold
MTEHWTVWTGPPIVGKVCAAPALANFLEPSRDVRNDSNDKASHIMRKSAEDWNKDSLSSCAATPVHAAAACYTCRARAMDSSSRVIAFDCSSFKLYMDGQVERAAQRMETVPAGFDADTGVASKDVVIDVATGATVRLYLPPVQGATTKLPVVVFFHGGYFIVGSAREPMYHRYVNSLVARARVVAVSADYRLAPEHPLPAAYDDSWAALKWAVSGADQWLSDHGDLGRVFLVGISAGGNIAHNMAISVGVSGLPAAEPPRIEGVILLHPSFSGEQKMDVEEEEFWRSNNSRWAVIFPGATGGADDPRINPMADGAPSLEKLVGERLLVCTASLDPRAPRGPGYCEAVRASGWRGKVEWFETEGEDHGFFVLNPGSHKAVEVMDRVVAFLADQ

SEQ ID NO: 61077 - protein, 128 aa, Zea mays
  Coding DNA Sequence Number=SeqID_19298
  Homolog annotation: Hit_ID=O22106; Match level="QueryCoverage=48%, HitCoverage=15%, E-value=2e-15, Identity=75%"; Hit description =Squalene synthase
MGALTWLEEVLALEKLWVARVQIKCQIPLEEHWAFAYSMLQKVSYSFPLVIQQLRPKLYNVVSNSLLFRPLLMRTVSSPLARLGKLFGSSYFTVVSKHASINFPGQNETRDLEKQQTDLVIEKELFYT

SEQ ID NO: 61078 - protein, 109 aa, Zea mays
  Coding DNA Sequence Number=SeqID_19299
MEWSAVNCSYGTRKAITSAPMGEEETVLWQQDCNQSLTVPSYKAEHNDKGGIDPGTWGVRSTVPPFLRAAFYLSPWHCPYHSSWSLQLASSKDLCLISSCGIIILCTDM

SEQ ID NO: 61079 - protein, 191 aa, Zea mays
  Coding DNA Sequence Number=SeqID_19300
  Gene Ontology: Mol. function=transcription regulator activity; Cellular component=nucleus; Biological process=regulation of transcription
  Homolog annotation: Hit_ID=Q67TR8; Match level="QueryCoverage=83%, HitCoverage=65%, E-value=4e-34, Identity=59%"; Hit description=Basic helix-loop-helix (BHLH)-like protein
  Pfam annotation: Domain name=HLH; Domain location=108-155; Score =29.7; E_value=1.1e-05; Accession=PF00010.16; Description=Helix-loop -helix DNA-binding domain
MQVTACRLRHTCRRRRRPPPPGTQSSTRRRAAVYGATATGLEHLQDYVLSPPGGDCGGAAAAHAGSTLPTSADAMREAIFHIAALQPVEIDPEAVRPPKRRNVRISKDPQSVAARLRRERISERIRTLQRLVPGGTKMDTASMLDEAIHYVKFLKSQPHTAYDVAAPIFCWSRSPCMRVIDEYVYVLVYPT

SEQ ID NO: 61080 - protein, 121 aa, Zea mays
  Coding DNA Sequence Number=SeqID_19301
  Gene Ontology: Cellular component=exocyst; Biological process =exocytosis
  Homolog annotation: Hit_ID=Q2RAC2; Match level="QueryCoverage=70%, HitCoverage=10%, E-value=1e-17, Identity=58%"; Hit description =Exocyst subunit EXO70 family protein, putative, expressed
MQRDSMQWSKGNTDDMVTILGSFDHLLSTLEAVMRPILGPRYHYPPGQDITPHEVSTHAIRTTHENINQTIKVVDNLLSQFDLAHRVVCYSSLNQHARRLAQNQGELDEVSLWHYVGLRAS

SEQ ID NO: 61081 - protein, 803 aa, Zea mays
  Coding DNA Sequence Number=SeqID_19302
  Gene Ontology: Mol. function=two-component response regulator activity; Cellular component=membrane; Biological process=two -component signal transduction system (phosphorelay)
  Homolog annotation: Hit_ID=Q9FXT2; Match level="QueryCoverage=97%, HitCoverage=95%, E-value=1e-156, Identity=44%"; Hit description =Ethylene receptor homologue
  Pfam annotation: Domain name=GAF; Domain location=175-340; Score =35.6; E_value=1.8e-07; Accession=PF01590.16; Description=GAF domain
  Pfam annotation: Domain name=Response_reg; Domain location=672-797; Score=30.3; E_value=6.8e-06; Accession=PF00072.14; Description =Response regulator receiver domain
  Pfam module annotation: Pfam domain module=GAF::Response_reg; Domain location=175-340::672-797
MASAGGEGAVLVPLARRCGGCDGREEAVVEAMLQWQKVSDLLIAASLLSIPLELLYFATCAALAPLRRVLLQLGTFIVMCGVTHLLNVLAYDHPGSHRILVALTTAKILGALATSAAAVSLPVLFPRLLRLKVRESFLRTKARQLDRDLATVRHREETVWRVVRAVTHHIRDSIDARTILRTTMLQLAAALGLSNCAIWMPQPGGSDRGVLQLMDQLLPDRDDEGDKVLHHSGGTRAISVRDPDVAAVLASKDAKVLSRPGSALKAASCRSVPLAGAAAAIRIPNFHGEVGSRNTSEPLSYAILVLVLRAHEDQHRAPTGWSNLDLEIVQAVADQVTVALSHAAALEESQLIRHRLAEQHGALLRARSELAAATKARNNAHSAMRSAMGRPMHSVVGLISVMQQEAAAMRPEQRLIVDAIARTNAVSSTLMDDVMETLQRMVDIRDPPLSTPTPTLVSRRPFELRSLIRDAAFVARCLSGCQELGFSHQLQANSLPEWVVGDDKRVFHLVLHMVGAQLSRCHGQHVTAAGRTLSFSVCSCNSIASEHQDWIPSPLRPVSFTSGNQVFVRIQIGLTKSGPGSSPASRPPQCGLSSDSGGANMRLTFAMCKKIVEMMNDDMWWASESEGQGETMTCILRFQQQQPPNPHVPGSGTYRIGASSATAAPHLHFNGLRILLADSDAMSMEVTRKLIERLGCQVLPVSSGADCLSLLRGAEPSFELVVLDLDGHGGAGTAGAMDGLEVALRIRELSNTCWLLVLVAVEASGVDDTVRDMCRRAGVDGLIHKPITLPALGAQLQRVLQNN

SEQ ID NO: 61082 - protein, 58 aa, Zea mays
  Coding DNA Sequence Number=SeqID_19303
MPSVVPFCPQFDRHYRELNLCAWLAASITLIPFPRVGLAPRLWLFGVVVSTFDKDEIT

SEQ ID NO: 61083 - protein, 38 aa, Zea mays
  Coding DNA Sequence Number=SeqID_19304
MDVLMIRNLGEDQQGIGKGQDGISLHGGVTRVARVITN

SEQ ID NO: 61084 - protein, 122 aa, Zea mays
  Coding DNA Sequence Number=SeqID_19305
MARLGVIIIMYFVYMFVEEPVAEDPGAQQIEVAEQELIEEIYITHVHTFVISLLFTVHDKIIMLMGTWRTTRENSATTRVAQSIIESQAQGESKSSLFADLVRTTGAGSTKMDAQATYGLHF

SEQ ID NO: 61085 - protein, 100 aa, Zea mays
  Coding DNA Sequence Number=SeqID_19306
  Subcellular localization annotation: CTP_CleavageSite=46; ConfidenceScore=5.66e-01
MKAAGFPPLSRSSPATSLPPFALGLTPTHLSWGTRRHSLVGPGTPRSRNADNFVYMFGVMLIFSIYYACVYCDHYVNGNMENHLGKIVPPQGWYGTPLAD

SEQ ID NO: 61086 - protein, 181 aa, Zea mays
  Coding DNA Sequence Number=SeqID_19307
  Homolog annotation: Hit_ID=Q10MH7; Match level="QueryCoverage=98%, HitCoverage=98%, E-value=2e-40, Identity=47%"; Hit description =Expressed protein
MPMLPAAERPRLTLEDYIVFFTTRSGGGLNLHHLNHIIYMHGFARLHRAPKPAMVDALRSVELMRPRRSTVPFNATAPPPGAAPVAPAVLSLDEVTRDIEDIGWRECPVGSLLSVRAGMRSPAAEAAETPIPLPILARASSSLPPAAAKRKRSRTGKAEAAMRRRVLELLTLPSVETVTSA

SEQ ID NO: 61087 - protein, 364 aa, Zea mays
  Coding DNA Sequence Number=SeqID_19308
  Homolog annotation: Hit_ID=Q10MH6; Match level="QueryCoverage=36%, HitCoverage=30%, E-value=2e-19, Identity=45%"; Hit description =Expressed protein
MPRRALTLETYLRFFLDPWNTRITVDQLNQILFMHGFVKLHRTKKTPFTSSLRRCARNAHGAVFRRGGRFGQAKIMERLVGQVDLLPPRRSTLHRASLPSAAAITAAQARDDVEAIGWAECPIGRVAAFAAPSADAPEPVERVPQPADFVLTGRRPRSKRTRGSAYGPSDVAAASKKLKAGAPQKHANVIVKEEENDHELVSPPPPPPDVALPPPRKLQPTLARIPAPPAWGTPMVLPYPSHQLFWGVPLPSRPTAQPCPATPPPGWSVPTPPPSYPAPFCGAPVMLPPLPRHVAWRSPPPLLLKRPPPHLQGKPLPALLPVQHHHLLIHRSCSCSSAAAAVALTGPVGSSHLLRFFRLRNLSK

SEQ ID NO: 61088 - protein, 1147 aa, Zea mays
  Coding DNA Sequence Number=SeqID_19309
  Homolog annotation: Hit_ID=Q10MH2; Match level="QueryCoverage=72%, HitCoverage=85%, E-value=1e-160, Identity=43%"; Hit description=Fip1 motif family protein, expressed
  Pfam annotation: Domain name=Fip1; Domain location=24-84; Score=59.5; E_value=1.1e-14; Accession=PF05182.4; Description=Fip1 motif
MGQIDRHVFRRDYNFFLSRNSTIFDIDIEAFQLKPWRQQGADLTDYFNFSLDEEGWRKYWCSMKQLRLGARSLVNETSGLEQESYKLKSAKAMSNVANDSGSEGRNDIGKPKGRAIHVEGSACERVPSADLWRPIQRDSDVVIQVNMTLSPSNQSTSDDSSKLNHKGVATERVFDKEVYDGGSSEGVGSKLDRRDSYFARDQSPSPDYSDVLSGESKENHYFKRSNRHSDFRDFFEATKLQDEHVKSDFYCYPSKPDRENSESCRRGYTPSTDDRNMASKLLWMGEAPFTGRGKSGDLFLGHNSDRDFKSRHKARKGQRRQSLDDRRNAIFVEKEKPTDSYHSTCDRKFVKRRSSSSSLRTNYHNSVCNQSYEQRYSPLEKKALKNDEHYFSDESNYHHRQSLSCDINEGDIDKCFSSAKEWQRDGDHIYHSMVKTDMPDANDGRMYRDRYSPEKKIARHDHSMDVEFSHYTDYRFCEWRSLEVRGRYRDKGKFAKSNDGHFRHANHLELYSGLNNFERDKPATGFPVMSSRNRCIDNKEVCNAKMTQNNCHGYHQKNKQHDSSFCIGNIPRYALRTDTYAEKGHFVLPIKRKLYSDLGSMDQRTLADLPLLKGRLMHGQSIASDRRIYALKLHKSTKKINTEAICSSSDMRNINTLSNICVGRRHELDNADNIHLNDRKIKFEREGNELRRVIEDNQKGSHPVDKDLHTSRHKHVHQKLWKQNLSHRHSGNQDLEKSADQNCLNKDVEIEEGELIEEDHNNIIYKSKLKQENVVLKSVIETSSAEQLQVNNATSKDATCNNRATRESDEKHILEISSRINGLLGNGGGVVIVGCWKCLESLSVMVSSTRRRTREQLHCQENLENAETTRSCPLPTRGVAACQRLEAGTCGEDGKPPSTPADRITEISNDVHTPAPTPSSVKSSTDSALGGGSNAEPTWRADDLQPCPHPSLPLPSLQGPSPVRHRIREGRPVSPGPSSFTPPSPLKGAPRSTIPTGDLQQTSSTRARPASMAMRLLSPSTPPPRFPSPGQKAPASISASSSSYFSVRLRRARAAAAAAAGAAAAGGSDRRSGRFEGEAMSGAFDRGLAEIARKVPLFEPTADGELAAAAGERPLPINLELWLYRVKVHTRKFEFPEAEKLLDKVST

SEQ ID NO: 61089 - protein, 182 aa, Zea mays
  Coding DNA Sequence Number=SeqID_19310
  Gene Ontology: Mol. function=catalytic activity; Cellular component =intracellular; Biological process=metabolic process
  Homolog annotation: Hit_ID=Q69RP1; Match level="QueryCoverage=64%, HitCoverage=55%, E-value=8e-26, Identity=45%"; Hit description =Ribosomal protein-like
MAPPVDVTGLRPRLGDVEAPPKPRSSLSSVAEAESEPLGRARRRSSAEARAESEPWDDDKKYRDSIQGHRVLRRDRIAGHHKLYQDYFSENPTYGHCYFRRRFRMRRILFERLWKEVTATFWMLTYGVAADATDDYIRIGESTTIESLRRFVSGVVAVFGGEYLRSPNEDDTARLLAIGESR

SEQ ID NO: 61090 - protein, 135 aa, Zea mays
  Coding DNA Sequence Number=SeqID_19311
MEVARPCPGTDGWQLVESRSARLRRCALRNRLGHLPYVSGCESKAGQARKSVWRMITPSTATAPSSLSVAMESFPASTSDKRRRHWSRVRRLKGFANPGVLVKVGESSVLRSAGEQVGVADGRAALALSPLTCFA

SEQ ID NO: 61091 - protein, 895 aa, Zea mays
  Coding DNA Sequence Number=SeqID_19312
  Gene Ontology: Mol. function=ATP-dependent helicase activity; Cellular component=nucleus; Biological process=mRNA processing
  Homolog annotation: Hit_ID=Q10MH8; Match level="QueryCoverage=79%, HitCoverage=94%, E-value=0.0, Identity=81%"; Hit description =DEAD/DEAH box helicase family protein, expressed
  Pfam annotation: Domain name=DEAD; Domain location=388-559; Score =255.0; E_value=1.6e-73; Accession=PF00270.19; Description=DEADDEAH box helicase
  Pfam annotation: Domain name=Helicase_C; Domain location=628-704; Score=121.0; E_value=3.4e-33; Accession=PF00271.21; Description =Helicase conserved C-terminal domain
  Pfam module annotation: Pfam domain module=DEAD::Helicase_C; Domain location=388-559::628-704
  Subcellular localization annotation: CTP_CleavageSite=41; ConfidenceScore=5.19e-01
MALPVDVAVCALGRATWGAESEPWGRARRSFVVFRVLARVRALGSGGAEFAVFRVLARVRALGSGGAEFAVFRVLARVRALGSGGAEFAVFRVLARVRALGSGGAEFAVFRVLARVRALGSGGAEFAVFRVLARVRALGSGGAEFAVAPLARPDCLIPRPTSYNFERSQSVQRLYRPTDDPDLDDIAFSDDAPSDAQASTAVEGKAENEEEMDPLDAFMAEIQEEIRAPPPPPKPEALRRTDSDDDEDDPVESFLRAKKDAGLTLAADVMRAGYDSDEEVYAAAKAVDAGMMEYDSDDNPIVIDKKKIEPIPALDHSTIEYDAFTKDFYEEKPSISGMSDQEVTDYMKSLSIRVSGFDVPRPIKNFEDCGFHVPLMNAIAKQAYEKPTTIQCQALPIVLSGRDIIGIAKTGSGKTAAFVLPMIVHIMDQPELEKEEGPIGVICAPTRELAHQIYLEAKKFAKPYNLRVAAIYGGVSKFDQFKELKAGCEIVIATPGRLIDLLKMKALKMFRATYLVLDEADRMFDLGFEPQIRSIVGQIRPDRQTLLFSATMPYKVERLAREILTDPIRVTVGQVGGANEDIKQVVNVLPSDVEKMPWLLGKLPGMIDDGDVLVFASKKARVDEIEKELNQRGFRIAALHGDKDQASRMETLQKFKSGTFHVLVATDVAARGLDIKSIKTVVNFDIAKEMDMHIHRIGRTGRAGDKDGTAYTLITQKEAHFAGELVHSLIAAGQDVPNELMDLAMKDGRFRAKRDSRKGGKKGGKGKGGVGGAGRGRGVRGVDFGLGIGYNAESGSQVPAARSAAVNSLKTGMLQRFKSSFVSGSSNTPSSSAPSFVRPALRGFVSGGTIGGDTRPAQAAPTFIPASRPAQPAPAVPASQPAGNNNENGNPNPER

SEQ ID NO: 61092 - protein, 66 aa, Zea mays
  Coding DNA Sequence Number=SeqID_19313
MEVPLNGQLCLWRVPVFVGGQYWVLMDREAQVEAHLEEAVQAGARRSVGLVPGDLGSESAACWGSW

SEQ ID NO: 61093 - protein, 745 aa, Zea mays
  Coding DNA Sequence Number=SeqID_19314
  Subcellular localization annotation: CTP_CleavageSite=48; ConfidenceScore=5.52e-01
MGCGGSKEAVATGNSGSSRCNRFKRKSSVVDATQPSSRVLQPSLDNASAAAAAKASNGEVTKDKAATLKQKAVEEKKEEAVAVKNSKEAVSVKEGNAASSKASAIREEKPQVETKTDEAAAVTDAASEAAAAAVEKAGKEALAGKAAREKEGDEVVVVVKDKAVIAGQGLRIKHSSRTKQSSSTGGDVNAITVTAGKEEHIIRKDDVVKISTTEAAVDKGNNGGDEPDGTPYMAAIEENDDEAASSTEDVGDAVEEEDKKEVDDGSVTFPVSMVAEEDGSVTFKVRVNDAEAKDDDGSVKFATAAAGAAPTTSSNVVAVVAEEDGSVTFAVPVSPVIKDDDESVTSAAAPAAKVQDVVGAVVAEDDGSVTLAKPLAPVSVTKGGHSVSFVPARPATTKDDDDSVASAASPMTMDDEFVSLPVALEEEEEEEENEHWKDNDEAENEPAVSDDEEGTAEADGATEAEEDEEEAGQSEPSEDNDEVDDDADLPDPTAVEQLLTKAVEEIKAEEERSAADTVGENVSSKEPDEGKPIAPSRPRDEDGGEPDGKEPMDLEEEEARTTEEKTPDDHPGIPAEKKSGSDDKDSALPQTDQLLQAAAQEKRTAMAQQLTPHSHNTPPHPTPQKKTKKPESTQKIHINRTYHVYQRIERPSFHPSHSQSLTQREIPQPGGKALIAPSPSLASFTIPPSFATASSMGKLCCSQEDDEPAFNLLGLLVTVVLALLLLMLCTPPRRRRCVAYYPRYC

SEQ ID NO: 61094 - protein, 91 aa, Zea mays
  Coding DNA Sequence Number=SeqID_19315
MDDLRPATRLGAESRRLVRVDVAVLKLLAGGHTVGALTISPSPSMTKSMLLKRMVAPGAQAASWSTIQSLEGRIENVQRPLPNVSIVGVSN

SEQ ID NO: 61095 - protein, 229 aa, Zea mays
  Coding DNA Sequence Number=SeqID_19316
MAMMADTQHSGQVQHVRDFEGRDDATPAGVGRRAGGGAEGVTLDLDRGALGLASPLQRGGEGVPTAKPRREPFDLQRQPTLLPAPSQWPNPKSAGLHRSRWCAMLPICGMVSAESPPRPPPMFGDGAMPAAASGCLDACRDQSSAPTRIGHWRTGGHIMVILFREASPYNMEGLLLRLPVARGMTHTGRIGKEWAPGELHSPQEGKKSLIHRHLDRRHVPRSDLTGADE

SEQ ID NO: 61096 - protein, 354 aa, Zea mays
  Coding DNA Sequence Number=SeqID_19317
  Gene Ontology: Mol. function=triacylglycerol lipase activity; Cellular component=extracellular region; Biological process=lipid metabolic process
  Homolog annotation: Hit_ID=Q8L5T0; Match level="QueryCoverage=98%, HitCoverage=98%, E-value=1e-149, Identity=73%"; Hit description =Triacylglycerol Lipase
  Pfam annotation: Domain name=Lipase_3; Domain location=112-249; Score= 113.0; E_value=8.6e-31; Accession=PF01764.16; Description=Lipase (class 3)
MGRRGLLKAALLLCFLAACSGRELTIKQNPSTTIYNSTLAKILVEYASAIYTADLTQLFTWTCARCGDLIEGFEMIEIIVDVENCLQMYFDLQLTVYICVQCVKCTLLPPTVLIIQFLSIQNWIEDLLWKQLDLDYPGMPEAMVHRGFYSAYHNTTLRDGVVSGIQRTRKAYGDIPIMITGHSMGGAMASFCALDLVVNYGLDGVNLMTFGQPRIGNAAFASYFKTYLPQAIRVTHAHDIVPHLPPYFSFFPQKTYHHFPREVWTHNIGLGTLVYPVEKICDDSGEDPTCCRSVSGSSVRDHIYYLGVSMHAEDWSSCRIVMDYSKLQYQMDLNGNLVLSKQPGLSNARGFSAQ

SEQ ID NO: 61097 - protein, 146 aa, Zea mays
  Coding DNA Sequence Number=SeqID_19318
MTGCAPATSFLFWCVGSGSFLVFDAKGGEISPLLYDDFGSQTPLYTLDAYVDCRQMKSPIHPPPLGHRDPFSSIGLPKALSYNSSRLRLPTSAPHTNMIHGEGRWGWSSIESERPQIGAWGRRAQGLELHRVREAAAEWLEALREL

SEQ ID NO: 61098 - protein, 357 aa, Zea mays
  Coding DNA Sequence Number=SeqID_19319
  Gene Ontology: Mol. function=3'-5' exonuclease activity; Cellular component=intracellular; Biological process=mRNA catabolic process, nonsense-mediated decay
  Homolog annotation: Hit_ID=Q8LMQ9; Match level="QueryCoverage=62%, HitCoverage=42%, E-value=5e-88, Identity=72%"; Hit description =Putative nucleolar protein
  Pfam annotation: Domain name=3_5_exonuc; Domain location=151-296; Score=52.8; E_value=1.1e-12; Accession=PF01612.11; Description=3'-5' exonuclease
MDEPEKVRGREDAASGHEAGGAEEAGDGFQLVIHGKKKKRAASGQDCRTAGSGFGAGAGPVRALTREKGDAPAPGAKAKVPCHDPSIPRPQDVYKIRVDNYKPFEHVWLERNEDGTRHVHPLENLPVEQFVVRNVPDREPVKPADLEDTPFTLVQDHKGLTELAKKLKSVTEFAVDLEHNQYRSFQGLTCLMQISTRTEDFIVDTLKLRIYIGLYLQEPFKDPTKRKVMHGADRDIMWLQRDFHIYVCNLFDTGQLYISGFTSAQLCSGSLISPLLHGGQNSWPLVMELSVFQFEDFGYSHINHYAGYIGNKEKTLEEIRQDLCLLRGIDQIKAISIGYYDFWSELLSSILQSSGNV

SEQ ID NO: 61099 - protein, 109 aa, Zea mays
  Coding DNA Sequence Number=SeqID_19320
  Gene Ontology: Mol. function=protein disulfide oxidoreductase activity; Cellular component=chloroplast; Biological process=cell redox homeostasis
  Homolog annotation: Hit_ID=Q942X3; Match level="QueryCoverage=90%, HitCoverage=80%, E-value=9e-44, Identity=85%"; Hit description =Glutaredoxin-like
  Pfam annotation: Domain name=Glutaredoxin; Domain location=19-82; Score=63.5; E_value=6.8e-16; Accession=PF00462.14; Description =Glutaredoxin
MEASAADGGVARLASQRAVVIFGTSNCCMCHAVKTLFSELGVGWALHELDTDPGGKDMEKALARMVGRSPPVPAVFIGGKLVGPTDQVMALHLRGKLVPLLREAGALWL

SEQ ID NO: 61100 - protein, 124 aa, Zea mays
  Coding DNA Sequence Number=SeqID_19321
MAPKRGNSKAAPSIDDAVKAAFLADKKGKALVDATPQEALEDDAINSKRQRKDHPTPDGTVHTCSSEYAPQAPLPDSAPPEGEDTIEDEEVISISTEDQLKLRALRIKNHHLQKQKEILEAKRQ

SEQ ID NO: 61101 - protein, 349 aa, Zea mays
  Coding DNA Sequence Number=SeqID_19322
  Gene Ontology: Mol. function=protein serine/threonine phosphatase activity; Cellular component=protein serine/threonine phosphatase complex; Biological process=protein amino acid dephosphorylation
  Homolog annotation: Hit_ID=O04719; Match level="QueryCoverage=60%, HitCoverage=46%, E-value=7e-56, Identity=55%"; Hit description =Protein phosphatase 2C ABI2
  Pfam annotation: Domain name=PP2C; Domain location=137-349; Score =29.8; E_value=1.1e-07; Accession=PF00481.12; Description=Protein phosphatase 2C
MTHHYPPTRITRGERHYCCRRQWLSALTEPMDDLTVGGLALFAAVADFIDDSAPAMPQPAAASTAHEPEPEPGSPCSVASDCSSVATADFEGFADLGSALVLDDLVSSASTSASSASGPRAAAAAPARSVFALDCVPRWGLQSVCGRRPEMEDAARVLPTFFHVPLWMLAGDAPVDGLDRASFRLPAHFFGVYDGHGGLQVANYCRERIHEVLAEELTKAEEAASDADLGGLDPNTQKHWEKAFVGCFSRVDAEVGGDAATEAKPVAPDTVGSTAVVALVCSSHVIVANCGDSRAVLCRGKQPVALSVDHKPNREDEYARIEAQGGKVINWNGYRVLGVLAMSRSIVSL

SEQ ID NO: 61102 - protein, 122 aa, Zea mays
  Coding DNA Sequence Number=SeqID_19323
MVDGGGDLVFNAICSDSDPVSPTSRMVDGSEDLIFDALCSDSDSDSTSPMSGEGGAPNDEENKRHTTIATPALPKGQGLQFDSAFDMGRNNDEGLTDPPAEVFNFELPDPTCEALEAGDQGH

SEQ ID NO: 61103 - protein, 50 aa, Zea mays
  Coding DNA Sequence Number=SeqID_19324
MQLHTTALQPTAEGCVVMVRAEEVRESGRGELHIIILREKRSKVDLNTTP

SEQ ID NO: 61104 - protein, 291 aa, Zea mays
  Coding DNA Sequence Number=SeqID_19325
  Gene Ontology: Mol. function=protein phosphatase binding; Cellular component=centric heterochromatin; Biological process=regulation of phosphoprotein phosphatase activity
  Homolog annotation: Hit_ID=Q8R3Q2; Match level="QueryCoverage=59%, HitCoverage=18%, E-value=2e-20, Identity=30%"; Hit description=SAPS domain family member 2
  Pfam annotation: Domain name=SAPS; Domain location=151-291; Score= -205.6; E_value=0.011; Accession=PF04499.6; Description=SIT4 phosphatase-associated protein
MFWRMTGLSAASPVSCENLVAYTGASPSHMPNFLFLLYVISLAVMYALLYAELIPLPSRTAKHILFFSIFLRDKAQVSQLLRYIVEEVPEDSEKKQSFKFPFIACEIFACEIDIILRTLVEDVELMDLLFSFIKPDHPHSTLLAGYFSKVVICLMLRKTAPLMNYVQEHPDIVVQLVDLIGITSIMEVLVRLIGADETIYLNFADTLHWLENTYVLEMIVDKFSSSDSPEVHANAAEILSAVTRCAPPALAAKICSPRCEEILGKRKPIGKISSKMETPNQDPILRARLAA

SEQ ID NO: 61105 - protein, 76 aa, Zea mays
  Coding DNA Sequence Number=SeqID_19326
  Homolog annotation: Hit_ID=Q9M0V3; Match level="QueryCoverage=70%, HitCoverage=4%, E-value=3e-25, Identity=100%"; Hit description=DNA damage-binding protein 1a
MGDVSDRIGRPTDNGQIGIIDPDCRLIGLHLYDGLFKVIPFDNKGQLKEAFNIRFANCAEKHQPKWPKPSQMQPMS

SEQ ID NO: 61106 - protein, 129 aa, Zea mays
  Coding DNA Sequence Number=SeqID_19327
  Homolog annotation: Hit_ID=Q6H7U1; Match level="QueryCoverage=47%, HitCoverage=15%, E-value=1e-09, Identity=82%"; Hit description =Putative SNF2 domain-containing protein
MALGLFASKLPVASMIIVSWFKDLRGRDPVSVETENIFLNNIESAKQGLLSTSGYLKCVQVIEDQNLLSIGKRFSSHRSRGHTTSGGDERYQQEGINWLAFLRRFKLHGILCDDMGLVRWFFSGQSDTP

SEQ ID NO: 61107 - protein, 130 aa, Zea mays
  Coding DNA Sequence Number=SeqID_19328
MTAAVAAKKPEEEKEGSLQGWSIPRPEPEEMKAQDSVPAPDVDDGMGKKSKKKKKGGNGCGWEEIQEEKRKEEEELNKVLDGVPLVEEDKSVYLEVKVVEGHGDPFVTTVRALLTPHPLRELRYLIMLQL

SEQ ID NO: 61108 - protein, 462 aa, Zea mays
  Coding DNA Sequence Number=SeqID_19329
  Gene Ontology: Mol. function=nucleic acid binding; Cellular component= nucleus; Biological process=red or far red light signaling pathway
  Homolog annotation: Hit_ID=Q9FS08; Match level="QueryCoverage=90%, HitCoverage=38%, E-value=0.0, Identity=88%"; Hit description=UV -damaged DNA binding protein
  Pfam annotation: Domain name=CPSF_A; Domain location=114-401; Score =477.5; E_value=1.7e-140; Accession=PF03178.5; Description=CPSF A subunit region
MTWMGEIFPFVWKCVPQGNLRPSHSILVCRFHVIGWVHKKFGVVKSLWSYGLKMIPLSLAIAKEGELSIGTIDDIQKLHIRTIPLNEQARRICHQEQSRTLAFCSFKYNQSVEESETHLIRLLDHQTFESLCVYPLDQYECGCSIISCSFADDSNVYYCVGTAYVIPEENEPTKGRILVFAVEDGSLQLIVEKETKGAVYSLNAFNGKLLAAINQKIQLYKWMSREDGSHELQSECGHHGHILALYTQTRGDFIVVGDLMKSISLLVYKHEESAIEERARDYNANWMTAVEMLDDEVYVGAENSYNLFTVRKNSDAATDDERARLEVVGEYHLGEFVNRFRHGSLVMRLPDSDIGQIPTVIFGTINGVIGIIASLPHDQYIFLEKLQSTLVKYIKGVGNLSHEQWRSFHNDKKTAEARNFLDGDLIESFLDLSRSKMEEVSKAMGVPVEELSKRVEELTRLH

SEQ ID NO: 61109 - protein, 243 aa, Zea mays
  Coding DNA Sequence Number=SeqID_19330
  Gene Ontology: Mol. function=nucleic acid binding; Cellular component= nucleus; Biological process=red or far red light signaling pathway
  Homolog annotation: Hit_ID=Q9FS08; Match level="QueryCoverage=69%, HitCoverage=15%, E-value=4e-85, Identity=93%"; Hit description=UV -damaged DNA binding protein
MGYGAAVYGWDRSSGVFSTCVRSSCLLLSNINLGENLRDEIHKQETLKGRPVAATPLMWEPPALGLPLCNYNLKVLLATGGGHLVYLEIRDAKLVEVKHAQLEHEISCLDLNPIGENPQYSSLAAVGMWTDISVRIFSLPDLELIRKENLGGEIVPRSVLLCTLEGVSYLLCALGHGNLFSFLLNASTGELTDRKKVTLGTQPISLRTFSSKGTTHVFASSDRPTVIYSSNKMLLYSNVNLKE

SEQ ID NO: 61110 - protein, 488 aa, Zea mays
  Coding DNA Sequence Number=SeqID_19331
  Gene Ontology: Mol. function=nucleic acid binding; Cellular component= nucleus; Biological process=negative regulation of transcription
  Homolog annotation: Hit_ID=Q6H7U1; Match level="QueryCoverage=79%, HitCoverage=19%, E-value=1e-173, Identity=79%"; Hit description =Putative SNF2 domain-containing protein
  Pfam annotation: Domain name=Helicase_C; Domain location=302-380; Score=74.5; E_value=3.3e-19; Accession=PF00271.21; Description =Helicase conserved C-terminal domain
  Pfam annotation: Domain name=SNF2_N; Domain location=11-220; Score= -94.9; E_value=0.0049; Accession=PF00176.13; Description=SNF2 family N-terminal domain
  Pfam module annotation: Pfam domain module=Helicase_C::SNF2_N; Domain location=302-380::11-220
MFPAAGATRGRVRRRWGGRHRGPEAEAVADVGGCSSRRWVGESIHRGEENVGRSGSADDSRFSHNSADVSRLKRSSADGGARLERHRGGGGRMSWAAFQAAYGKPLLAAKDSKCSAKDAEAGILAMEALHKQVMPFLLRRTKDEVLSDLPEKIIQDRYCDLSLLQLKLYDKFSSSNAKDEISTIVKANELEESAPQPKATRHVFQALQYLLKLCSHPLLVTGENPPNHLVDLLNEIGLGSGSELHELHHSPKLVALQEILQECGIGSEISSPDASTAVGQHRVLIFAQHKAFLDIIEKDLFQSHMRSVTYLRLDGSVDPEKRFEIVKAFNSDPTIDVLLLTTHVGGLGLNLTSADTLVFVEHDWNPMKDLQAMDRAHRLGQRKVVNVHRLIMRGTLEEKVMSLQRFKVSVANAVINAENSSLKTMNTDQLLDLFTSTPASRKASDEQSKRKSGGKGLKSILNGLDELWDQSQYADEYDLNQFLAKLNG

SEQ ID NO: 61111 - protein, 267 aa, Zea mays
  Coding DNA Sequence Number=SeqID_19332
  Gene Ontology: Mol. function=methyltransferase activity
  Homolog annotation: Hit_ID=Q6ZI84; Match level="QueryCoverage=76%, HitCoverage=96%, E-value=1e-36, Identity=41%"; Hit description=RNA methylase-like protein
MAAHKGESRVADRKVPVQRPEVESLAELFAGPGVSESVEWRMPQNHHVDSPFHLVRLPGDERLSAHVANRRDLRALGPWHHLRGAREVGQEYPNKRKLPFRALESSFKIVIDNFSKVISSQEQNEIIHDVISSISIGANLLDAEWPYTGLLHIAEILTSLLRISSTRIVLNGQETTSKFCATTNYGPKVQGAYFNIRVVRDGRCPNCNVWSNFEQGIVVTPSLRHSGHPKLKYMVAPACFEIQARGKTFRRCSMFPGVPTSVPSIWV

SEQ ID NO: 61112 - protein, 69 aa, Zea mays
  Coding DNA Sequence Number=SeqID_19333
MVKNFGSKTVQIAVNAVVTSHLLVCLYSAAEVSFVLVSPYALDVSILPLGVDDSLGAPKVHPMGVAPEL

SEQ ID NO: 61113 - protein, 661 aa, Zea mays
  Coding DNA Sequence Number=SeqID_19334
  Gene Ontology: Mol. function=GTPase activity; Biological process =immune response
  Homolog annotation: Hit_ID=Q10M62; Match level="QueryCoverage=96%, HitCoverage=78%, E-value=1e-136, Identity=43%"; Hit description =Expressed protein
  Subcellular localization annotation: CTP_CleavageSite=34; ConfidenceScore=5.33e-01
MRRFFFFGSSAANAGDENGTPGSDSGTTHKKTLVADVGNESSGSCSTRLSRSRSRGQKRNKEEPANPKQLRRSMSFSSPATNTCLDERCFSFSGDVPCTLYDGFDAPQNVKDVASTRLSNLLSKNEVLDRYIDRGHEDAMVNEKQRQYPSAASMVSTLGRPPRPQSTVPSIPKSMKGNTECYPDVDIKEDCLWQVAQEGRNHVSMPDAFERDSATSVVDICEDLQEVRPPNVICPSACPISGEQETNDMLLQRAKEVESRFIVHCGDEYEFNIIRDKRMSSNDMFQLIQQLTEDRKQLTHELSSHIRAHVAERSAAKQQYKQSKKELDTRTRRLEKEKSERQTTLEREMDRRSHDWSVKLSRFQSEEERLHERVRELAEQNVSFQREVAFLEANKAEASTKVASLELQNNKLNDDLEKLRNEHEKLHNSSVDKDARFAEVVEERDHTREYLKDKEGENKALHKVIARLQTTCNEQERAITSLRQGCKAQLDKKFVECDSDKMRKLRMELIRLTGVEQKLRCEIRSCHLEVGSLRQENIALLNRLQVVGNGAPFSIRLDQELQARVDNLQVQGLSLLNKTSQLCTKLLDLMKHKKLENESFSGNDVLIVSNYTFEYQSIKGGIESLKRSLKTINSVLNEKQSVKEKSGETAARGSSSREQTL

SEQ ID NO: 61114 - protein, 69 aa, Zea mays
  Coding DNA Sequence Number=SeqID_19335
MTGRSSLDVLLVDGELKKPYNDVAFLNDGTGHQLPLFDVAGYRSPSGARGDVCFFRYGLKAPGPTTTTA

SEQ ID NO: 61115 - protein, 219 aa, Zea mays
  Coding DNA Sequence Number=SeqID_19336
MAKKHEARELDTKPAFWARPLFGPFFRAKRADPLRAGLNRKLSPLAQQARPGFWPGFTGPGPGRAARLAISTGIGSLTSGLLAHTRIVLCTFNCDRRCRRHRAKVDWRVETWTQRGPSATRFLVFFDSFLKPAGRGRHINRRDDDDANDGLALAVTVVACELVRRLEKHKLFRIRTDSVVRLLLIACGIGVQSKSRIIRVLALQSSKLFAQYPTSWVLM

SEQ ID NO: 61116 - protein, 215 aa, Zea mays
  Coding DNA Sequence Number=SeqID_19337
  Gene Ontology: Mol. function=sugar porter activity; Cellular component=integral to membrane; Biological process=transport
  Homolog annotation: Hit_ID=Q53WP9; Match level="QueryCoverage=97%, HitCoverage=39%, E-value=1e-93, Identity=80%"; Hit description =Putative anion/sugar transporter
  Pfam annotation: Domain name=MFS_1; Domain location=1-215; Score= -40.7; E_value=0.023; Accession=PF07690.6; Description=Major Facilitator Superfamily
MVGGALADKYGGKKVMAGAAALWSLATILTPWAASHSTLMLLVVLLFGLAEGVAFPTMSTFLPKWFPTHERATVVAISMGGFHLGNVISFLATPIIMSHIGPSGTFTFFASLGYLWLSIWMVNVESDPIDSRTISKSELQLILDGRIGSKVQGSKFPSVRELFSKTQFLAVTLANVVNNWGYFVLLSWMPVYFKMVYNVNMKQAAWFSTMSRIRH

SEQ ID NO: 61117 - protein, 319 aa, Zea mays
  Coding DNA Sequence Number=SeqID_19338
  Gene Ontology: Mol. function=DNA binding; Cellular component=nucleus; Biological process=regulation of transcription
  Homolog annotation: Hit_ID=Q75HE5; Match level="QueryCoverage=59%, HitCoverage=64%, E-value=9e-60, Identity=62%"; Hit description =Putative NAC-domain protein
  Pfam annotation: Domain name=NAM; Domain location=75-161; Score=-6.7; E_value=7.1e-07; Accession=PF02365.6; Description=No apical meristem (NAM) protein
  Subcellular localization annotation: CTP_CleavageSite=56; ConfidenceScore=5.08e-01
MGIIQWKSYGNFAFGIGTIFSQTLRLYLSIDCPRHPLRMPKTPTAAPPPRRPRTPRAIHRELRLHARVPKPPAAIPPAANPARDSPRSPPARPRAENPSRHASGRERQRAPTAAIPGADKPVAPRAAAARTLGIKKALVFYAGKAPRGVKTDWIMHEYRLADAGRRAKKGSLRLDDWVLCRLYNKKNEWEKMRLGKGAVVGAAKEEEAMDMSTSHSQTHSWVETRTPESEIVDNDPPFPDSPAPAPAMMVPKKERVDDGGSARTSDLFVDLSYDDIQGMYSGLDMLPPAGEDLYSSLFASPRVRGNQPTGATGLGLGPF

SEQ ID NO: 61118 - protein, 536 aa, Zea mays
  Coding DNA Sequence Number=SeqID_19339
  Gene Ontology: Mol. function=transporter activity; Cellular component= integral to membrane; Biological process=transport
  Homolog annotation: Hit_ID=Q6ZAJ7; Match level="QueryCoverage=91%, HitCoverage=92%, E-value=1e-111, Identity=47%"; Hit description =Transporter-like protein
  Pfam annotation: Domain name=MFS_1; Domain location=19-438; Score =90.4; E_value=5.6e-24; Accession=PF07690.6; Description=Major Facilitator Superfamily
MGSTSSAAQRRRRQWTLALVTAAALLELADEALLPAVYREVGEALAASPTALGSLTLCRALVQAVCYPLATCAAARYDRARVVAAGAFLWAVATLLVGASGTFLQVSDCRARWRWPGASTASVWRSLCRAIYSLVADYSDDGTRGSAFAWVLMAQCMGQVAGNSLGVLLAATSFLGVPGWRLAFYALALVSASIAALTWVLGADPRPVCVKSTVAATLAQLAGEAKDVVKVPTFQIIVAQGVAGTVPSSALSFAAMWLELVGFTHWQTTVITNLNSLANALGALFAGFVGDPLALRFPNTARIALAQVCTASTIPLAAVLLLALPVNPSAGAAYAATFFIFGFVAPWCPVSTNNYQRPPSPKCRSVRKRYNQRQLGFDACCFSAGQQYEDSNYNSPTISPIFAEIVPEKARTTVYALDRCFESVFASFAPPLVGILAEHVFGYQPAAAGTSVEADRENAAALGKAVFAEIAVPIAVCCLTYTALYWTYPADRQRAQMASLQAAAGDHDCDCEATLVAHAAGVEGMNQTLLAGTRTE

SEQ ID NO: 61119 - protein, 184 aa, Zea mays
  Coding DNA Sequence Number=SeqID_19340
  Gene Ontology: Mol. function=GTPase activity; Biological process =immune response
  Homolog annotation: Hit_ID=Q10M62; Match level="QueryCoverage=93%, HitCoverage=19%, E-value=1e-50, Identity=60%"; Hit description =Expressed protein
MEYFDSKVFLYDDFGLKLKEEAMLSRVLKEALLSKELDNGQLESDLSSSLRIQDVMRNETQRVQDELSCITHKAKQLELQVSKKDEAINELQQDLQESAKELASLRGTLKTVTEERDLSWQESKQLRRNINIMQNEVVSLKKKIEALDEDILLKEGQITILQDSIDKPFDIICSPRSMREFDME

SEQ ID NO: 61120 - protein, 200 aa, Zea mays
  Coding DNA Sequence Number=SeqID_19341
  Gene Ontology: Mol. function=protein binding
  Homolog annotation: Hit_ID=Q2RBJ7; Match level="QueryCoverage=74%, HitCoverage=24%, E-value=2e-38, Identity=55%"; Hit description =Leucine Rich Repeat family protein, expressed
MKSRHRPLRADLLPTALARYSTATRLDLTLCMRVPDTALASAVVSALHVVNLSYSHGFGAAGVSELAIAYPGLIDLDLSNVVDLGDAAATEVAWARSLTDMGLGCVAVGCTEPRELSLKWCLGLTDLGIQILALKCRKLTSLDLSYTMAISDRMRKGIEEGGDTHARPRHHGGFEHEMSEAEGAGELWAKVVAAQLARKL

SEQ ID NO: 61121 - protein, 87 aa, Zea mays
  Coding DNA Sequence Number=SeqID_19342
MALSPLTEARRRQQGLDSPDNGPSARLQCSSDGHDITRTGCQNLSGCHDGMDPPGSNRRHYSLRLPSTRLGPGPAHIFGFEVLGVHP

SEQ ID NO: 61122 - protein, 175 aa, Zea mays
  Coding DNA Sequence Number=SeqID_19343
MEIKYLNVHKGSTQTNKRSKLGFKRKEQKKPKRTLVWCIGLSGVPPDSVLCTRAERLQTLHLQVSEAALRYNSPDYPVCHRTVRCTSGATVPSATVSCRATVHGQFAQKSEQLPKAHRTMNSTYLVRHQTVRSHKKTKLQWSNPNGWVTWLAHQTVSGGAPDCPVCPSTAACPNG

SEQ ID NO: 61123 - protein, 643 aa, Zea mays
  Coding DNA Sequence Number=SeqID_19344
  Homolog annotation: Hit_ID=Q2R0A3; Match level="QueryCoverage=39%, HitCoverage=37%, E-value=9e-45, Identity=42%"; Hit description =Leucine Rich Repeat family protein, expressed
  Pfam annotation: Domain name=LRR_1; Domain location=561-582; Score =10.4; E_value=3.2; Accession=PF00560.23; Description=Leucine Rich Repeat
  Pfam annotation: Domain name=LRR_1; Domain location=584-613; Score =7.5; E_value=11; Accession=PF00560.23; Description=Leucine Rich Repeat
  Pfam module annotation: Pfam domain module=LRR_1::LRR_1; Domain location=561-582::584-613
MDYPKLEIGLSVMMRDQLADSLAYNNMKSGGGTLPITARTLETIIRLSTAHAKMKLRHEVLKSDVEAALQVLNFAIYHKELTEMEEREQREMEMKQQAALPPAMEKFDVTPSPAPAAGQPRALPLTFYDLVFLAIPPVQRLFFYDRADLLDVSDFTLGELPRFRDSLAAALHHFYPLAGKLTCELVDEEAAAPPKGPRDQGAPGGGGGIEGAWSAGRVPRPTPSRRRRETESRGRRTETQVPGAFVERAGLKARLITGRARASPTGSNSCRARHAIRAGLSPGPLPSVPGRARVVLKNRALCRANGPRAFWTSIRGALLKHKAGGMRKNHDGRRFHVHDDTVVAICMEMVLRALHAFPQSRVGKEKEEELNKLMEALHVADLPNRVMTFCYSELTTEEKSCLQYLAAFRLETSISRTSLVRRIAAERLVKEDKEHQLSMEQSAERCFEELLFRGFISADATGAAGKVKCCRFRSESVKQFIVDMCKAENFVGGGLPVHLRIQNDIRSAALEGKQQHDDPVNKMLRELDLLPKSYRLNVMDLGGSMGILKKSHLANICKLRTLKYLSLRYTDVRSLPSQLQELRLLETLDIRHTNIPRGSRNTQALLPPSLKHLLAGNVDSQGDAPNATVRMPDSIQEMPCLEQ

SEQ ID NO: 61124 - protein, 135 aa, Zea mays
  Coding DNA Sequence Number=SeqID_19345
  Homolog annotation: Hit_ID=Q8L7L0; Match level="QueryCoverage=50%, HitCoverage=9%, E-value=2e-22, Identity=70%"; Hit description=GTP -binding protein obg-like
  Pfam annotation: Domain name=DUF1967; Domain location=4-77; Score =76.9; E_value=6.3e-20; Accession=PF09269.1; Description=Domain of unknown function (DUF1967)
MNEFEVFHDKGTNRWTVVGAGIQCFVQMTNWQYSDSLKRFQHALEACGMNRALTKEGVKEGDTVIIGEAKRDELLQFARMKGSTDTQSIYNVDLFLLDVGVVIAQQCLEALVYLHRLRIIHCDLKPENILIKSYN

SEQ ID NO: 61125 - protein, 297 aa, Zea mays
  Coding DNA Sequence Number=SeqID_19346
  Gene Ontology: Mol. function=G-protein coupled receptor activity; Cellular component=membrane; Biological process=G-protein coupled receptor protein signaling pathway
  Homolog annotation: Hit_ID=Q69K53; Match level="QueryCoverage=94%, HitCoverage=95%, E-value=1e-130, Identity=74%"; Hit description=G protein coupled receptor-related-like
  Pfam annotation: Domain name=7tm_1; Domain location=37-249; Score= -109.9; E_value=0.1; Accession=PF00001.12; Description=7 transmembrane receptor (rhodopsin family)
  Pfam annotation: Domain name=Dicty_CAR; Domain location=14-297; Score= -53.3; E_value=0.0037; Accession=PF05462.2; Description=Slime mold cyclic AMP receptor
  Pfam module annotation: Pfam domain module=7tm_1::Dicty_CAR; Domain location=37-249::14-297
MAPAVAAAASAAMRQALRDRQILDAVGTGAAALSLAGSSFIVICYLLFRELRKFSFKLVFYLAVSDMFCSLFTILGGPSNAFYCFAHDYSAHFFCVASFLWTTTISFTLHRTVVKHKTDVEEFGSIFHLYVWGRHTPFLTVLHLITFYLPLWGAILYNGFTYYEVNRMLNNATQMAAGISDQSNQSDIRAGRKAFNRWGYYPLILIGSWAFATINRLYDFANPGHRIVWLSFLDVGFAGLMGLFNSIAYGLNSSVRRAIAERIDTFLPERIKRSLPALSRLRSQQENELTSLIVEGN

SEQ ID NO: 61126 - protein, 537 aa, Zea mays
  Coding DNA Sequence Number=SeqID_19347
  Gene Ontology: Mol. function=transferase activity; Cellular component= chloroplast; Biological process=fatty acid biosynthetic process
  Homolog annotation: Hit_ID=Q69YA2; Match level="QueryCoverage=78%, HitCoverage=87%, E-value=0.0, Identity=86%"; Hit description =Putative 3-oxoacyl-[acyl-carrier-protein] synthase I, chloroplast
  Pfam annotation: Domain name=Ketoacyl-synt_C; Domain location=324 -438; Score=159.6; E_value=7.8e-45; Accession=PF02801.12; Description= Beta-ketoacyl synthase, C-terminal do
  Pfam annotation: Domain name=ketoacyl-synt; Domain location=47-316; Score=247.3; E_value=3.2e-71; Accession=PF00109.16; Description=Beta- ketoacyl synthase, N-terminal domain
  Pfam module annotation: Pfam domain module=Ketoacyl-synt_C::ketoacyl -synt; Domain location=324-438::47-316
  Subcellular localization annotation: CTP_CleavageSite=30; ConfidenceScore=5.52e-01
MQSLLLPTAAVAPVAPPCGRRNLPGRLSVRASATVVAAPRRETDPKKRVVITGMGLVSVFGNDVDAYYDRLLVGESGIGPIDRFDASKFPTRFAGQIRGFSSEGYIDGKNDRRLDDCLRYCIVSGKKALEASGIAHGSKPMEKVASTGNTPRIAFVLNADFYCQIDKTRAGVLVGTGMGGLTVFSDGVQNLIEKGYRKITPFFIPYAITNMGSALLGMDIGFMGPNYSISTACATSNYCFYAAANHIRRGEADIMIAGGTEAAIIPIGVGGFVACRALSQRNDDPKTASRPWDKDRDGFVMGEGAGVLVMESLEHAMKRDAPIIAEYLGGAVNCDAYHMTDPRSDGLGVSSCIKQSLKDAGVAPEEVNYINAHATSTLAGDLAEVNAIKQVFKDPSGIKINATKSMIGHCLGAAGGLEAIATIKAITTGWVHPSINQFNPEEAVEFDTVPNALQLNLVGERGHHHYSIRALVSDLNIALVHHETKELACNQPTFTILRVHFQTMESSSSVLGKDQLSVSLENRFHHDVIDVDFHQST

SEQ ID NO: 61127 - protein, 109 aa, Zea mays
  Coding DNA Sequence Number=SeqID_19348
MGVVDQRMRPAAGEPGLLDLDEGASPMNEDEDEDEAREWVRCRRVEVGRWMNQDAPLSPRWNEAASARDYLIRVRGCGFVLVPQHMRLADAMPAPRLLYPLHFHHSSPA

SEQ ID NO: 61128 - protein, 168 aa, Zea mays
  Coding DNA Sequence Number=SeqID_19349
MSGAPEDSDFKVFALGNFRRPLRYNSPDCPVCTGHVRCSKEGRPPELASLAFSLQPLRYNSPDCPVCTGLSGASAEQRLLQAPTATCSAFIARQRAQRSGTPMLAHRTPYSTCPVRHRTSRRAQKSELQRSIQRLLGDVAVAPDMSGVHRTVRCTIRQTAPPTVKFGG

SEQ ID NO: 61129 - protein, 560 aa, Zea mays
  Coding DNA Sequence Number=SeqID_19350
MSSRAPAAPTTTVVRAAGTDHLWAKAAELERDFAGYKRRLAERRAHDAVAEVARAEEARGGDDAAGRGRRYEEYVRRRDERLRQEWRARMERKEAEVQALWARLDRAGSRGRRGGDGELAAATATGHAREDQVKPPQKPGGNLVVKVKPSTPIPVTPRGNLGQPPAAKPARPRTSVPSSLAAGSPRLSTPDPRLRPSSHLQRELRQAQPQPPATPRKENRLPPPPSTAASPATPRPRTTMLSRSRSMFKDRGCSSVAVAVGESPRPSRFQPPRSSYEGASNLKKPAPSCSRDQAVVADRRKASSAVAPEPFLVKASRDDMPAPLVLVASKERDLPYRSGAISPAGCANEDSKSNVQEHVDRSPDKFGSEEITGDSDTEPSYVYVKKDSDEQIPGPPPPETPAAAAAAADDAEEEFRRESSESLYSNVQSSFSPRSELASAASSATTGSSPRPSATAQSPEASVSPRPRKSAEAEEGAEKRVPAPTTTPRSSAQSPMDAVNGLKRLLTFGKRSGNGKASEAAAAPRAPPARDGDSSTLLDNSYVISPNGNSSTLLGIRFRC

SEQ ID NO: 61130 - protein, 560 aa, Zea mays
  Coding DNA Sequence Number=SeqID_19351
  Gene Ontology: Mol. function=helicase activity; Cellular component =mitochondrion; Biological process=protein amino acid phosphorylation
  Homolog annotation: Hit_ID=Q8LQQ6; Match level="QueryCoverage=99%, HitCoverage=92%, E-value=1e-156, Identity=37%"; Hit description =Putative PPR protein
  Pfam annotation: Domain name=PPR; Domain location=133-167; Score =33.1; E_value=9.6e-07; Accession=PF01535.11; Description=PPR repeat
  Pfam annotation: Domain name=PPR; Domain location=168-202; Score =44.6; E_value=3.4e-10; Accession=PF01535.11; Description=PPR repeat
  Pfam annotation: Domain name=PPR; Domain location=203-237; Score =34.1; E_value=4.8e-07; Accession=PF01535.11; Description=PPR repeat
  Pfam annotation: Domain name=PPR; Domain location=238-272; Score =36.2; E_value=1.1e-07; Accession=PF01535.11; Description=PPR repeat
  Pfam annotation: Domain name=PPR; Domain location=273-307; Score =48.2; E_value=2.7e-11; Accession=PF01535.11; Description=PPR repeat
  Pfam annotation: Domain name=PPR; Domain location=28-62; Score=28.4; E_value=2.6e-05; Accession=PF01535.11; Description=PPR repeat
  Pfam annotation: Domain name=PPR; Domain location=308-342; Score =52.6; E_value=1.3e-12; Accession=PF01535.11; Description=PPR repeat
  Pfam annotation: Domain name=PPR; Domain location=343-377; Score =34.1; E_value=4.8e-07; Accession=PF01535.11; Description=PPR repeat
  Pfam annotation: Domain name=PPR; Domain location=378-412; Score =48.6; E_value=2.1e-11; Accession=PF01535.11; Description=PPR repeat
  Pfam annotation: Domain name=PPR; Domain location=413-447; Score =47.2; E_value=5.6e-11; Accession=PF01535.11; Description=PPR repeat
  Pfam annotation: Domain name=PPR; Domain location=448-482; Score =13.6; E_value=0.18; Accession=PF01535.11; Description=PPR repeat
  Pfam annotation: Domain name=PPR; Domain location=483-517; Score =43.3; E_value=8.2e-10; Accession=PF01535.11; Description=PPR repeat
  Pfam annotation: Domain name=PPR; Domain location=518-552; Score =25.1; E_value=0.00025; Accession=PF01535.11; Description=PPR repeat
  Pfam annotation: Domain name=PPR; Domain location=63-97; Score=16.1; E_value=0.093; Accession=PF01535.11; Description=PPR repeat
  Pfam annotation: Domain name=PPR; Domain location=98-132; Score=23.9; E_value=0.00058; Accession=PF01535.11; Description=PPR repeat
  Pfam module annotation: Pfam domain module=PPR::PPR::PPR::PPR::PPR::PP R::PPR::PPR::PPR::PPR::PPR::PPR::PPR::PPR::PPR; Domain location=133
  Pfam module annotation: Domain location=413-447::448-482::483 -517::518-552::63-97::98-132
MVAGYCRAGQLESARRLAAAVPVPPNAYTYFPVVRALCARGRIADALAVLDEMPRRGCAPIPPMYHVILEAACRGGGFRSAVRVLEDLHARGCALDVGNCNLVLNAICDQGSVDEALHLLRDLPSFGCEPDVVSYNAVLKGLCMAKRWGCVQELMEEMVRMACPPNIVTFNTLISYLCRNGLFERVHEVLAQMVEHGCTPDIRMYATIIDGICKEGHLEVAHEILNRMPSYGLKPNVVCYNTLLKGLCSAERWEETEELLAEMFDKDCPLDDVTFNILVDFFCQNGLVDRVIELLEQMLEHGCMPDVITYTTVINGFCKEGLIDEAVMLLKSMTACGCKPNTISYTIVLKGLCSAERWVDAEDLMSQMIQQGCPLNPITFNTLINFLCKKGLVEQAIELLKQMLVNGCSPDLISYSTVIDGLGKAGKTDEALELLNVMVNKGMSPNTIIYSSIASALSREGRINKVIQMFDNIQDTTIRSDAVLYNAVISSLCKRGETERAIEFLAYMVSSGCVPNESTYTILIRGLASEGFVKEAQEMLTELCSKGALRKHLMKHFGIV

SEQ ID NO: 61131 - protein, 89 aa, Zea mays
  Coding DNA Sequence Number=SeqID_19352
MVSHSGYGGYKCGHCTTAVGVSEALYAKAVSPDQLPGNRWGRLMCVGMECPYMSCSLEDMVAGVTWPSILPPGWTVEWDPTSAEEEHEE

SEQ ID NO: 61132 - protein, 105 aa, Zea mays
  Coding DNA Sequence Number=SeqID_19353
MPSLSYPLRAGPLLSPPQSSGSLFIPSGTVLWVHEPPKAPLVDVEPKRCEDSRWRKPKLGLLLMHKMVCVATTDNLDCESSDLKAGPFARTILVLNICPLPFDEG

SEQ ID NO: 61133 - protein, 137 aa, Zea mays
  Coding DNA Sequence Number=SeqID_19354
MAIALLIQPLKGTVRGEIGEGIEQRVASSPSPQQLDWAEAGGATRVRDSELAGDEGSERSGVLGQLEWPRKIGEGAGNTMVGAKPSGVNSTTVARVHDSGTGDYVEDGRARGRTVGGDGADGWVGVSATGAGAVNEH

SEQ ID NO: 61134 - protein, 163 aa, Zea mays
  Coding DNA Sequence Number=SeqID_19355
  Homolog annotation: Hit_ID=Q6QP54; Match level="QueryCoverage=31%, HitCoverage=19%, E-value=5e-09, Identity=61%"; Hit description =Putative kinase
MSSKVVLPPCGEDVVDSTAAGPYLARQLSAFRDRGVPGPTSECRRVPQLRWVEREGEREGGRARRPETGVREVGIPRPSCSSHAQVRAMMAPPVDVAGLRPRLGDVEAPPKPRSSLSSVAEVESEPLGRARRRPSAEARAESEPWGRAKRSSSSSGAEPESEP

SEQ ID NO: 61135 - protein, 477 aa, Zea mays
  Coding DNA Sequence Number=SeqID_19356
  Gene Ontology: Mol. function=sequence-specific DNA binding; Cellular component=nucleus; Biological process=regulation of transcription, DNA-dependent
  Homolog annotation: Hit_ID=Q41813; Match level="QueryCoverage=99%, HitCoverage=39%, E-value=1e-166, Identity=56%"; Hit description =Hox2b protein
MGRKGSEMSPSKRYPLRSPHSSGRVLRSALANDNKDSEPLNAAAATQAAVKKRSGSQLDSPNSSVRLFHSTSKNKNEACSGPLNDRIPDKPAANKRKRASPSQVGSSSNSVRVLRSAIKNKDEACSKSLSDRTAGEPAANKRKNVNRSKTGSLSCGVRVLLSASKAKDETSTKPLNDSAAVEPSFSGAVEPAANKRKGVSRSKKRSLNSSVRVLRSASNNKIEVSIKPLGNSTAGQPAAKRRKSGSSFEAGSPVSSARVLRSTSERKNEASKPLNESTAAQPAARKKKAGVISKTDNPKIGLRVLRSASGKKNEACIGHVNDSTSAEPTVTKRNRKPSMDRSPKKDYLKICQRVRYILNRMNYQQTFIQAYASEGLERPKGVPPGDQRWLCPACVCKADSIDALNELQGSKLSIHDSWEKVFPEAASIANGSKQVDTSDLLPDHIKHSDNPALVEGLMVNEVRLSAEDDSKGQILMS

SEQ ID NO: 61136 - protein, 75 aa, Zea mays
  Coding DNA Sequence Number=SeqID_19357
MDKGLHSIPFKRSNDPLEYHDFLPYSRCSLCEESSQVGVSHPYNIDHNENHKRSPIHPPLGALNWYQSNSLHLRD

SEQ ID NO: 61137 - protein, 774 aa, Zea mays
  Coding DNA Sequence Number=SeqID_19358
  Gene Ontology: Mol. function=nucleic acid binding; Cellular component= beta-galactosidase complex; Biological process=DNA integration
  Homolog annotation: Hit_ID=Q7XBC6; Match level="QueryCoverage=99%, HitCoverage=47%, E-value=0.0, Identity=70%"; Hit description =Putative copia-type pol polyprotein
  Pfam annotation: Domain name=RVT_2; Domain location=336-591; Score =540.1; E_value=2.2e-159; Accession=PF07727.4; Description=Reverse transcriptase (RNA-dependent
  Pfam annotation: Domain name=rve; Domain location=1-123; Score=89.6; E_value=9.3e-24; Accession=PF00665.16; Description=Integrase core domain
  Pfam module annotation: Pfam domain module=RVT_2::rve; Domain location=336-591::1-123
LVKQDKSETQGTLKRFLRRAQNEFELKVKKIRSDNGSEFKNLQVEEFLEEEGIKHEFSAPYTPQQNGVVERKNRTLIDMARTMLGEFKTPERFWSEAVNTACHAINRVYLHRLLKKTSYELLTGNKPNVSYFRVFGSKCYILVKKGRNSKFAPKAVEGFLLGYDSNTKAYRVFNKSSGLVEVSSDVVFDETNGSPREQVVDCDDVDEEDVPTAAIRTMAIGEVRPQEQDERVQPSSSTMVLPPTQDDEQVHQQEACDQGGAQDDHVIEEDAQPAPPTQVRAIIQRDHPVDQILGDISKGVTTRSRLVNFCEHYSFVSSIEPFRVEEALLDPDWVLAMQEELNNFKRNEVWTLVPRPKQNVVGTKWVFRNKQDEHGVVTRNKARLVAKGYAQVAGLDFEETFAPVARLESIRILLAYAAHHSFRLFQMDVKSAFLNGPIKEEVYVEQPPGFEDERYPDHVCKLSKALYGLKQAPRAWYECLRDFLIANAFKVGKADPTLFTKTCNGDLFVCQIYVDDIIFGSTNQKSCEEFSRVMTQKFEMSMMGELNYFLGFQVKQLKDGTFISQTKYTQDLLKRFGMKDAKPAKTPMGTDGHTDLNKGVATPCFGLWYPKGSTFDLVGYSDSDYAGCKVDRKSTSGTCQFLGRSLVSWNSKKQTSVALSTAEAEYVAAGQCCAQLLWMRQTLRDFGYNLRKVPLLCDNESAIRMAENPVEHSRTKHIDIRHHFLRDHQQKGDIEVFHVSTENQLADIFTKPLDEKTFCRLRSELNVLDSRNLD

SEQ ID NO: 61138 - protein, 103 aa, Zea mays
  Coding DNA Sequence Number=SeqID_19359
MVYRVWERRRVRTPIAASGDVGRPFVDAIKGEAMLGRDVSRTEAMTEPALGHAVMQGTVKGVASYGIRGELLPGQLVEARLRRDEVFSEAEAECRRGGVSSRG

SEQ ID NO: 61139 - protein, 113 aa, Zea mays
  Coding DNA Sequence Number=SeqID_19360
MAPKRANSKAAPSIDDAAKAALLAEKKGKALADTIPQEAFEDDVVNSKRQRQDHPTLDGTIRTCSSERRTTSTTTRLRSTRGRTHHRGRKVTGILNRKPAKLRALRFQKRPPA

SEQ ID NO: 61140 - protein, 144 aa, Zea mays
  Coding DNA Sequence Number=SeqID_19361
  Gene Ontology: Mol. function=isomerase activity; Biological process =protein folding
  Homolog annotation: Hit_ID=Q7XIJ9; Match level="QueryCoverage=50%, HitCoverage=16%, E-value=2e-24, Identity=79%"; Hit description =Putative peptidyl-prolycis-trans isomerase protein
MEGLNRGKGGDDVAADAGIPAAGTVMSGIRWPGRGPTREARMVVAAGESPLIHFSRRSPVAPGKLAFCNCHSALLTMSSQPPSTRTSPDTKVPRTGELALRRAIPANPNMKAIQESLEDISYLLRIPQRKPYGSMEGDVKKSMK

SEQ ID NO: 61141 - protein, 51 aa, Zea mays
  Coding DNA Sequence Number=SeqID_19362
MAIASASGNHENGVDGLSSVKTVLDFNFRSVNDLLRERTAKPANLAIQEIG

SEQ ID NO: 61142 - protein, 64 aa, Zea mays
  Coding DNA Sequence Number=SeqID_19363
MAEDLERCSVEWARAIGSDDHVPGSEILHRNIERESCISLNKKVNPKMGRYKSGVAFYGGQRLT

SEQ ID NO: 61143 - protein, 189 aa, Zea mays
  Coding DNA Sequence Number=SeqID_19364
MSQTCGKNANLHSKGGLRGGGNQRDTWSWNKSVDNIEKYNVAKKIAKARATYRRCEYPRILPGLNAGGPISEAYIRFHSTAYVTCHRTCGSTGFPPRAGGSKGAWRSPGPSGTGLDTWQSRTPFRSEVRMPHAGVWDRRTGSSPRTLLQRVLILWDTRQFRTPPSGIRRALVEIDPHLGPVASSDEPRL

SEQ ID NO: 61144 - protein, 1470 aa, Zea mays
  Coding DNA Sequence Number=SeqID_19365
  Gene Ontology: Mol. function=zinc ion binding
  Homolog annotation: Hit_ID=Q10LI9; Match level="QueryCoverage=57%, HitCoverage=85%, E-value=1e-129, Identity=39%"; Hit description=CW -type Zinc Finger family protein, expressed
MGDDAELEEGEACACGDDTAFVDPDVALSYIDEKLQDILGHFQKDFEGGVSADNLGSKFGAYGSFLPTYQRSPLPQTRSPPKAGNITSKSPFHQSNEDLSQKPPAVAVSSTPQSNGPVVPFSGDSIKKEIRPSTKSERGSVSHDSYGPSKCSDQNRLKVRIKVGSDNVLARNNAAIYSGLGLDISSPSSNEDSPDGRGSLSPEVNNVPHESPQTILQIMTCFSVPGGFLLSPLPANILQLTKKVVSSSKKWESNVDVENVQESYEGHVAKRVKSDGNKKRLIDAKNSKNKNDISAVMKKEIDMELVAGQKIVSEALKISLLSDPRAMDAKGENRLEEEPAENNLVGIRDARLKERCTKTDSMTVKVEPAKAEVMECLENSSFGSSEMDLSAVKGKSKPKTEKGEATLEDRNTTNDKDLISDRKQKKKIKSGSKYNASNFEGSISNVINEGASAVFHMGKISGLEALPYDTNGENNSKSEVKKMQREQKANVSTSSDFLEEEKHIHSSAAVKERSDMQSKPIHTGKKPKAKSHRDVRDNNFPEGSYGSKEQDSLENKSAFGDPRPKEKPWKFDSEDSDAPGISRKDSSYVKLDKHLATEEQKMHILPPATASTANAAFIHAAPVVIEEHWIFLRSGNVACYSGWPRKLGTLIATLKLEMWYTGIPGMNRCEISEEETTNALNALYVPAPANGIPSVGLPHVASSGLVTSSTPNMNGHIEQSRKRKNVLSDGNFVAEGSHQTQGSGHPMSNQHAPNKSKTHTDGIQYPIDRDSVSKSVDPTIKKQRSKSKHHSSYSDGVDLVERPKKHSKVKSKRDLDRDEYKASKKIRKEERHFDRDRNLGSGLASRDVPDEAKAFPVKSVTSKGSGERSDLSSSKQKNVSHHNHLENSKKARQDYVGFPEDESKEYFHQSDVQRSDLSSKKRIVKKWEESQYNPVAQVSKGAIKETYRDQNLKEAKLMSLNSEELFSMTSSKPPKAQHADQVLFYDGGRTNSELVEDNTHFSGKTGLPEQENSLSDKALDLGKPASDVAYIQTSAVTSSSSKASVSQKKKQTTQAMKTSSIESLSLSPQRNSNIDNVSASHSRVSGKDGSLNANSSTVPAMAKQLNTQVGVAVNDQWSSEPILVGSSRRKSDRDNGQVQLTQGHASDGIHPERGLNEDLQPESGRKDSNIKNSHIPKSSNHLHSGEKNNYNTDGSPMQPGKHLVDPKTPVLDKGDSSMHENKKSANSLQDRNGSTHCPPDGNPLLGLPSGKEKSYLKNNRQDSQKPKPQISPLKESKLDSHSTPLKPNGSKLTPQSRQYNAENGGRHGTAKQAIRSPADTFSPARKDNTSTAYALKEARDLKHKANRLKEEGKELESTRLYFDSALKFLHVASLLEPPSFDGLKQGDAAQSMYSDTAKLCNFVGHAYEKCKKMAAAALAYKCVEVAYLKAAYCKHPTASKDRQVLQAVVQTAPEVMITIHFKSFEFLYVK

SEQ ID NO: 61145 - protein, 299 aa, Zea mays
  Coding DNA Sequence Number=SeqID_19366
  Homolog annotation: Hit_ID=Q9LGE3; Match level="QueryCoverage=28%, HitCoverage=94%, E-value=9e-13, Identity=45%"; Hit description=FPF1 protein-like
MSGSGGGVWVFNKKGVMQLEQLAPASRKALVYLPTDEVVRSVEALERRLGALGVVQLHRRGGGADLITIPRDFAGLRSTHMYDVVVKNRHHFKTKKYYWTCLPACRYHRKTAASRSRSGAHSPINQQDGHRDNVRSSRNGTHSPINQQDGHRATGRPSSSSSGGGGRRHAKPFETVGVRAARRASQGASDRGRGATGFFKAALQQQSSGLILVLVLALQELTSSQAELLERIQKLKHEVQNWRSNVETQVKTYQNELQDLKKGLDSEVEQLKSEMKAVRSAVQEEKGNLPAQNTDFRDG

SEQ ID NO: 61146 - protein, 190 aa, Zea mays
  Coding DNA Sequence Number=SeqID_19367
MALAQIGPQIMIEPIWSLRWHSGLKFCREHGMTSACKEWEQTIRFSHGWFKGSSYLPHLFINMTNMDKQQSGQTDISADIRYPRLPLIELKLPGAFLHDLSLNGNILLKLDITIYLLLKLNPLNLLPELNLPNDHMLKSTPRLSKDGTHEGGGGGVSVLSGTIIRGTLKAPNSQLVTPISIKLQRPDGCD

SEQ ID NO: 61147 - protein, 218 aa, Zea mays
  Coding DNA Sequence Number=SeqID_19368
MEGGDGVVVESGGVGSLGSDRGILMGDWWATEEVALRGGHLGDQRGTHGTFLLQGERHDMFALLGGRDGRLDGGDGHDERGGSGWRSEDSTVSTHAGATRVGWWTRNPGGEDRVCCCCAEEAPGSLIAMGRRLAAEKGSMVGRMPMGKVLPAAAACWPAAPASVKWWLRDRRRRTRDSSGISSLGEIRDATSISGPGALFDGKDNIAFQTSSLEKGLS

SEQ ID NO: 61148 - protein, 176 aa, Zea mays
  Coding DNA Sequence Number=SeqID_19369
  Gene Ontology: Mol. function=binding; Cellular component =intracellular; Biological process=RNA processing
  Homolog annotation: Hit_ID=Q1EPK1; Match level="QueryCoverage=76%, HitCoverage=24%, E-value=5e-39, Identity=59%"; Hit description=Pre -mRNA processing protein-related
MVGTEGSELDISTIIADLFDQKGGHLSPEALKHYLSAGEKLYKMSSKIYKEICYFEASIKRPFFNVKTLDDDQLENWHQYLDFVEKNGDFDWVFFLAVKLYERCLIPCANYSEFWIRYSEYVDAKGGREIANHALGRASSCFAKVCCHTRRVLSPELCIGDRLGVAPIKKRLVHTG

SEQ ID NO: 61149 - protein, 107 aa, Zea mays
  Coding DNA Sequence Number=SeqID_19370
MSMQLLSKTYPTKGKNSQGYAGFGTQGIQEFPRNETRPRLRRGELRRAHAGLATAADIVYGDGISTPMNRSKLSHVLNPTAKILDLGYRRRLQKGWTDDPTLVTTAR

SEQ ID NO: 61150 - protein, 649 aa, Zea mays
  Coding DNA Sequence Number=SeqID_19371
MKLKQTLKTDDFSLIVDKESEPQVDKDIVDSGKRHGDAGAQKALDLVNSHKETITTAQECTDMVYSEHILDKNRIEKQMNSHAKEDINQDLILHEQNDEKTNSHEAETPVAESGDCDSPSKAIASSENINFQGKVIEVSASSHLETVCSKYDSPSGPNMHKEGSSSGPARISPELEERHHVEVQVKVDTEHHFSVSNANLEISFDGPNPTECDKEISAIGHGSQDYIQSSQSHQLSACAKPWSLDSAKTKSDTVSIQAQLRNQLENAQTYQSNNLSQNMQQQELTMPHNVQTSAQIQDQLLAQPNHRNQQYLQMMQGYATQMGEYYQQQLYYLQAQHNQQMQSLQQQQLPTEHLQQTFMQQVQQLNQQLVLWQQQVQQQPQVVLQQALPVQQLPDEKQGQCPSGDSKHGQNKQQQQAPQMDQQSQQLQQQQLLYLQQQQQMYLIQQQQMYQQQQAQQQQLLQQQLMQQQQYVLQMPQHQQDSVRQQQQQLFEQQQQQMMLLQRQQQHIMQQQIQPYVQQQQNQQGPKDQTYKSNHQVTAVVGTGLLDCSRTAAEQAEALVEQASRGKGEQPLVLCGRRSWMSGLLRKGSRRRPGMKAGGRAREEVYVYAGFGGWAAGYGQRREEARLNDTVDGLKMAQYQNPSQATRKH

SEQ ID NO: 61151 - protein, 91 aa, Zea mays
  Coding DNA Sequence Number=SeqID_19372
MERITALQQFKTSYPQFQLEDELFAEDWKDVMMGIPYERRPYPKEGLTNGPKRQRNAAWAPPLGIGSFARVQHPSPMCDTLRPMKPGLRPY

SEQ ID NO: 61152 - protein, 119 aa, Zea mays
  Coding DNA Sequence Number=SeqID_19373
  Homolog annotation: Hit_ID=Q1EPK1; Match level="QueryCoverage=42%, HitCoverage=9%, E-value=1e-07, Identity=52%"; Hit description=Pre -mRNA processing protein-related
MEKRMGNTKAASEIYETAIEDAMQKNNIELLPDLYSNFAQFIYVVKTKYFAMDFDSLALSRKNSLQLFAGAFPPLHGVPFSYLRSKSLKVNLSKQLELKTPSEGTSYKKVVYVFWFLIT

SEQ ID NO: 61153 - protein, 371 aa, Zea mays
  Coding DNA Sequence Number=SeqID_19374
  Gene Ontology: Mol. function=protein dimerization activity
  Homolog annotation: Hit_ID=Q7XED8; Match level="QueryCoverage=63%, HitCoverage=35%, E-value=1e-51, Identity=40%"; Hit description=HAT family dimerisation domain containing protein
  Pfam annotation: Domain name=hATC; Domain location=259-346; Score =90.0; E_value=7.3e-24; Accession=PF05699.5; Description=hAT family dimerisation domain
MASKSRARASEANRNPSSSSVGELAQTAANMGVVVGELGVDAGELDVGVGCVAAGESTTIAFVVYGGELGDAVAAECAPPSASSSSAKCSSRADCWKHMVKKEVIEDGSAAGTGHLNRHYKACLAKLGKTQGGGVYYPTTCLVIDYIWLMAESFSKFRSDNLLNTIVAPMEKLDGLQIALEGIGDALDMDFSDAFNHAKDDLFRVFGYYYKKYGESEIDSHVIESGAEISDTSLTTHLWKRAKGKENAASSQRWNPNAELNHYLCTNFVGTDRALRGEKVKLLEWWRDKKYCFPVLSQFARDILVIPVSTISFEATFSTVRRIIEKRRSSLAPKMVEAITCLKDWNRAEERKQHQLEDPEIEFAAADLDID

SEQ ID NO: 61154 - protein, 129 aa, Zea mays
  Coding DNA Sequence Number=SeqID_19375
MAKFRRRRGHDHDEGLGHWERAQARSGQASGQRRWGFGCTGRTPVSVNRANQKGLGANRKMSHVAGEEAELTEAAGAAKTQRRPQNGRQNSLGVRRCEADERGPRDRESKRACAEKIDTDKSAPLGSER

SEQ ID NO: 61155 - protein, 54 aa, Zea mays
  Coding DNA Sequence Number=SeqID_19376
  Subcellular localization annotation: CTP_CleavageSite=46; ConfidenceScore=5.03e-01
MRAQISASLGALDSSTTTSLALDSPELGGRSRGHVRVNEPESRGVCASVSEGAR

SEQ ID NO: 61156 - protein, 215 aa, Zea mays
  Coding DNA Sequence Number=SeqID_19377
MDRVRGWTESVFSHTPHLWAFWELSAANVVHDGIPQLALSLQGDVLSVNRSPAAPPSPRRLSSMRGPQYLVGDDHVLRTKMVFTGRPGRATVSQWAGERFIIHAEDHVHGQTSVIWRQPRLSRRHEARAIAPGITNEGVMVAGFELVSKGPSFCIMIEGEERLLALNAERCSLSVAIDLLGLSVRTQSSEIENAFDVLEVGDMQLGLGRSLFRIS

SEQ ID NO: 61157 - protein, 52 aa, Zea mays
  Coding DNA Sequence Number=SeqID_19378
MPHRARVSPQNLYLSPAGELSGGMDFGLNHGGIAQSSELGSFTGSQGGCRRK

SEQ ID NO: 61158 - protein, 268 aa, Zea mays
  Coding DNA Sequence Number=SeqID_19379
  Homolog annotation: Hit_ID=Q8SA97; Match level="QueryCoverage=24%, HitCoverage=15%, E-value=1e-07, Identity=44%"; Hit description =Ornithine carbamoyltransferase
MGDSDSCARCARIYCSAESRWRGDSRCSGVAPDSPVNYSGLAVGVSRSWRVPEADLPWRTGHCPVYTGQSEGLRRLRHSDCSATRQSESDRQSGLAKGATANSAPPDPRARTRAKTRKTANSAPPDPRARTQAKTRKTANSAPPDPRARTRAKTRKTANSAPPDPRARTRAKTRKTANSAPPDPRARTRAKTRKTANSAPPDPRARTQASTRKTTKLRFARPQGSDSALASAERLPPRPTPWLGLGHGNKRQTQPRLRRNPHVALPRA

SEQ ID NO: 61159 - protein, 61 aa, Zea mays
  Coding DNA Sequence Number=SeqID_19380
MGEDFDTLALVPRMVDGGFLQIAWSLGMSSGGRQGGGWPIGEGLRRGWGAAAAIDRQTLKT

SEQ ID NO: 61160 - protein, 127 aa, Zea mays
  Coding DNA Sequence Number=SeqID_19381
  Pfam annotation: Domain name=zf-CCHC; Domain location=59-76; Score =21.2; E_value=0.00031; Accession=PF00098.13; Description=Zinc knuckle
MASSAYAAWDAAEEADIDASASQEELIGRARFISRDNEEEGEGEGEERPPQQHHQFQRQACFHCGEQGHWVMQCSKKAAQHQSGPIAPAKQNVPLPGAGNRSQPRYNHGILNHLEAEAVQETPGLIL

SEQ ID NO: 61161 - protein, 552 aa, Zea mays
  Coding DNA Sequence Number=SeqID_19382
  Gene Ontology: Mol. function=3-dehydroquinate dehydratase activity; Cellular component=integral to membrane; Biological process=aromatic amino acid family biosynthetic process
  Homolog annotation: Hit_ID=Q25CH9; Match level="QueryCoverage=99%, HitCoverage=81%, E-value=0.0, Identity=57%"; Hit description =Hypothetical protein osysl7
  Pfam annotation: Domain name=OPT; Domain location=1-521; Score=265.7; E_value=9e-77; Accession=PF03169.6; Description=OPT oligopeptide transporter protein
  Subcellular localization annotation: CTP_CleavageSite=76; ConfidenceScore=5.02e-01
MGKNAAGGDVRDGKNIVEPSIGRTVAFLFLVSFSGMFVLMPFRKVMIIRHRLTQQVEMLFRSLGGTMLWNMFQWFFAAAKGCGFGVFPIFGLEAYKHGFYFDFSMSNIGIGMLCPYTITVSMFIGSVVSWGLVSPYLATKAGVWYSSHLSPSSLSGIRGYKVFIGVSMILADGLFNFLSIVAYTLHTMRKRRSRQQPIIIQGGGCGGGSEADDGDTQPLPFHCLNAAAEQPKKSFDDRRRAQVFLRDHISNSVNIACYVLLSMVSVAAIPYLYPQMRRAHVALIYLAAPVVAFCDAYAFGVTDMNLSSTYGKLAMVLVGSSVGRNDGGVVAGLVACGIVMGTMSNANNLMQDLKTGYLTLTSPHTVFISQAIGTALGCVVNPVMFWAFYRVVQNGDTDVFDAPYARVYRSIAMLSAGQDGIPMHSLWLCKLFFALALALSVFREVAMWKRWRVARYIPSIICVAIAFVVPARIPIDMFVGSLVLYLWRRADPSKAPTFSMAVASGMICGDGLGMLLSSTMALMHARAPICIKFMSRTDNVKLDAFLATLPVT

SEQ ID NO: 61162 - protein, 86 aa, Zea mays
  Coding DNA Sequence Number=SeqID_19383
MAHCGDMLPLDPVTLEKFYDGTQAAFTSGGRGLVPINDGSSNLQREQLQEVVGTINTPNEHSIYTRDTPNIHTPIATTPKHPKPPK

SEQ ID NO: 61163 - protein, 88 aa, Zea mays
  Coding DNA Sequence Number=SeqID_19384
  Subcellular localization annotation: CTP_CleavageSite=62; ConfidenceScore=5.55e-01
MTKLKACRRWSSTRRSLGKITFMSLTFTVSQKMSSRTRAHDGAGTSRSGEDTPNPSPVPPALAEAIAALVNATADKTRFLREMAGNQI

SEQ ID NO: 61164 - protein, 83 aa, Zea mays
  Coding DNA Sequence Number=SeqID_19385
MRTILSPSTVIRTPRRTNRDTGEDCGVEITGGGALNLAIFVRIEVGKGLIGGSRNVTLRPAAGSLRSQLLPTAAANLSDGPGG

SEQ ID NO: 61165 - protein, 126 aa, Zea mays
  Coding DNA Sequence Number=SeqID_19386
  Homolog annotation: Hit_ID=Q6QP51; Match level="QueryCoverage=41%, HitCoverage=23%, E-value=2e-12, Identity=83%"; Hit description =Putative growth-regulating factor 1
MRSFLLRLRLNLAVVSLTLAGGTAVGEGRAALFSCQVGQWKGEVTAVTSTLPTKARGDEDDGYDYAYGNASPLQPNMIFAEYVDVYSPLLYTPNPPSSGCPHCDHFSGEDEAVEEDFQEFQEYDEF

SEQ ID NO: 61166 - protein, 116 aa, Zea mays
  Coding DNA Sequence Number=SeqID_19387
  Subcellular localization annotation: CTP_CleavageSite=58; ConfidenceScore=5.37e-01
MWAHRPSTTSCRNQLQSTPGADIPTSRGILTSSAHLNTPSLPVGQPGHTTIRPITDARGSRGRPPSNVVVTTNTSVCGSTLVLHPEIPASCRPSVRSLDPWAIYKPIVRTFLLPQP

SEQ ID NO: 61167 - protein, 81 aa, Zea mays
  Coding DNA Sequence Number=SeqID_19388
MAMMDSTSEKRYLCQVPSFWVEMIKLRPGGKKKRSGEWLCAAKGCFGLGHRTVRCAPDSVRCARPAWSKPAALGFFFGDFG

SEQ ID NO: 61168 - protein, 278 aa, Zea mays
  Coding DNA Sequence Number=SeqID_19389
  Gene Ontology: Mol. function=protein transporter activity; Cellular component=endoplasmic reticulum; Biological process=ER to Golgi vesicle-mediated transport
  Homolog annotation: Hit_ID=Q6H8D5; Match level="QueryCoverage=69%, HitCoverage=23%, E-value=1e-100, Identity=81%"; Hit description =Putative coatomer protein complex, subunit beta 2
  Pfam annotation: Domain name=WD40; Domain location=127-190; Score =34.7; E_value=3.2e-07; Accession=PF00400.22; Description=WD domain, G-beta repeat
  Pfam annotation: Domain name=WD40; Domain location=2-37; Score=1.8; E_ value=22; Accession=PF00400.22; Description=WD domain, G-beta repeat
  Pfam annotation: Domain name=WD40; Domain location=41-79; Score=47.4; E_value=5e-11; Accession=PF00400.22; Description=WD domain, G-beta repeat
  Pfam annotation: Domain name=WD40; Domain location=84-123; Score =45.1; E_value=2.3e-10; Accession=PF00400.22; Description=WD domain, G-beta repeat
  Pfam module annotation: Pfam domain module=WD40::WD40::WD40::WD40; Domain location=127-190::2-37::41-79::84-123
MVKSFEVSELPVRSAKFISRKQWVVAGADDMFIRVYNYNTMDKVKVFEAHTDYIRCVAVHPTLPYVLSSSDDMLIKLWDWDKGWMCTQIFEGHSHYVMQVTFNPKDINTFASASLDRTTKIWSLGSPDPNFTLDGHQKGVNCVDYFTGGDRPYLITGSDDSTAKYYDGAFYGKLPIIITGSEDGTVRIWHSTTYRDVEPEIVQGVKQNDSVLAMEPGSVAGRCYMHSHHPDPSLSPLELESGCLFLIYNGHLVPSRLENTLNYGLERVWAVGYMKGSR

SEQ ID NO: 61169 - protein, 285 aa, Zea mays
  Coding DNA Sequence Number=SeqID_19390
  Subcellular localization annotation: CTP_CleavageSite=77; ConfidenceScore=5.23e-01
MASTTLTTDDLLKRVKITVGKAGYTVHVSLRPERGYVSLSSRSGGRTRIRNEPTRKGRLVMPLRSVVGTWSEPSLARPSVGPDVPVLGLEVFAPLPETQAYAELGPIPAVEEEAMAVERPVDPLPVPTSGTKGPRSQGPRRIDLPRSRKVVVRLQFAGAISPPRLTPGPTFGCFLHLARRLVRPLSEFYASLELGLDHLLRRESHRRPLRPTMAHVKGWLVQTPWEDFRLDRVGALISINAAGNLDVIPCKDTDAPHNPSGSALALYGKLMNGSGVPPRDIWPTI

SEQ ID NO: 61170 - protein, 44 aa, Zea mays
  Coding DNA Sequence Number=SeqID_19391
MVKASVLRPTMSYLLYNSRSRITLFNTECFWVITGFITKIWLYL

SEQ ID NO: 61171 - protein, 92 aa, Zea mays
  Coding DNA Sequence Number=SeqID_19392
MGKIPTNEQDRRAAEQQSPTSRRAAGDKAGRRAGEQQGHGRPTSRRPGALKQPTDEWICGRRLDEQDCRSPTGDGTDGARGLLDAWTPAWSP

SEQ ID NO: 61172 - protein, 350 aa, Zea mays
  Coding DNA Sequence Number=SeqID_19393
MDSADSCRGDGGARAMVGRWGEGRNCYAQAGGLVRGRWGSSFTERMNGEVGETDTTGGRKGSDAATRGRRRRRGSRCRTGKSEQAPTNWARLARTWDAECESTGELRRRWLDDAVAITYHFNLLGGELVARPRGSNSTRSSASGAQLAASTVPIDNLTVVATLQSPCPRRRIENETPARTSSKRRANASIFTATKAEPSQHGAEVAVPTPGVPVEPDTAVAEVASVRPVSPVEAIVVSSKDEAEADNAAPRIASPMVSDLLRAIPDTPEVASSSGAGCAEEASSTVPPERIVSGTLLGDETIIKPPISGASSDLVHSGPNPSIWGGPPLAWTSTEGDPYFVLDNIEERKF

SEQ ID NO: 61173 - protein, 256 aa, Zea mays
  Coding DNA Sequence Number=SeqID_19394
  Subcellular localization annotation: CTP_CleavageSite=31; ConfidenceScore=5.17e-01
MAPWHKSNCNTVSVTLKLHVVPLQMSYTLSLASTKTVINHHKKFHRNEQTLGPNVASGEVSRRHAPPALPWIRPWPATTSTTTRSSGIQQELAADPANGAKTVRKPVFTTVNQLRPQMHGHTLVVCVVSAHTIIDKSSMHIGRTCIAKCLVGYNTDTVLITPATIRQICHRYTHGKQLIPVGQEPTGISTKPTGISNSRRFSPYSRRLSAARRPLSGIRLFPSAADGNTLSPSAIIEPTGIRANSCRPLQPTGVTN

SEQ ID NO: 61174 - protein, 140 aa, Zea mays
  Coding DNA Sequence Number=SeqID_19395
MDATGADRSSEIDVEGEGGARQGGRGGEEPSGSEGGRPCASSGGSREAGMDAGGCWGAWLREMEASAGVAARMAGGLLRTWRRGLGRDAGVAAHMAGCGCGSWSESETIRRFRMEAGLAIGRSRWRRGHGCASLHYCLKD

SEQ ID NO: 61175 - protein, 975 aa, Zea mays
  Coding DNA Sequence Number=SeqID_19396
  Gene Ontology: Mol. function=nucleic acid binding; Cellular component= intracellular
  Homolog annotation: Hit_ID=Q6H4V9; Match level="QueryCoverage=92%, HitCoverage=100%, E-value=0.0, Identity=64%"; Hit description =Putative RNA-binding protein 10
  Pfam annotation: Domain name=G-patch; Domain location=899-943; Score =59.5; E_value=1.1e-14; Accession=PF01585.13; Description=G-patch domain
  Pfam annotation: Domain name=RRM_1; Domain location=262-348; Score =31.9; E_value=2.2e-06; Accession=PF00076.12; Description=RNA recognition motif. (a.k.a. RRM, RBD, or
  Pfam annotation: Domain name=RRM_1; Domain location=387-460; Score =83.9; E_value=4.8e-22; Accession=PF00076.12; Description=RNA recognition motif. (a.k.a. RRM, RBD, or
  Pfam module annotation: Pfam domain module=G-patch::RRM_1::RRM_1; Domain location=899-943::262-348::387-460
MDHGRYAPQHGWENNSAPNGYGVINEPDFRSGGSYNARRSVDEGFPRDSYGRGAFYHDTHDRNMYASPPSAGGMWSQPRRNHDEDYATARDHRRHDTDYRNDGKHHEFDSYRGVDRLHDNYRATDNYYESGSHRDFGADRSKRIGSRERAEFHGEFEDRYRSSHQSREDSYERDHEYGRYGYDSDYERGKRDSSWRRRDSCDSERERSGLSREREESPYTRHSRSRSHGRDDRSRSRSRSRSPRPRSHGRNQRRWPAPSATVVVKGLSLKTNDDDLYKILVQVPLHHLLHRLKAQWGPLRSVRVIRERNSGMSRGFAFIDFPTVEAARRMMEATGENGLEIDGRNVFFQYRTSCFQTVLFAEWSLNIGMGKLLETVLVAGQGPTHVLVVRGLDENADEEMLRYEFAKHAPIKDIRLVRDKFTHVSRGFAFVHFHSVEDATKALEATNGITLEKNGQVLRVAYAKSTHGPASGGSQSNSLAAAAIEAASFAQQYDAIGWAPKEYNPDDKQNNNSESQKDGSTAQSGFVWDEKSGYYYDSASGFYYDGTTGLYYDSNSGVWYSYDQQTQQYVPCNDQSNTKAAGEAASENTKTSDSNSGKKVVISAPAATIKQSEKTSLPDAVQAAANAALAAEKREKEKAKEIKLASKNSLIANKKMSNVLAMWKQRNQEGQAARIVLDDKEPANSDDKFSHSRSGTGFSLKSKPNSDLENAMGNSLGQGMTSTQTLDSVVKPRPVSNSLGTTVMGVIRGSARGVIKSDTTFHALSDAGSTDSRTTITTRASGLMTSSEALITPAPFKTDVSALVSNTPSGVSGSGKRRFSEAPGQSQYRDRAAERRNLYGSSHGTDTVGLDSTGDYPSRKGSSEIGSMPFPPGVGERSSGEIGNSENYEVITADRAIDESNVGNRILRNMGWQEGLGLGKDASGIKEPVLAKSVDARAGLGSQQRKPDPSLEAQAGDSYKTIIQKKAMARFKEMS

SEQ ID NO: 61176 - protein, 59 aa, Zea mays
  Coding DNA Sequence Number=SeqID_19397
  Subcellular localization annotation: CTP_CleavageSite=47; ConfidenceScore=5.04e-01
MARVACTLRGKRLDGGISVLSVGVNPVRKQQTFAVSVQMWYPRKSPSSEVVGGSWPPTL

SEQ ID NO: 61177 - protein, 88 aa, Zea mays
  Coding DNA Sequence Number=SeqID_19398
MGREAVGGWSRGQRPHVVEQDSRGRGRGGIPLLVRCARRAAMGGKLQPDLGKERRAPRSQGGSAEEAGADLHACCRGEKKTGKKEAGG

SEQ ID NO: 61178 - protein, 129 aa, Zea mays
  Coding DNA Sequence Number=SeqID_19399
  Subcellular localization annotation: CTP_CleavageSite=39; ConfidenceScore=5.16e-01
MAVAGGQEQRSRRQPSLRPIRGQRENPLSRREDNAPVSRSSNGSRTRNGRPANHSPCSINSAAGTGGASGRETNDASPSPYDRDKKGTGKGVYPERILPREGTRLQNPLDGTFEGWPLRRFDSASDTVA

SEQ ID NO: 61179 - protein, 86 aa, Zea mays
  Coding DNA Sequence Number=SeqID_19400
MGTKVINLIQLRTLRELSTHQPHSATNDMRRTWASRIPSYAFFEQYMSIRQIEITALNKLALLENGLQQTTLKEKYRLPVLFFVWN

SEQ ID NO: 61180 - protein, 228 aa, Zea mays
  Coding DNA Sequence Number=SeqID_19401
  Gene Ontology: Mol. function=oxidoreductase activity; Biological process=metabolic process
  Homolog annotation: Hit_ID=Q4C1P6; Match level="QueryCoverage=33%, HitCoverage=30%, E-value=2e-16, Identity=50%"; Hit description=Short- chain dehydrogenase/reductase SDR
  Pfam annotation: Domain name=adh_short; Domain location=56-207; Score= -55.8; E_value=0.026; Accession=PF00106.15; Description=short chain dehydrogenase
  Subcellular localization annotation: CTP_CleavageSite=94; ConfidenceScore=5.42e-01
MARLAVAARAFSAAASGGGVSLVQGASRGIGLEFVSPPHLPLIASPPPSVSSGPSVCVLIRCPLHALGDPVQVRQLLRRSDGGRVVATCRTPGSAAELQKLREEHAPGRLTVLPLDVTDESTIEAAAASITETHGSLDLLINSAGILSIPNVIQPVSVEFGRKDNIACVLLHPGTVDTDLSRPFQRNVPEGKLFTREFSVQRLLSVIDSVKKGDNGKFFAWDGQEIPW

SEQ ID NO: 61181 - protein, 80 aa, Zea mays
  Coding DNA Sequence Number=SeqID_19402
MAAQYPERNEGYAGELISGDPERPLPILLALNEVDGHANMEGGYLPKVNAQKLLATARRGIEASRDRLQEIGAELAINHG

SEQ ID NO: 61182 - protein, 116 aa, Zea mays
  Coding DNA Sequence Number=SeqID_19403
  Pfam annotation: Domain name=potato_inhibit; Domain location=41-103; Score=3.5; E_value=0.0087; Accession=PF00280.8; Description=Potato inhibitor I family
MNMKLIPTGQESADIMQKDSQQQLSKLILFRIQAAEFFGNKTSWPELVGQEINDAIAVIEQERPDVTLFESLDVDLNETPRPSNQLAPGAIRVVIYFGTDPVTNEEIVEETPYIKA

SEQ ID NO: 61183 - protein, 109 aa, Zea mays
  Coding DNA Sequence Number=SeqID_19404
MVTGLKWLNQTAQMCDLKLKPSIDPLTDGVADNLVSEVVDLDPFSTGDFADATTPRVLEEMQLMEARVLWALRLMNSRCLSRGGAGGGGAGKSILSPFLVLTIWVRNTW

SEQ ID NO: 61184 - protein, 44 aa, Zea mays
  Coding DNA Sequence Number=SeqID_19405
MHTVRLAMWPPDVGEPSDSSARTADDCGAQVSGHSAGARAGCAR

SEQ ID NO: 61185 - protein, 111 aa, Zea mays
  Coding DNA Sequence Number=SeqID_19406
MGSTRPPVDGGFGRERDESDEVGQELARGAGMGKRERSSMTRHEYGWRAGRFDGVLATWASQTGGRGWGRETVGGGATDRRAQRLGSGTPHDYGLGRRWVVRALASAGAAR

SEQ ID NO: 61186 - protein, 75 aa, Zea mays
  Coding DNA Sequence Number=SeqID_19407
MAGKKSARGSGANVTKTQKTHKVDCGLISREVRVSLEKLNREGADSVVESIPRIDDGSGRITAAFKSRQRCTSVK

SEQ ID NO: 61187 - protein, 175 aa, Zea mays
  Coding DNA Sequence Number=SeqID_19408
MEAIKPAHRSRVDSESDHTRWLNYPRPVSATGYQHSTKVVLHSVKLLPSVTLGKESSSETDRQSGPVKGTIGNSAPPDPRARTRAKSRKTANSAPPDPRARTRAKTRKMANSAPPDPRARTRAKTRKTANSAPPDPRARTRANTRKMANSAPPDPRVRTRAKTRKMANSVPPNPR

SEQ ID NO: 61188 - protein, 162 aa, Zea mays
  Coding DNA Sequence Number=SeqID_19409
MSTRILQNMYYDLEIHARGVGEEAGVRIHGGSPLPPPVRGQRPVWRWESAGATRGTVRWQAIGRRRLRAGGISRRRYMDTAEPRPGVVVPPCGRILGMRTLALSAFVPSMRCPSVLGYLDQLGCRMPKNYLTDVHLCRDLNAAVIRPDPSSIHGIDSTTESA

SEQ ID NO: 61189 - protein, 118 aa, Zea mays
  Coding DNA Sequence Number=SeqID_19410
  Subcellular localization annotation: CTP_CleavageSite=45; ConfidenceScore=5.01e-01
MRAGAKPRHAGHKPRRASAGRRGQASHAGEVAAPCVGRRPLLRARCGQVGRAPRTPPRAKPRHAGHWPPARPHQVVPGFLSIDYDLDADSSGYTDKVTDIVYISDGSYVDAGDGIYAN

SEQ ID NO: 61190 - protein, 64 aa, Zea mays
  Coding DNA Sequence Number=SeqID_19411
MAGEPGIACRSSMAVAGHASPWAGFVRALNPGMSNWYCSLGRPHRVAVFVGDMGALVPFGHARR

SEQ ID NO: 61191 - protein, 101 aa, Zea mays
  Coding DNA Sequence Number=SeqID_19412
MVAVLRMRGESSGEHREPEGERANGGTSRVADTKAELTEAMGPTRPQRRRWNGRAGVVNGGGPSSSGKRQHMSEGGLGGVWEWRKSQSGQKGGLSRCRARG

SEQ ID NO: 61192 - protein, 41 aa, Zea mays
  Coding DNA Sequence Number=SeqID_19413
MDMNSFNKMGDDPICSGWKGTYGMRGGKMDGNEMADSSSVE

SEQ ID NO: 61193 - protein, 672 aa, Zea mays
  Coding DNA Sequence Number=SeqID_19414
  Gene Ontology: Mol. function=binding
  Homolog annotation: Hit_ID=Q9AUY1; Match level="QueryCoverage=85%, HitCoverage=99%, E-value=1e-170, Identity=63%"; Hit description =Putative arm repeat containing protein
  Pfam annotation: Domain name=Arm; Domain location=296-335; Score =10.4; E_value=0.61; Accession=PF00514.13; Description=Armadillobeta -catenin-like repeat
  Pfam annotation: Domain name=Arm; Domain location=337-377; Score =25.8; E_value=0.00016; Accession=PF00514.13; Description =Armadillobeta-catenin-like repeat
  Pfam annotation: Domain name=Arm; Domain location=378-418; Score =27.7; E_value=4e-05; Accession=PF00514.13; Description=Armadillobeta- catenin-like repeat
  Pfam annotation: Domain name=Arm; Domain location=419-462; Score =19.4; E_value=0.013; Accession=PF00514.13; Description=Armadillobeta- catenin-like repeat
  Pfam annotation: Domain name=Arm; Domain location=464-502; Score =14.3; E_value=0.2; Accession=PF00514.13; Description=Armadillobeta -catenin-like repeat
  Pfam annotation: Domain name=Arm; Domain location=505-542; Score =19.5; E_value=0.012; Accession=PF00514.13; Description=Armadillobeta- catenin-like repeat
  Pfam annotation: Domain name=Arm; Domain location=543-583; Score =34.1; E_value=4.7e-07; Accession=PF00514.13; Description =Armadillobeta-catenin-like repeat
  Pfam annotation: Domain name=Arm; Domain location=584-626; Score =17.3; E_value=0.057; Accession=PF00514.13; Description=Armadillobeta- catenin-like repeat
  Pfam annotation: Domain name=HEAT; Domain location=306-337; Score =7.4; E_value=5.4; Accession=PF02985.12; Description=HEAT repeat
  Pfam annotation: Domain name=HEAT; Domain location=343-379; Score =7.5; E_value=5.2; Accession=PF02985.12; Description=HEAT repeat
  Pfam annotation: Domain name=HEAT; Domain location=553-585; Score =4.0; E_value=14; Accession=PF02985.12; Description=HEAT repeat
  Pfam module annotation: Pfam domain module=Arm::Arm::Arm::Arm::Arm::Ar m::Arm::Arm::HEAT::HEAT::HEAT; Domain location=296-335::337-377::378 -418::419-462::464-502::505-542::543-583::584-626::306-337::343
MNQVQGNWTNAKHATKLDSMIPTVAGIGERSFALLCHDDECRASGYTPAVLIAALLGLGLCVAVVAAEKRRRLVGVGATGDDHAAASAGLSQGTVQVQDHGGHWCSNSNRVQVQEMSSRGPDPAPPGEEQETAEELLERVRGMVPAAAAAARAAGGFPGRWKAIAAKLDALPACLSDLSSHPCFARNSLCRELLQSVAATLADAAELAARCREPAGGREAEGAERRRRALRGGSTSASGTARCSSRPASCRTPPARHRRRRRRPTSGSCSRGCRSGTPRPRGRAVDALLDALRRDERGVLAALGRASVAALVQLLTASAPAVREKAATAVCQVAGSGAASEALLVSEGVLPPLVRLAESGSAVGREKAAATLHRLSASPDVARAVVGHGGAGPLVEICRTGDSVSQPAAAGALRNLSAVPEVRQALADEGVVRVMVGLLDRGAVVAGATKEHAAECLQNLTSGSDGLRRAVVSEGGLRSLLLYLDGPVPKEPAVGALRNLVGAVSPDSLVALGVLPRLVHVLKIGSVGAQQAAAAAVCRISSSAEMKRAVGEHGCVAPLVRMLEAKSNGAREVAAQALAALASCPANAREMKKDDKCVPSLVQLLDPSPANTAKKYAIACLLTLSGTKRCRKVMVSHGAIGYLKKLSDMDVAGAKKLHERLERGSLRSMFSR

SEQ ID NO: 61194 - protein, 534 aa, Zea mays
  Coding DNA Sequence Number=SeqID_19415
  Homolog annotation: Hit_ID=Q10SM0; Match level="QueryCoverage=53%, HitCoverage=50%, E-value=7e-29, Identity=37%"; Hit description =Expressed protein
MAARGVQAPAPRRPVTLRDFLELGCDSSSDGFRSYPRRLLPLPPDAVLHLQQQQAPPTPRAEAAAAQRLLRRSSSSLALALFSSSLPGSGSGSGPAGALARISSISRSFSRRIKEGFWRRRDEDEGDGDGDDDYDGDYFDDRDSCGFPSPLVSSCSASDSDESEADVTTAPERNKATASSSTSPSPSPSSADHDRTRTDAAVADGDKAETAAVEDGDSTTGAPSTVGDKQQQLSPVSVLDFAFDDNDGEEEGSDAGTSCSCSSPAFQFQRCTPPAVDLHGTKPQAQLLHKIRRYDGVAQGIDPVDLDARFTAATSESGESADASTRLATTTSSSSTDTSSSSSSSAETTAPQHDDEEAEHQSAERALSPSPSLHYQADQEEPDDEYRLLARLLEHDAAAAGVPWTTRSHGCSSSTSSRRAPDRRLTRSAAAGGRPLHDDRSESLLVRAAAAWLRGAGPRWGIGDVARSGKAALDDMERSRRWMCVGEEECDVAADVECDAVDALVDELVTELAIVLPRWPRCDVAVDDDNVLVD

SEQ ID NO: 61195 - protein, 144 aa, Zea mays
  Coding DNA Sequence Number=SeqID_19416
MKKKMMKKKKKMIKPRHHPPRTKKQSDALKRSRIFSLTLIRKSKEREDASHVGRRATFEIIAQIQSNPKRGAKARHKCQDLGWFFKDPQPPLINMFFTFITQMPYGKSKWLNLKTLKNKLLSSQNDYKCLLEKFETFAKFEIVS

SEQ ID NO: 61196 - protein, 227 aa, Zea mays
  Coding DNA Sequence Number=SeqID_19417
  Subcellular localization annotation: CTP_CleavageSite=50; ConfidenceScore=5.06e-01
MAVHARAAEAGPLCRGCLAAAGRALRLGPRAHATREPRSGRLRRRGTRPRARRGSAPAMPRRPRHGRAPAPPLGPCRVCPTAGCLAHNRRDGRRRGRGHRARVVSSGSACARRRGLRTEPLRLGAAARCQGSAPAPPWPNRLHRDRSHRARGRARVCRGCTRASPGQRPPAKAARRRDASLSRAASAPMPASRPCLWVGTAAARRWNGRLGFNPNCQLLEASLRWAS

SEQ ID NO: 61197 - protein, 161 aa, Zea mays
  Coding DNA Sequence Number=SeqID_19418
MGATQASGHWRLGKGWHPGGAQPWPVGAAPATRECSPYTHERGPGPGGSCPGAGGLATAAPGRFPGSARRPPASTARCAVPGGAHRQIRSRRLGRGGLGPGVSRPGGCGRGSQPWGRPGRAPAAVQARVHGAASLASRARCPDAHAGESPGGAGGQSAALW

SEQ ID NO: 61198 - protein, 405 aa, Zea mays
  Coding DNA Sequence Number=SeqID_19419
MAASGYSGSAPITDQGFEGWPPKEGQRRLRHSDCSATRQSESDRQLGLAKGATANSAPPDPRARTRARTRKTANSAPPDPRARTRAKTRKTANSAPPDPRVRTRARTRKTANYRSARPPGLGLGLKTRKTAKLRSARPPGLGLGLGPRRRRTPLRPTPGLGLGLGPGRRRTPLRPTPGLGLGIRPGRRRTPLRPTTGLGLGLRPGRRRNSASPDPRARTPPWPRPDDFRLARPPGSGSATAAEGRLNLGFGGNPTSARGAMMALHELYDDGGPQLSYGSRTTLRRTSDSHDITPAGCPDLSGCHIGMAFSEEVGRAGPRTGQALSWGRSLPSPAWTLVTPLLQAHPTWARDEHEGRGTSTSLTLGSGRLASPPSALAHALDPSGLGHAAHSLVGLGTPLSRNADK

SEQ ID NO: 61199 - protein, 48 aa, Zea mays
  Coding DNA Sequence Number=SeqID_19420
MAEESARHPAVWGEGEDGVGGGRIRQEEAGANRDDFGAWAWIQEWESL

SEQ ID NO: 61200 - protein, 348 aa, Zea mays
  Coding DNA Sequence Number=SeqID_19421
  Homolog annotation: Hit_ID=Q5ZC88; Match level="QueryCoverage=20%, HitCoverage=9%, E-value=1e-22, Identity=74%"; Hit description=CUL1
  Pfam annotation: Domain name=Cullin; Domain location=86-287; Score= -82.3; E_value=0.0073; Accession=PF00888.12; Description=Cullin family
MASRSLLRRIGIQPAYRLSGDHCGPRLLRFSDSEALHRLIPLTGDRSVCGNTYGSPSKTDSTRSMYTTIEYISLTETGPTVPSVTTVRVEYGDDAIATDSSGAHIDKEHEGEQIGRAVLKNVLDIFVEIGLGQMECYENDFEDFLLKDTTEYYSVKAQSRIFEDSYQDYMIKAEDLCMMYRLFSKISHGWAAQPKLVNLGVQKHEEVSKVEDDIVLSPPSQRAAHHVADRVLAFDLTTATPLLAQPPPPCSNSGGLPSLSSTPPSDSTSSPTAPSDSTSPNGDLHQPTAILQLRPHRLPSPNPLLQRAAPPSRGQWTPPTPTSALHFRDSRSTQSRKCVLPPGANVDG

SEQ ID NO: 61201 - protein, 163 aa, Zea mays
  Coding DNA Sequence Number=SeqID_19422
MVIDAVLPGYRREMWSVVYKFTFVIIDEARYSVEYISEAIYVSWSNNIARTREKMSVFLWTPFSGNQPIICSNGAYEEALFSAAVCQLQADRSLKKPTLLAIEASSEGLIFIFSVGMDYWHEALCIVEEANMMYEAPTTWTYAASTTMMYLPLLWGIDIPWVH

SEQ ID NO: 61202 - protein, 257 aa, Zea mays
  Coding DNA Sequence Number=SeqID_19423
  Homolog annotation: Hit_ID=Q1S3X6; Match level="QueryCoverage=28%, HitCoverage=39%, E-value=2e-17, Identity=63%"; Hit description =Ribulose bisphosphate carboxylase, large chain
  Pfam annotation: Domain name=DUF640; Domain location=86-205; Score =26.4; E_value=3.1e-05; Accession=PF04852.3; Description=Protein of unknown function (DUF640)
MQGPSALPAPTWAPPPHPFAPLDACRQLEALPFLDPLKHLEVLYSTIKVVRSCPPNFLPPCPDPTAQAPKSSRFAPASSCLILPPPTPSSPSPHTAGCRALSSAISLNVLPPENTICSVVPNLRLRSGRRSHRVRLLWCTQFGCAYYGQRAQPGPCPCPLHQAWGSLDALIGRLHGVRGERQDDRVQPLRDTRHVDLPPRSARLAGQGVRHPLRKEEEVQAHAADYGAFDELVCYCRRERQGYNNNCCGVRCSGWRE

SEQ ID NO: 61203 - protein, 47 aa, Zea mays
  Coding DNA Sequence Number=SeqID_19424
MARREARSAGMRGRGWRGREGHGGGGGATAYVQQLESSKLKLAQVEQ

SEQ ID NO: 61204 - protein, 444 aa, Zea mays
  Coding DNA Sequence Number=SeqID_19425
  Gene Ontology: Mol. function=zinc ion binding; Cellular component =intracellular
  Homolog annotation: Hit_ID=Q10E42; Match level="QueryCoverage=93%, HitCoverage=95%, E-value=3e-88, Identity=41%"; Hit description=Zn -finger in Ran binding protein and others containing protein, expressed
  Pfam annotation: Domain name=zf-RanBP; Domain location=303-332; Score= 18.6; E_value=0.0049; Accession=PF00641.9; Description=Zn-finger in Ran binding protein and others
  Subcellular localization annotation: CTP_CleavageSite=60; ConfidenceScore=5.49e-01
MAACSSRLLYLTLSSSFLRSCRLASSSLLPTASRCHPGSLHSLRFCSAVPEFVDVAADPAEAAVSSGHPWPEWGNFLDKLRAKGYFEQGLPSSVSSGEGAAGDGDPATASENAATAASGNTVVDAEDSAVTSEDIYHFLKDENRVKNACLKFGRDRFDLLSLLPKQDIQAIVMSGCPNNNRKPVYSAKRLREYVQVKEEDACSICKFKASCDRAYVTPKGEVEVRTVDVVRILLSYAMDKNHSGDNSVIEESVQESAKKLLSKLTEFSDTTIDPSLPKPAFQVARKAQGSVGKGRETTAVEMKKGDWLCTKCDFVNFRRNAICKKCNQDRPEDDTRDSQRGLRKTRGAGKFRRFDYIDQKSDDDDDNAWFQKRGASMRSKPDQRTTTAKSRGSDGLDDILVTTKRRSTKQDEDDEVLPYEGARKHVVSRRATPSQRRFTAARNQ

SEQ ID NO: 61205 - protein, 175 aa, Zea mays
  Coding DNA Sequence Number=SeqID_19426
  Subcellular localization annotation: CTP_CleavageSite=27; ConfidenceScore=5.64e-01
MTAAAAPFPPSGGSGQALPLGKIVVVRGGKVQRSRVRHAHPRALFSSVALRISRRHRGGAAKRGLGRACLLRHGGTAVCFALKRSGDVEVVLRPPLSRLLSGGSVNEEGAGHEWRHAPRRGRCTLVRAALSNEELGSARCGSARPSGELGKAARFAPRLAEPTSLVINVNLLSKL

SEQ ID NO: 61206 - protein, 51 aa, Zea mays
  Coding DNA Sequence Number=SeqID_19427
  Homolog annotation: Hit_ID=Q53RJ2; Match level="QueryCoverage=65%, HitCoverage=9%, E-value=4e-08, Identity=79%"; Hit description=Tat binding protein 1(TBP-1)-interacting protein (TBPIP), putative
MPPKSDSVEGIVLGFVNEEELGIEYDEDVDVNVQSYSDMLASLNKRRKISR

SEQ ID NO: 61207 - protein, 316 aa, Zea mays
  Coding DNA Sequence Number=SeqID_19428
  Pfam annotation: Domain name=DUF573; Domain location=83-179; Score =37.1; E_value=6.3e-08; Accession=PF04504.5; Description=Protein of unknown function, DUF573
  Subcellular localization annotation: CTP_CleavageSite=64; ConfidenceScore=5.81e-01
MASDQQALSVPVPVPVPSNPNPSALADPTPPSASAPRKLPIKRRSPRPSSSPPSSSPDSSDPLRAPAAGGGGGGSDKQQQPPFKFQRIWSESDELRFLQGLLGCGAQGLVFPRDLNVFYDRFSESMPQPYTRAQLSEKLRRLKNKFRSMSARVAEGLDPARLAPHDRDVLHLCSRLWDPANAATSPFVASAGTSGNKRRRANLQGTSLPPPDASGDSNSHDYNGINSSAPCLFPDGSNGEDMFYLEQEPGHLGDHEASLQRLHSACNTHDLFASASSLVCSASTLPPHHATGSARLLQWLLLIPACLQAAAAFPLG

SEQ ID NO: 61208 - protein, 176 aa, Zea mays
  Coding DNA Sequence Number=SeqID_19429
  Subcellular localization annotation: CTP_CleavageSite=65; ConfidenceScore=5.66e-01
MWFWSKRPCAPSRSRNSGTQLGDGISSRAGSSTGNGHGSKATVRPSQSSTGETLWVQIGARNGVRAHAERNLGWARTQGSFASLRGTTPCGELELDRARTGGIRAEARDARARKLEGEQGGSWGGNRGQGEAAELKERRAEDRDQGRRRRNSGWALLLVSREHQGAAASGAEQELD

SEQ ID NO: 61209 - protein, 92 aa, Zea mays
  Coding DNA Sequence Number=SeqID_19430
MPQLRHKIRGCGLTGLAPQTGYKERPVHFYMLLSPLSSYLLAPHISIWDAAAGTMGVGEVPPLWAGIEAPIPVPGASPTHRMDCVVPAGGIG

SEQ ID NO: 61210 - protein, 126 aa, Zea mays
  Coding DNA Sequence Number=SeqID_19431
MDCGINFKKIQGWICKDLDLIGLFYNFTLPKVYLKISAIGSIFDGHHYIKSCNVPSNWYDVIKSGASSLGSAVSTQFTRSPYSLTNPGATAHIHMATPWLVHRPLRTRAQNSNTRDDTWSGDEGKK

SEQ ID NO: 61211 - protein, 54 aa, Zea mays
  Coding DNA Sequence Number=SeqID_19432
MSQADTAAEAEQCLKLILSARFFTEERYPCSTGRELRRRCESGREVTGGPFAGH

SEQ ID NO: 61212 - protein, 58 aa, Zea mays
  Coding DNA Sequence Number=SeqID_19433
MEARGPARLTLRPLHYKTKAYDEVSPSHIPTRLGGPRIIKVPEGISVLTSGRWALGHL

SEQ ID NO: 61213 - protein, 73 aa, Zea mays
  Coding DNA Sequence Number=SeqID_19434
MAAFLDSHDSEIRPCRRAIPVNNNAAEYDQRDPVTLQEGHRGPTECPIAPLTTVATLLSFCAFSQWRLLRFDG

SEQ ID NO: 61214 - protein, 128 aa, Zea mays
  Coding DNA Sequence Number=SeqID_19435
MEKEPASMGKKWRRPWLLAELPADHREEEDRASAGADLREGEGGREWRLKNLEGWECKIAMCKGRDPRGLFGMSRGLFVKSVGTTVNAIALDDRQIIFGKQQGHFCKMASAKGYGAIKAARSEAHGAY

SEQ ID NO: 61215 - protein, 241 aa, Zea mays
  Coding DNA Sequence Number=SeqID_19436
  Gene Ontology: Mol. function=catalytic activity; Cellular component =cellular_component; Biological process=metabolic process
  Homolog annotation: Hit_ID=Q2R712; Match level="QueryCoverage=96%, HitCoverage=33%, E-value=4e-79, Identity=56%"; Hit description =Cycloartenol synthase, putative, expressed
  Pfam annotation: Domain name=Prenyltrans; Domain location=128-171; Score=32.1; E_value=2e-06; Accession=PF00432.11; Description =Prenyltransferase and squalene oxidase re
  Pfam annotation: Domain name=Prenyltrans; Domain location=78-119; Score=3.4; E_value=1.7; Accession=PF00432.11; Description =Prenyltransferase and squalene oxidase re
  Pfam module annotation: Pfam domain module=Prenyltrans::Prenyltrans; Domain location=128-171::78-119
MWRLKIGEGGGPWMQTERRKVEQLRRAFTENRFQRRESQDLLMRMQFTGQKHLHADDMPAAFAKIEEGDEVTEERLRESLKRAMDWMSALQAEDGHWPGDFSGIMYMMPFWIFALHITGTVDAVLSKEHRREICRHIYNHQNEDGGWGFNIIDESAMFSTCLNYTSLRLLGEVQQEENDGLAKGREWILSHGTATAAPQWAKILLSVIGVYDWRGNNPVVPELWLVPRFLPIHPGLTLFTF

SEQ ID NO: 61216 - protein, 135 aa, Zea mays
  Coding DNA Sequence Number=SeqID_19437
MEGSLPVIELCRVWFVVMSEFAVEDKLRRAIVYLMVIPKPTICTDTILGCPRTPPVCTRTQNAGAFDNRASGLLPPILSLLSLLHSVSMDLSICLGEEITAGATYLYAHSGVRMRASVNGSPRFPQVCYAQPHMR

SEQ ID NO: 61217 - protein, 125 aa, Zea mays
  Coding DNA Sequence Number=SeqID_19438
MGSMKCYKEAASMDSVVATRCSVWDCGFRAAPGDAREDGATYCNARDSGAACGGTGMSWSCLVVWETPQPFVKVQETQGPHVVAHETSRLHVVVWETMMPHEAVWGRREHTRHVLSSIALITYYL

SEQ ID NO: 61218 - protein, 132 aa, Zea mays
  Coding DNA Sequence Number=SeqID_19439
MPRRRGTGNYDPSDPKPVARIRSCLNRTGLDGQDRTSEEVKHDRILVTGSAINGSRPPLTSPTSHYPQAAALYRATAEAIAEGPDHDDAWFCGGGVAPAEFDARLEHGTFVRGPATRSGNGDGLVQGRACRC

SEQ ID NO: 61219 - protein, 285 aa, Zea mays
  Coding DNA Sequence Number=SeqID_19440
  Subcellular localization annotation: CTP_CleavageSite=36; ConfidenceScore=5.08e-01
MNRLVRRVRVRPASLRNWLAGPVWQPLCAVTFFHPRASTTRSHASVRLWIFLTRGLHQLSSSQPPSEHGGRADEAGMARGQTRPHLAAIRPQQTIANLPFVHLCTHHQKHREDSEREAAIGDSNPRRNPGRDCDLGQSVWPAGWTSRRATDGDAPMRHVAPFHPRGVALDVAGTCVVSLQTRARCEDHQSKSFVVEPQSARTATPPPPVRGLHRRLSSSIIVDALAWVGLYATLVRSPTFPFCLLLAIAAECLSPRMFLYCQRDLHLREWRRRRVPVSEKEDSVC

SEQ ID NO: 61220 - protein, 93 aa, Zea mays
  Coding DNA Sequence Number=SeqID_19441
  Subcellular localization annotation: CTP_CleavageSite=46; ConfidenceScore=5.66e-01
IALATPFSSTASHSPHLREPQPSSAKPSTLHQASTPSLRTRRDRARRDHASKLRRPGPPVPDRHELRPDLPAPRLRRRLPELRQAARPLGGTT

SEQ ID NO: 61221 - protein, 149 aa, Zea mays
  Coding DNA Sequence Number=SeqID_19442
MGAAACTEGHFVEQTEQRGEWLGACCCGGADSEVEHVGNVGARWVSAPSQARVRRADVGLGEGGTHGLDTAGAMAKPTGELAGANPRSGARPSMALLTDLAMASMKEHMARNLDGARSGGLQVRKEEDIGGKQASVLEKMGAAYCNLVA

SEQ ID NO: 61222 - protein, 380 aa, Zea mays
  Coding DNA Sequence Number=SeqID_19443
MKQIGPQGKNVIGFMFALSRLASTLCTIVLLAPDHLPTPALISHRRHCPGAPASLRPDQPRDLQPPPRVPLSILSSVPVVISSPIPDLKSPHPGSPRACTIVIFSPISDPKSLRPGSPRAWIQAVLRVGEAVAVNLTYTLSHVLDESVSLANPRDGRAGTADAAPRRCVHIQYWCTVLSARPAATAPSSVSRNPRGLSQIRAHDILRPRSRVLHGRRHPPPRSLIRDILHPWIAVLGSLRVRPLHGAVPPPALARVTPPLVHRAPARPALCRTLLGILHRRSRHHRARAPSMEGAAPAILAPLPTIPFHRRYTHATRGARYYSAFSTSASMVPTWPAAVVVAMLKADPGPHPNIFLKSSDPPPSSAACVASSIYSPARMM

SEQ ID NO: 61223 - protein, 55 aa, Zea mays
  Coding DNA Sequence Number=SeqID_19444
MDGVKLEAEGEEARERPGAVLGEMGCGSGETEDLGPHSLLSPVERVDLVGGAMGV

SEQ ID NO: 61224 - protein, 69 aa, Zea mays
  Coding DNA Sequence Number=SeqID_19445
MLEQQLGTTWEKPVTRDVHGWERENGVERRKRGMTRFKGAGGYVWLAKRGGVNDWCRPRPWESSCPASA

SEQ ID NO: 61225 - protein, 179 aa, Zea mays
  Coding DNA Sequence Number=SeqID_19446
MAALVSTIATMGDSVSGPIRKKSVGKFNQEWGMVFCAIVSFLYFSPIGCDLGVQGKIRLFNVSHFWLFFLFSKHNCKNLDSFVYPTYLGVLRWKASRMLGRQFPKGIWLGIAMDAGTRSPAEPWLCEGDFGFLAKWSSGWGSGEFRGAQVDRVEAIVGVARVRVRWFTMTEPWQQWQRL

SEQ ID NO: 61226 - protein, 161 aa, Zea mays
  Coding DNA Sequence Number=SeqID_19447
MTTSVSARAHRLAVFSERAPWRAPAARSPGLGCTRRGRLPGAPRQHALARRGGWPGAAAARPARCSPGAGARQPGAAAGAAARSPGAAAARPARRLARRGSGSPGAVLARRGSTQPGVAARRGCPAAGQRRLVTAVVVNPNCHHLNGPRTPIDGPVCLPMS

SEQ ID NO: 61227 - protein, 228 aa, Zea mays
  Coding DNA Sequence Number=SeqID_19448
MDSGSDSDGAPEELTAVQGVAKHEETSKVEKDSVLRSFNFYTFFVLDVYIVLCMTRGVVLWPSSPMIIMPYGHVGCLCRVTREGKERRKRWAQRRTSSKPDKKAPKEVEDEDTKKSEEHEETNTMPGMLPTSVIEILAAREKQTFASDSEEENVKQKVQRRKKRMKTDGCWSVRPETILLKDVRSTQHVKNALDFLEHRKNRVPRSNAVLKNASKALRLLSSKAYPFV

SEQ ID NO: 61228 - protein, 107 aa, Zea mays
  Coding DNA Sequence Number=SeqID_19449
MVKPQDEQSDLEQRALEIAESGHRNSNSGTTVFVGASSGEEDEPDMRAPATSDPTATQAREIMTGAAVAWAWWLSGRDVELSCKAHPSASQQARARIRKPGGLGWAR

SEQ ID NO: 61229 - protein, 187 aa, Zea mays
  Coding DNA Sequence Number=SeqID_19450
MTERDTAQFFLPVGTCRPPSADDNRLHCSLCCSAAERGGGGGGWGEANALTGAEEATGALVSTQGLSSSSREQEPREAATPGGPESGARKVREAMGNRRTGEREREGRAGGASWWRKNAVIGAEEATGALVSTQGLSSSSSSREQEPREAATPGGSESAARKVREEDSEYYRGSRRRRRRHRVYRKP

SEQ ID NO: 61230 - protein, 142 aa, Zea mays
  Coding DNA Sequence Number=SeqID_19451
MGKNNKRKREPTPPSEEFGDSEYSEEEFSSESEGSPAPIPLRESSDDSDDSQGLAAEVWTYIRAVERSGLEGSDESEYSSDEEDSDGGGEDEDDDDDDDDGGDGDGDGSGSGGGGGKDGDGGGSSRGSTRGGNGGGSNRASG

SEQ ID NO: 61231 - protein, 196 aa, Zea mays
  Coding DNA Sequence Number=SeqID_19452
MAAIVEKLDTRRELEGEREGRCDWRKKSRARILDAMQNVVKNICDKAKALTFLGLQQPHCGGRRAARLSPAAGLQDPRAQAPEKLSREEGDLVPCVKKRREIRCLRDEEESAMHEKTPVFRRARGARECPCSAKSPSDDGSSPRECEAVSGGSFERETGRRRLCEGDREEEASQERTGKLFPTCCGGERNHRAPLR

SEQ ID NO: 61232 - protein, 700 aa, Zea mays
  Coding DNA Sequence Number=SeqID_19453
  Gene Ontology: Mol. function=binding; Cellular component =intracellular; Biological process=metabolic process
  Homolog annotation: Hit_ID=Q2QNV4; Match level="QueryCoverage=80%, HitCoverage=68%, E-value=5e-92, Identity=27%"; Hit description =Pentatricopeptide, putative, expressed
  Pfam annotation: Domain name=PPR; Domain location=103-137; Score=8.2; E_value=0.79; Accession=PF01535.11; Description=PPR repeat
  Pfam annotation: Domain name=PPR; Domain location=272-306; Score =20.5; E_value=0.0062; Accession=PF01535.11; Description=PPR repeat
  Pfam annotation: Domain name=PPR; Domain location=32-66; Score=13.0; E_value=0.21; Accession=PF01535.11; Description=PPR repeat
  Pfam annotation: Domain name=PPR; Domain location=398-432; Score =40.6; E_value=5.3e-09; Accession=PF01535.11; Description=PPR repeat
  Pfam annotation: Domain name=PPR; Domain location=433-467; Score =17.3; E_value=0.057; Accession=PF01535.11; Description=PPR repeat
  Pfam annotation: Domain name=PPR; Domain location=469-503; Score=9.3; E_value=0.59; Accession=PF01535.11; Description=PPR repeat
  Pfam module annotation: Pfam domain module=PPR::PPR::PPR::PPR::PPR::PP R; Domain location=103-137::272-306::32-66::398-432::433-467::469-503
MGDPLAALLRSGGNPHSVHGVAIKLGCIVSTFLCNNLLYAYLRRQVPADARRLFDEMPRRNLVSWSVVISGSAHHGVLAEAFALFSHMLHGAGHGSWDRPDSFTLGALVAGCSRARDVDAGMQVHACVAKFGVDEDDSVAAALVDMYAKCGWVDSSWRAFTLAPQRSVLSWTSMIACLVNQGSSGYYDTSLLLFKKMLALKVWPTNATYSCILKVFDTPDLLSVGMQLHGCLLKMGTEVDTALGTALMTMYGRCGGVDEIPRLACRIRHDALSRTALLGAYARTGYNAEAIGVFKEMIMKNMAIDQSAMTDVVISIVLKLKMLRKGLGSPVFCITSVLRASSSISNLAVGLQIHSRTLKLGIDDDNSVQNALVTLYANCGSVQVALKIFNSMSNRDIVTWNALLTSFSQHGSEVAAIQLFDLMQEEGICPDAYTFVGLLSSCSRMGLVKEGCEYFNEMKEKYNLEPKMVHYTCMVDLLARAGRFCDAMDFIDAMPYEPDQILWEALLASCKVHGNLGLGRIAAKKILEITPHDYSAYIILSSIHASVDMWDEKYWNRTVFDTQRARKDTGRSWIDAQELSENIFDALQIGVTRSSSSSAPSTQPTTTAVPLNRHPLQRTATAAPVPRPPTSPPPVDATSVPSAMSAPTTADVAKMIEDLSNTVTNLQMTMVTLQKEKSSSSSTTNGGIDGQHHNDRPPRF

SEQ ID NO: 61233 - protein, 48 aa, Zea mays
  Coding DNA Sequence Number=SeqID_19454
MERKQAAYSNLVRILFFHRRGLLHSLVDHLWSQLNGCIGDCRMRVFKV

SEQ ID NO: 61234 - protein, 278 aa, Zea mays
  Coding DNA Sequence Number=SeqID_19455
  Homolog annotation: Hit_ID=Q411K9; Match level="QueryCoverage=77%, HitCoverage=11%, E-value=6e-07, Identity=34%"; Hit description =Hypothetical protein precursor
  Subcellular localization annotation: CTP_CleavageSite=81; ConfidenceScore=5.73e-01
APGEQKKSPPPGVALPRPASSLPHLVPAPTRSWRRLAQPRRPCSARWQARPPARGTASPPRPTSLPAPTRQGRARSASPVSARGVSAPAGPDVALPAPPWWLPCAAACPLLAQLAAVAGRRGTIADMARSAPAQPHGSRSVLDPGAPPTAFSRRVSAARARFGPSMCAARSQSVSAALRARARVRNRGVVRFAIVPLMGLGVCDSLCQVIPCWVTLVVINGEALALYVDVYSPLLYTPAGDVRIIGGDENDGFGIDYGNGEDEAVEGDFQEFQDYDEF

SEQ ID NO: 61235 - protein, 178 aa, Zea mays
  Coding DNA Sequence Number=SeqID_19456
MATAFGSREKRRFNRVMDSLGFDYPDYERFEGEAKVGGKKKARVVSIMKRQAMRSIEEDKNKIISKRLKVSGTEISKLKVKSSKLKKRKSVESSRAEEEESAPPKQVTETPLASSICVTEILEKRTTPSIADEVAEVPQEAESSGGPFGTTLLEIDRITANVVHERETAEVVAAETLV

SEQ ID NO: 61236 - protein, 121 aa, Zea mays
  Coding DNA Sequence Number=SeqID_19457
MSGWHGFTSRGSRELGRGIYGIEEAQRTSILCERQWQTVCVSRVQECMEKQQEARDEELKTQGVELLIGFEAGVEEAHEPLMKNLPLDSLEAPSIVSGKAKLEGGVRRIERKSLEWILCLA

SEQ ID NO: 61237 - protein, 568 aa, Zea mays
  Coding DNA Sequence Number=SeqID_19458
  Gene Ontology: Mol. function=Rab GTPase activator activity; Cellular component=intracellular; Biological process=regulation of Rab GTPase activity
  Homolog annotation: Hit_ID=Q69NG6; Match level="QueryCoverage=69%, HitCoverage=68%, E-value=1e-159, Identity=72%"; Hit description =Putative GTPase activating protein
  Pfam annotation: Domain name=Chromo; Domain location=89-139; Score =22.2; E_value=0.0019; Accession=PF00385.14; Description='chromo' (CHRromatin Organisation MOd
  Pfam annotation: Domain name=TBC; Domain location=311-506; Score= -61.4; E_value=0.0033; Accession=PF00566.9; Description=TBC domain
  Pfam module annotation: Pfam domain module=Chromo::TBC; Domain location=89-139::311-506
MLHMMLVFHPQLDDQTKVANCVIVMGMRVAAVALDMEAREAFLADAYQHLADVPDFMSCSMLACSRSSSAHLRPRQLAGRAIHNGVVILEPLRVEQACLAHGVRQVLVRWRGEPAESASSEDLDEFRIMYPDFQLKDELGLEGEEMSCGGARTGAAVTKEYEKLRRQCHHVLHCNRGNGLNVINEFLNEDFSDGAEGSESPYSNGASKRACVMPRELKSLGSKAEESESSNWDVVESIDEDTSELTSVDPCMIESESSESESSYEEDPDRTPVSTNMEESCDPKPRFVRTASAKSDIFLSDRTPEDFTTWQRIIRVDAIRANTEWVLFARNQAEVSKEKALQSAISVGLKDFDHLEPYMIYHAARLVALLEAYAVYDPEIGYCQGMSDLLSPIVAVMEEDHEAFWCFVGFMRKARHNFRLDEVGIRRQLKTVSQIIKLKDSQLYRHLQQLQAEDCFFLYRMVVVLFRRELTFEQTMCLWEVMWADQAAIRAGIGRSTWARIRLHAPPTDDLLLYAIAACVLQRRKLIIEKYSSMDEILRECNSMAGQLDVWKLLDDAHHLVVDLHHRI

SEQ ID NO: 61238 - protein, 68 aa, Zea mays
  Coding DNA Sequence Number=SeqID_19459
MWRYGAPIGGGALTNDATAIATAAITVGQEGLRMHETVDQFSTCHATLTHALIGHEIKHLAIAFSGCQ

SEQ ID NO: 61239 - protein, 143 aa, Zea mays
  Coding DNA Sequence Number=SeqID_19460
  Pfam annotation: Domain name=DUF179; Domain location=68-142; Score= -79.2; E_value=0.018; Accession=PF02622.6; Description=Uncharacterized ACR, COG1678
MAYAQAAAASARGGARGWRRATAHQSRLASFRAQLYFKEQHGDPPVASSTQLPAVQTGSDRWAHPLMKPEKGCLLIATEKLDGSHIFERTVILLLSSLGPDGVILNRPSLMSIKEASGSICADDADIACAFAGRPLFFGGKAD

SEQ ID NO: 61240 - protein, 69 aa, Zea mays
  Coding DNA Sequence Number=SeqID_19461
MVNTDNEKDGSNKNRDNSCAALGLCIEQPNIQPHPQATASPSKAVAAPSALEMATGTNPPGFDIPNSYP

SEQ ID NO: 61241 - protein, 116 aa, Zea mays
  Coding DNA Sequence Number=SeqID_19462
  Homolog annotation: Hit_ID=Q2RA23; Match level="QueryCoverage=44%, HitCoverage=6%, E-value=2e-17, Identity=76%"; Hit description =Expressed protein
MVLNNSDTRSAAYRIYLNLTRIFLLFKREGLSTFEIAVSTAQCETVPWLLRHRKIYRCASLRRRDISTMIFLGGLEKLDCQSAACNTQGKTGDQAKFNRKGIKLGAYHASEVLKGN

SEQ ID NO: 61242 - protein, 62 aa, Zea mays
  Coding DNA Sequence Number=SeqID_19463
  Subcellular localization annotation: CTP_CleavageSite=30; ConfidenceScore=5.07e-01
MVKTFGSKTVQIAMNAVVTSHLLACLYSTAAFENKSPTGDVRYPPPGTRRSSLVSWAMLWLE

SEQ ID NO: 61243 - protein, 61 aa, Zea mays
  Coding DNA Sequence Number=SeqID_19464
MEFPKRGRAFLQGSLRRSPKATIPGAATGADENASSKHLVPVGAASPKRKKGIKNKLNYNS

SEQ ID NO: 61244 - protein, 77 aa, Zea mays
  Coding DNA Sequence Number=SeqID_19465
  Subcellular localization annotation: CTP_CleavageSite=59; ConfidenceScore=5.33e-01
MEAGSRTAEASGTRSTAACWASPRDRRNVSRGARHGTPRGAGPSVAADESRVFSPDSTSCERKFGTVDLSNARTSLL

SEQ ID NO: 61245 - protein, 222 aa, Zea mays
  Coding DNA Sequence Number=SeqID_19466
  Gene Ontology: Mol. function=peptidyl-prolyl cis-trans isomerase activity; Cellular component=chloroplast thylakoid membrane; Biological process=protein folding
  Homolog annotation: Hit_ID=Q6ZLL2; Match level="QueryCoverage=85%, HitCoverage=84%, E-value=9e-35, Identity=62%"; Hit description =Immunophilin/FKBP-type peptidyl-prolyl cis-trans isomerase-like protein
  Pfam annotation: Domain name=FKBP_C; Domain location=136-216; Score =1.8; E_value=0.0027; Accession=PF00254.18; Description=FKBP-type peptidyl-prolyl cis-trans is
MMLLAKLGAPSVPGKRRVEEDAISCRIETYHGCVMDRRKLLLVPAISMAIASFQYTFVKGIAKAEFADRLHSISSMPLAICKGGLFAVAGAIAMVPALRGKDYGKTKMRYPDYTETESGLQYKDYFHGKIQDLRVGDGPSPKKGETVVVDWDGYTIGYYGRIFEARNKTKGGSFEGGDKDFFKFKVGSGQGQRALDFVLRNQGLIDKTLLFDIELLKIIPNQ

SEQ ID NO: 61246 - protein, 103 aa, Zea mays
  Coding DNA Sequence Number=SeqID_19467
  Subcellular localization annotation: CTP_CleavageSite=60; ConfidenceScore=5.68e-01
MDRLPQSADHPDNMQGRSRFRRQVVNRLAQSRGQSAPPQRASPGNPSRTTAPSTSQSQTQVSKVNGKGNGELEQRTSLPLHNGIMFKLPLVFIAFLLLIRNFW

SEQ ID NO: 61247 - protein, 69 aa, Zea mays
  Coding DNA Sequence Number=SeqID_19468
MVSLRRRRPFQLMVLRRLRELKKIVPAGARRRKADVDVVLRRTAEYICALELKVALLRRLSHMYGYTWS

SEQ ID NO: 61248 - protein, 188 aa, Zea mays
  Coding DNA Sequence Number=SeqID_19469
  Homolog annotation: Hit_ID=Q10RE9; Match level="QueryCoverage=44%, HitCoverage=34%, E-value=6e-10, Identity=45%"; Hit description =Expressed protein
TFSSACFNPTVPMRSIPLTDPCALVNCGQGGDCEKGAGSSYQCRCQPGLRNMFNLTSMPCIGGNCNRFLKQRCLFWHVWGRLRQARTGKPGCTSRKWSLLVLAECRIIHCHGIQRLDYYWLLQYRDLGLLILFTVNETSKQQTLKPQGKLRNMKANEYTGGQREESLVREAIDRMKAVGGMGGRTINF

SEQ ID NO: 61249 - protein, 160 aa, Zea mays
  Coding DNA Sequence Number=SeqID_19470
MEPYFPLFSGRHVIFVKFFYPKSTKNRHLQQCLLQPYRADAEHSSHRPHVWGRLRQARTGKPGCTSRKWSLLVLAECRIIHCHGIQRLDYYWLLQYRDLGLLILFTVNETSKQQTLKPQGKLRNMKANEYTGGQREESLVREAIDRMKAVGGMGGRTINF

SEQ ID NO: 61250 - protein, 133 aa, Zea mays
  Coding DNA Sequence Number=SeqID_19471
MSELARCSAARLLLLLPVVFLVLALLGGARHAGGASVCDTANCGKGNCSETPAPALLPPGYECNCDPGWFLRQRLLEVKPQPDASATHGWLCFDAESCAAATATAGLRCYGSGRVITLRPPKKQQKIVIPEFM

SEQ ID NO: 61251 - protein, 80 aa, Zea mays
  Coding DNA Sequence Number=SeqID_19472
MENNGGHPVTSKSTISIHSARKGMGNDDMDRLRGTMNRLIMAVRKYHWYNRVIAEGHLHLETVCGHHNCKVEATSLSSVA

SEQ ID NO: 61252 - protein, 33 aa, Zea mays
  Coding DNA Sequence Number=SeqID_19473
MPASRELVPYLEGWVRTLHKSPLLRILVSSRLK

SEQ ID NO: 61253 - protein, 107 aa, Zea mays
  Coding DNA Sequence Number=SeqID_19474
MAPPPPALDLRCSDAGSLATKNAWSGKISMEGGCTDVGTSSGGVPSSSAGEVLALELGGESSTSASRASVGFYDATTKGVRNANVGDRSGAGGIQNVGKRRRTARAL

SEQ ID NO: 61254 - protein, 121 aa, Zea mays
  Coding DNA Sequence Number=SeqID_19475
MAGGKGGKGKCHSFEGKRKRPPSPPSEDFGGSKFSDEEFSSEYDSSSALVSSAVSSDDSDDSMGLSVADRAYIRSIDRVELEGSNDSEGDFSENFSEEEEDSEEGGGGDDGDNAGGKMPPT

SEQ ID NO: 61255 - protein, 406 aa, Zea mays
  Coding DNA Sequence Number=SeqID_19476
  Gene Ontology: Mol. function=transcription factor activity; Cellular component=nucleus; Biological process=regulation of transcription, DNA-dependent
  Homolog annotation: Hit_ID=Q84ZA1; Match level="QueryCoverage=67%, HitCoverage=78%, E-value=4e-33, Identity=60%"; Hit description=AP2 -domain DNA-binding protein-like
  Pfam annotation: Domain name=AP2; Domain location=129-193; Score =105.7; E_value=1.3e-28; Accession=PF00847.10; Description=AP2 domain
MPAAYIYQAREREPHTQSQHTQPPRTALLASIAISRHIDLRTKLVVQMDRVPPPVSMQVAAMQRHQQQQQFVHHLQQVHQQGTQHEQPPPPHQNGSSSSGRTGGGRKCCPLRRSRKGCMKGKGGPDNQQCPFRGVRQRTWGKWVAEIREPNRGARLWLGTFGSALEAARAYDAAARTLYGDCARLNLQLVPPSAAAAAAGGGGPAVVASPSPDTVAGPAAAAGGGGHNCHHQYLQQQHAMAAPMMMMHSSCCSADGSSSNSDSISNSCSSPVTTAASPAYSHHQTMFQTPALQPSCGAMTMAAAAPHVQGFHVGDDDTTTAMAMHRHQQMMRELAEAPLHQEADDFEDFVTRLPKAEDFGLQGFQEVAPEVFDDAAGIWDHAAAWEPPTMMIDSGAQPQQQLVVPL

SEQ ID NO: 61256 - protein, 64 aa, Zea mays
  Coding DNA Sequence Number=SeqID_19477
MDEIMNKVGVYWMGPPANKEISAGDDLEVCFYPLFPLIQMGGTKGKTLVPLSCLFFADCVADVS

SEQ ID NO: 61257 - protein, 206 aa, Zea mays
  Coding DNA Sequence Number=SeqID_19478
  Gene Ontology: Mol. function=coenzyme F420 hydrogenase activity; Biological process=transcription
  Homolog annotation: Hit_ID=Q015W8; Match level="QueryCoverage=91%, HitCoverage=66%, E-value=4e-47, Identity=58%"; Hit description =Homology to unknown gene
  Pfam annotation: Domain name=FrhB_FdhB_C; Domain location=1-115; Score=-56.8; E_value=0.011; Accession=PF04432.3; Description =Coenzyme F420 hydrogenasedehydrogenase, beta subunit C terminus
  Pfam annotation: Domain name=FrhB_FdhB_N; Domain location=1-50; Score= 3.7; E_value=0.0058; Accession=PF04422.3; Description=Coenzyme F420 hydrogenasedehydrogenase, beta subunit N terminus
  Pfam module annotation: Pfam domain module=FrhB_FdhB_C::FrhB_FdhB_N; Domain location=1-115::1-50
MDSNNVFYPLCSDPDDRLAPRPVLARTPDEVIAAKGVKPTLSPNLNTLALVEDLVVGYMGVPKYAGVSMTQHPQYITVRNDRGQEMLNLVAGLLESTPTISSGSRQPFVMETVKADDAAKLGKGPSKPAPRFVGDILAFLLNLVGPKGLEFARYSLDYHTIRNYLHVRRAWGKQRAEQHIPGYAKKIVEAYDKDGRIEAMVTQSGD

SEQ ID NO: 61258 - protein, 105 aa, Zea mays
  Coding DNA Sequence Number=SeqID_19479
MGLDFCLQSSLTALALILRVLSDLEDEEEAREGRRSPGDEDEGDEACKQREREVLEAMVAEIVSPQYLTGDKTEDRVEMEESCLEPLRETTVTGPPHEFRLMSTL

SEQ ID NO: 61259 - protein, 255 aa, Zea mays
  Coding DNA Sequence Number=SeqID_19480
MGRRETEREGGKPEGDRRKRGNPRPSCLSRAQVGCACSRGLQAPAWEGARGMHAPSRPPRAANLSYECPVPSFYRRKERTQVGRGGGSSEVEVESEPWGWARRSSSSSEAEAEFEPWGWARRSSSSSGAEAESEPWGRATRSSSSSGAEAESEPWGQARRSSSSSGAEAESEPWGRARRSSSSSGAEAESEPWGRARRSFLWRPRPDLAAVSLTLSSGTAIRAAQAALSPCQAGQWSGEVTAVTSALSTGGRASG

SEQ ID NO: 61260 - protein, 194 aa, Zea mays
  Coding DNA Sequence Number=SeqID_19481
MADIVICSNITMGTAIDISLLLEFTNLIIRTKLSNSYGLVVKWIHLSGRIPRQIHSMQEQSSETDSNSTNPINIFVKSFLDLLSAVRTHETWKDIENPDPWPSSKWKEIEESASAAPWHPLRPPPLPRLPARETVAIVPLPRAARDDPLPRDSGVFATHGVTLYADDGGELHDHLLRPAPKGASRRSRAKLQKK

SEQ ID NO: 61261 - protein, 407 aa, Zea mays
  Coding DNA Sequence Number=SeqID_19482
  Gene Ontology: Mol. function=sulfotransferase activity; Cellular component=integral to membrane; Biological process=amine metabolic process
  Homolog annotation: Hit_ID=Q69RG0; Match level="QueryCoverage=78%, HitCoverage=93%, E-value=1e-103, Identity=58%"; Hit description =Putative STF-1
  Pfam annotation: Domain name=Sulfotransfer_1; Domain location=142 -403; Score=275.7; E_value=9e-80; Accession=PF00685.17; Description =Sulfotransferase domain
MATAAGGKEIGWPRLHHRPDVQPLLRPDTRCYLLPNKAPEGAPHVLVMSSNLELCSACLDGRAKLDHVVSSQVQFFLILIIRTSTTAVFQSTLPKEEFGDLVAALPSRQQSILELRLYQGFWLPEHWVPGTIAVQERFTPSPDDVILASYPQCGTTWLKALAFATAARTAYPPGGARHPLRRLNPHDCVPFIDEIFASGEEAKLEALPSPRLMNTHLPYALLPAPVTATATGCRVAYVCRDPKDMVVSLWHFLRRAKPDLLFADTFESVCDGTVVVGPVWDHVLSYWRASVAAPDRALFLRYEDMLRDPGGNVRRLAEFMGRPFSAAEEAAGDVAAVVELCSFDEMKGLEVNRPGSGTAGRYRPMPRDAFFRKGVAGDWANHMTPEMAARLDGIFREKLQGTGLIFS

SEQ ID NO: 61262 - protein, 143 aa, Zea mays
  Coding DNA Sequence Number=SeqID_19483
MGGDDEETASQCARSVERIEVEENGSEMQKLNCCLVVVRTCIRVPTLYQRASALDDLFDSSLSFKIMGAVFSLLAVAAVAVAAAIVSFVVGPAVSSVCPLVTMVAPGVAGQVISRAAFLANPQLYFAVLHKDGGLAAVRMFAG

SEQ ID NO: 61263 - protein, 101 aa, Zea mays
  Coding DNA Sequence Number=SeqID_19484
  Subcellular localization annotation: CTP_CleavageSite=21; ConfidenceScore=5.36e-01
MGAVFSLLAVAVAAAIVSFVVDPAVSSVCPLVTMVAPGVAGQKLPEKLSVWQSATVFGGQKLPEAETNRAISRAAFLANPQLYFAVLHKDGGLAAVRMFAG

SEQ ID NO: 61264 - protein, 226 aa, Zea mays
  Coding DNA Sequence Number=SeqID_19485
MGRHWTARSLRCLVLSTNSDRSSSVHVPAGMLNSGSCLAGGHDGNNDQPNGDGGGQQYEGTGGKKQLESSRLKKSSGNKDKADAAEDDYPNPKYCTNNTSGGTSVAGAPYCVGVGVGGGGGGYGNSSRCGGGGDGDSYGNSCPYGTGGNAPYNNAPAAFWAPQDGARSPLYINTQAVHVYGMPCVSNNDNSNDDDKRTKRGNGFFGPVFHAAGHFLDRKFGFDGRD

SEQ ID NO: 61265 - protein, 132 aa, Zea mays
  Coding DNA Sequence Number=SeqID_19486
MDLASLGGGWLRHGTEQYCCCGEVLTSPVKGQRGFGFGILHDVTMDVACLCACSLVKSLAGCFPIENLPKLLHSLLFLSELGVQLVELLEANRNYNMTLGSQSPKKSRAEPRPSSSLESEHPKGREDQRTCW

SEQ ID NO: 61266 - protein, 556 aa, Zea mays
  Coding DNA Sequence Number=SeqID_19487
  Gene Ontology: Mol. function=binding; Cellular component=trans-Golgi network; Biological process=protein transport
  Homolog annotation: Hit_ID=Q8RZX0; Match level="QueryCoverage=99%, HitCoverage=59%, E-value=0.0, Identity=78%"; Hit description =Putative adapter-related protein complex 4 epsilon 1 subunit
  Pfam annotation: Domain name=Adaptin_N; Domain location=41-545; Score= 113.2; E_value=7.3e-31; Accession=PF01602.10; Description=Adaptin N terminal region
  Pfam annotation: Domain name=HEAT; Domain location=152-188; Score =26.5; E_value=9.5e-05; Accession=PF02985.12; Description=HEAT repeat
  Pfam annotation: Domain name=HEAT; Domain location=331-363; Score =5.3; E_value=9.6; Accession=PF02985.12; Description=HEAT repeat
  Pfam module annotation: Pfam domain module=Adaptin_N::HEAT::HEAT; Domain location=41-545::152-188::331-363
MEQLRTIGRELAMGSQGGWGQSKEFLDLVKSIGEARSKAEEDRIIARELEHLKRRLADPDVPRRKMKELLLRLVYAEMLGHDASFGHIHAVKMTHDESLPLKRTGYLAVALFLDERHDLVILVVNTIQKDLRSDNYLVVCAALTAACRLIGEEAIPAVLPQVVELLAHPKEAVRKKAVMALHRFYQRSPSSVSHLVSNFRKRLCDNDPGVMGATLCPLYDLILEEPNSYKDLVIKLLKILAVLGSGDKQASGHMYTVLGDIFRKGDTASNIGNAILYECICCISFIFPNPKMLEAAAETTSKFLKSDSHNLKYMGIDALGRLIKINPDIAEEHQLAVIDCLEDPDDTLKRKTFELLYKMTKSTNVEVIVDRMIEYMINITDHHYKTEIASRCVELAEQFAPSNQWFIQTMNKVFEHAGDLVNIRVAHNLMRLIAEGFGEEDEGADSQLRSSAVDSYLRIVGEPKLPSSFLQRPHLTDDTVKWDSMDLGTTDAKLKLYAQFNIRTYTWFQKGCNFRIVLSQSIPVYALLLAYAISAILKTFAFEITLGRKIDLLPEL

SEQ ID NO: 61267 - protein, 56 aa, Zea mays
  Coding DNA Sequence Number=SeqID_19488
MGAPVVRCATGQVLFLVRGTVRHTLKECDMFRHFYNRPGASAEDGKKKGSDNREDD

SEQ ID NO: 61268 - protein, 166 aa, Zea mays
  Coding DNA Sequence Number=SeqID_19489
MATTFPARPASEYCLRLGANPRGIQDGPTILPLRASVLAEDEPRPFQSAAFCTQQRRTVLKRYTATTVTSPAWRKKKHGADDMSSPSEHGSVVVLHRHVQTALVQALGGTDFNLLGRSNLYSFAPKTNRMRSQHKLLDLCAAQPVVTTGSVNLRTLSQFTSQLSSL

SEQ ID NO: 61269 - protein, 59 aa, Zea mays
  Coding DNA Sequence Number=SeqID_19490
MTSQTTSCATSATATLAGLSIREKAVNVRLKKIHVTMTCGPRAKLQCSKWIEIFTVDPV

SEQ ID NO: 61270 - protein, 173 aa, Zea mays
  Coding DNA Sequence Number=SeqID_19491
MAGALDLSIAVALEEQSKSLKAQAKSLDSTQKLLQHICDRFDAQDACYRVLEASVTSEAADLASLHAGEGVVVTSLHADLEHQVASRLAKIESSVWDRVVAITADASTWVVALENIHAVFDSWRPRIKNSVDQGRQAARTWRANRVGSFSSRPRCPSSGGGAPICICDKRRRP

SEQ ID NO: 61271 - protein, 57 aa, Zea mays
  Coding DNA Sequence Number=SeqID_19492
MVVGVGRSTCTGGGARRRRGIRTNQGGTVQLNGSESFTRDQGRLMGFADGIKRYGGV

SEQ ID NO: 61272 - protein, 106 aa, Zea mays
  Coding DNA Sequence Number=SeqID_19493
MDREGGGRPWATAGHLLELGPEKVRAMVGAEGPATKGRAAAREARPHLGRGGRPSAWGRGAERHGWPRGGRGGAELLACHSPGGGRNVLAADAVKEKETGKKECGG

SEQ ID NO: 61273 - protein, 765 aa, Zea mays
  Coding DNA Sequence Number=SeqID_19494
  Gene Ontology: Mol. function=RNA-directed DNA polymerase activity; Cellular component=intracellular; Biological process=RNA-dependent DNA replication
  Homolog annotation: Hit_ID=Q8S463; Match level="QueryCoverage=99%, HitCoverage=39%, E-value=0.0, Identity=88%"; Hit description =Putative prpol
  Pfam annotation: Domain name=RnaseH; Domain location=334-461; Score =5.4; E_value=1.8e-05; Accession=PF00075.14; Description=RNase H
  Pfam annotation: Domain name=rve; Domain location=673-765; Score= -3.0; E_value=0.011; Accession=PF00665.16; Description=Integrase core domain
  Pfam module annotation: Pfam domain module=RnaseH::rve; Domain location=334-461::673-765
MKESDQLATSFITPFGMYCYVTMPFGLRNAGATYQRCMNHVFGEHIGRTVEAYVDDIIVKTRKASDLLSDLEVTFRCLKAKGMKLNPEKCVFGVPQGMLLGFIVSERGIEANPEKIIAITSMGPIKDLKGVQRVLGCLAALSRFISRLGERGLPLYRLLRKAECFTWTPEAEEALGNLKALLTNAPILVPPAAGEALLIYVAATTQVVSAAIVVERREEGHALPVQRPVYFISEVLSETKICYPQIQKLLYAVILTRRKLRHYFESHPVTVVSSFPLGEIIQCREASSRIAKWAVEIMGETISFAPRKAVKSQVLADFVAEWVDTQLPTAPIQPELWTMFFDGSLMKTGAGAGLLFISPLGKHLRYVLRLHFLASNNVAEYEALVNGLRIALELEVRRLDARGDSQLVIDQVMKNSHCRDPKMEAYCVEVRRLKDKFYGLELNHIARRYNETADELAKIASGRTTVPPDVFSRDLHQPSVKTDDTSEPEKASAEPETPSAQSEVPSAQPEAPSAQPEAPSAQPEVPSAPEGEALRIEEERGGVTPNRNWQTPYLQYLHRGELPLDRAEARRLARRAKSFVLLGDGKELYHRSPSGILQRCISIAEGQELLQEIHSGACGHHAAPRALVGNAFRQGFYWPTAVADATRIVRTCEGCQFYARQTHLPAQALQTIPITWPFAVWGLDLVGPLQKAPRGYTHLLVAIDKFSKWIEVRPLNSIRSEQAVAFFTNIIHRFGVPNSIITDNGTQFTGRKFLDFCEDHHIRVD
